United States Patent Application Publication US 2012/0023611 A1 - sequence listing, part 2

SEQ ID NO: 3952 - DNA, 846 bp, Zea mays
  misc_feature (1)..(1): n is a, c, g, or t
  misc_feature (13)..(13): n is a, c, g, or t
  misc_feature (447)..(447): n is a, c, g, or t
  misc_feature (484)..(484): n is a, c, g, or t
  misc_feature (492)..(492): n is a, c, g, or t
  misc_feature (495)..(495): n is a, c, g, or t
  misc_feature (499)..(500): n is a, c, g, or t
  misc_feature (509)..(511): n is a, c, g, or t
  misc_feature (513)..(513): n is a, c, g, or t
  misc_feature (519)..(519): n is a, c, g, or t
  misc_feature (527)..(527): n is a, c, g, or t
  misc_feature (532)..(532): n is a, c, g, or t
  misc_feature (538)..(539): n is a, c, g, or t
  misc_feature (542)..(542): n is a, c, g, or t
  misc_feature (552)..(553): n is a, c, g, or t
  misc_feature (555)..(557): n is a, c, g, or t
  misc_feature (559)..(559): n is a, c, g, or t
  misc_feature (562)..(563): n is a, c, g, or t
  misc_feature (566)..(568): n is a, c, g, or t
  misc_feature (570)..(570): n is a, c, g, or t
  misc_feature (572)..(573): n is a, c, g, or t
  misc_feature (576)..(577): n is a, c, g, or t
  misc_feature (583)..(584): n is a, c, g, or t
  misc_feature (587)..(587): n is a, c, g, or t
  misc_feature (589)..(590): n is a, c, g, or t
  misc_feature (592)..(592): n is a, c, g, or t
  misc_feature (596)..(599): n is a, c, g, or t
  misc_feature (601)..(601): n is a, c, g, or t
  misc_feature (604)..(604): n is a, c, g, or t
  misc_feature (607)..(608): n is a, c, g, or t
  misc_feature (610)..(611): n is a, c, g, or t
  misc_feature (614)..(615): n is a, c, g, or t
  misc_feature (618)..(618): n is a, c, g, or t
  misc_feature (621)..(623): n is a, c, g, or t
  misc_feature (625)..(628): n is a, c, g, or t
  misc_feature (630)..(637): n is a, c, g, or t
  misc_feature (639)..(639): n is a, c, g, or t
  misc_feature (641)..(642): n is a, c, g, or t
  misc_feature (644)..(647): n is a, c, g, or t
  misc_feature (650)..(660): n is a, c, g, or t
  misc_feature (662)..(665): n is a, c, g, or t
  misc_feature (667)..(700): n is a, c, g, or t
  misc_feature (702)..(846): n is a, c, g, or t
  Peptide Sequence Number=SeqID_10115
  Probeset Number=SeqID_18355
nataacaattggnccggcccccctcgtttggttcggcgagtatcatcctgatgctggtattggtgattctgacaatgctggcggcagtcacgaccggttcaggcaatgcgccgttttatgcgtttgttgagatgatcccgaaactggcgcactcttccggcattaacccggcgtatttgactatcccgatgctgcaggcgtcaaaccttggccgtaccctttcgcccgtttctggcgtagtcgttgcggttgccgggatggcgaagatctcgccgtttgaagtcgtaaaacgcacctcggtaccggtgcttgttggtttggtgaaaaacaaactccattgtttttaaacggaaaatagtttgtttttttgttatcgagattgaggtggggattactgattgcaggttccgactacatcaccaacaaaggatttggttgatgtaagtngttgcatacctgggatgttcattactttggagtaaanagcttttntgntganngattgccannntnaacggntatgcctnctcanactggnnttntctaccatanngnnnanacnnacnnngntnnatnntggatnnacncnnanctgnnnntnacngannannatnnctnatnnncnnnnannnnnnnntncnncnnnnttnnnnnnnnnnnannnntnnnnnnnnnnnnnnnnnnnnnnnnnnnnnnnnnnannnnnnnnnnnnnnnnnnnnnnnnnnnnnnnnnnnnnnnnnnnnnnnnnnnnnnnnnnnnnnnnnnnnnnnnnnnnnnnnnnnnnnnnnnnnnnnnnnnnnnnnnnnnnnnnnnnnnnnnnnnnnnnnnnnnnnnnnnnnnnnnn

SEQ ID NO: 3953 - DNA, 361 bp, Zea mays
  misc_feature (3)..(3): n is a, c, g, or t
  misc_feature (305)..(305): n is a, c, g, or t
  misc_feature (334)..(334): n is a, c, g, or t
  misc_feature (340)..(340): n is a, c, g, or t
  misc_feature (342)..(344): n is a, c, g, or t
  Peptide Sequence Number=SeqID_10116
  Probeset Number=SeqID_18356
tanggccggggttcattgattagatgaaagggagggatagtgaaggagcaaatatgagtggtcgcaacgacggtggtggacaaggctcggcgccaagagggttgcatccgactggttcattcggtaaccttccaacttcaagaggacaagtcaagaataacttgataaaggacatcatctttggggcaactaatcctccaccaagaacttaatgattttcggttatcttcttgtattgttgttttttttttatcttttcaagttcccactgatcttgtaaaatattccgaaataacacctcctcntcatcattcctttagcaaaaaacaaacancaaaancnnnaaaccaaaaacatgttg

SEQ ID NO: 3954 - DNA, 381 bp, Zea mays
  Probeset Number=SeqID_18357
accctgtaggtttagagctcggacaccattgtcaatgtgaaggggaagattcagggcaaggaggggatccccccggaccaacagggtttgatttttgccggcaaacaactggaggatggccgccccctagcaggcttcaacatccaaaaggagggcccccccccccttgtgctccgtccccgtggtggtcagtaagtcatgggtcgtttaaacccccaatgggcctgggtcgtctggtgccccccctccaaaaggaggttgtcaaagaaactgcggttcgtgccatgagtcgggtcagtgttggtttaaaaaaggaccggttgtgttgtgtgtgcgtgctcccccgaactatgaccaatcatgaataagttttatgtttcc

SEQ ID NO: 3955 - DNA, 1255 bp, Zea mays
  misc_feature (1)..(25): n is a, c, g, or t
  misc_feature (961)..(1255): n is a, c, g, or t
  Peptide Sequence Number=SeqID_10117
  Probeset Number=SeqID_18358
nnnnnnnnnnnnnnnnnnnnnnnnnactcaccagatcggtgatctgacggcgtggacccgatggccgggaaatgacccaaagagacggatcgcgggcgggttccaccgcgcggcctcgatttccccttaacacaacacagaggaagcaggcggcggcgatcgggcgatggcatggcgggcgagcctgtctcggagcctaaaggagatccgcgtcctcttctgtcagtcctccccggccagcgccgccgcccgtgagttcgtgaagaagaactatggtgacatcaaggctcgcaacccctccctccccttccttgtccgcgagtgctccggtgtccagccccagctctgggcgcgctacgatatgggtgtggagagatgcgtgaacttggatggcctgacggaagcacagattgataaaaagctggaggagcttgccaaggccggcgagtctcttaaaaccaaatagttttggaactctatcctgccatgtttaacgttcccaaataaatgatgccatatgggtgagcaattgttactctatcgttatctgtagttgtgcctggaattaagtctttaattggcttaactttgtgaaataatcactactcttttacttgccaaaaaaaaaaaaaaaaaaaaaaagcggccaaaaaaaaaaaataaaaaaaaaaaaaaaaagagcatagtcacctgcctatctatctagcgagagagagagaggaaagctagctagctagcatggagtgcggcagcaagaaggcagcaggcggtgtgttggcgctgctgcttctccagctggtgttagctccgacgacggcgacggcccgcctcctgcaggcggatacctccaccgtggttggcctggacatcatcgcgagggaccttggccatccagcgagaggcatcctctgtggcgaaacctgtgtcttcccaccatgctatacgcccgccatgggttgcnnnnnnnnnnnnnnnnnnnnnnnnnnnnnnnnnnnnnnnnnnnnnnnnnnnnnnnnnnnnnnnnnnnnnnnnnnnnnnnnnnnnnnnnnnnnnnnnnnnnnnnnnnnnnnnnnnnnnnnnnnnnnnnnnnnnnnnnnnnnnnnnnnnnnnnnnnnnnnnnnnnnnnnnnnnnnnnnnnnnnnnnnnnnnnnnnnnnnnnnnnnnnnnnnnnnnnnnnnnnnnnnnnnnnnnnnnnnnnnnnnnnnnnnnnnnnnnnnnnnnnnnnnnnnnnnnnnnnnnnnnnnnnnnnnnnnnn

SEQ ID NO: 3956 - DNA, 688 bp, Zea mays
  misc_feature (1)..(86): n is a, c, g, or t
  misc_feature (687)..(688): n is a, c, g, or t
  Peptide Sequence Number=SeqID_10118
  Probeset Number=SeqID_18359
nnnnnnnnnnnnnnnnnnnnnnnnnnnnnnnnnnnnnnnnnnnnnnnnnnnnnnnnnnnnnnnnnnnnnnnnnnnnnnnnnnnnnntaacttccggggttggttcgatatttggccccgagtgcgagaagcgtgggatgctcctcagggtggctgggggcagcatcattctgtccccccccctggtcatgactccccatgaagtcgaagaaatcataagccaattcggcgatgctttaaaggctacaaaggaacggattggagaacttaaatccaggaaaaattaacccatgctgctggttgtaacgcccccctgccatttaaaatgataattgattttttttatgggcgaaatgtttaaaatggctttggttaaggaaatgttttgttagcctcaagtaagtggggacatcccaacccctacaagcttgtgcctttaaaccaaaggataccagaagttggagtgctttttttaaggcttttgcgaatcccttaaagcgttaggacttttgtgaatgattttgtaaagtgtttgccaatatgtgccaaacataataacatgtgtaggttttgtgaatgattttgttgtggtgtctgttgatggtttatgtatgtggatccatccttgtgccatactaattaaatttgtatatctatgtgattatgtgtataaaaattggtgatttgnn

SEQ ID NO: 3957 - DNA, 726 bp, Zea mays
  misc_feature (1)..(93): n is a, c, g, or t
  misc_feature (694)..(726): n is a, c, g, or t
  Peptide Sequence Number=SeqID_10119
  Probeset Number=SeqID_18360
nnnnnnnnnnnnnnnnnnnnnnnnnnnnnnnnnnnnnnnnnnnnnnnnnnnnnnnnnnnnnnnnnnnnnnnnnnnnnnnnnnnnnnnnnnnnnccgagcgtggttgttttttgtactcttgcccaatgcgtgcggcacggccttcctgactcctttttttcttcatagctttgacaatactaaattacactttagcaacgaggaccgtcggcgagacaaaattaacaacactttgcctaacatttacactctagagtacgacaagtgccgaaattccagcagcttaaacagcgtaaagaagtgaatttttcacactttgtttaattgtgtcaggggatgctacgataacaacattttagagatgctttctaactaagggtttcttgttccgccgtaagacactccgcatggccccctatgggtttcatcagatcattactatcgaccaaatgacgactgtgctgttccaatgccatcttctgtttaaaattgatatccacatttctgtttgtcattacgatataacagttttcaaatccatagtattggttgttaccagtttttccatcagaaagcactcccgcccgcggagggaaggccgcttacccagtctcactcggaccctttcgggagggatagtgaccagttgaatccaatccaacagcatcagtgcgaagagatgatccatacagannnnnnnnnnnnnnnnnnnnnnnnnnnnnnnnn

SEQ ID NO: 3958 - DNA, 287 bp, Zea mays
  misc_feature (7)..(8): n is a, c, g, or t
  misc_feature (34)..(35): n is a, c, g, or t
  misc_feature (77)..(77): n is a, c, g, or t
  misc_feature (115)..(115): n is a, c, g, or t
  misc_feature (123)..(124): n is a, c, g, or t
  misc_feature (199)..(199): n is a, c, g, or t
  misc_feature (208)..(208): n is a, c, g, or t
  misc_feature (230)..(231): n is a, c, g, or t
  misc_feature (242)..(242): n is a, c, g, or t
  misc_feature (285)..(287): n is a, c, g, or t
  Probeset Number=SeqID_18361
tccaagnncttacgtaccgcggtgcctgccgacnngtcatagcttccttctattgagtgtcacgctagaaattcagnattcacttggcgcctgtcgttttaccaacccgtcgtgnactggggnnaaaaccctctggcctgttactctcaacttttaatcgcctcttgcagcacaatccgccccgttgcgcgcagcgtgnggcgtaatntagcgaagaaggggcccgcacnncgatcggcccntttcccaacccagttgcgcagccccgggatggcgcgtgggggnnn

SEQ ID NO: 3959 - DNA, 819 bp, Zea mays
  misc_feature (782)..(782): n is a, c, g, or t
  Peptide Sequence Number=SeqID_10120
  Probeset Number=SeqID_18362
gggtacctcgaggccggccgggaacccctttcgccagagccaccaaaggatatttcccttgggagacactcagccatcatgtcgaaaatctctgtcgccggcgttcgttccaacgtccaggagctccttgagtactccaacgagaccaagaagcgcaacttcctcgagaccgtcgagctccagatcggcctcaagaactacgacccccagcgtgacaagcgtttctccggaaccgtcaagctccccaccgtcccccggccccgcatggccctctgcgtcctcggtgaccagcacgacatcgatcgtgccaagcaccacggtgttgatgccatgtccactgaggacttgaagaagctcaacaagaacaagaagctcatcaagaagcttgcgcgcaagtacgatgccttcatcgcttccgacgccctgatcaagcagatcccccgtctcctcggtcccggtctgtccaaggctggaaagttccccactcccgtctctcacgccgaggacctcgccaacaagatgaccgacgtcaagtccaccatcaagttccagttgaagaaggtgctctgcatgggtgtcgctgtcggcaacgtcggcatgaccgaggacgagctcatcggtaacatcatggttggccatcaactacctcgtctccctcctcaagaagggctggcagaacgtgggctccctgaccatcaaggccaccatgagcccccccaagcgcctgtactagacagttgtggtgtgggtcgctgtggtcgtcgcattgcgctgcggcgggncgtcgagagatggcttgctgcggtaacgatctaacgg

SEQ ID NO: 3960 - DNA, 940 bp, Zea mays
  misc_feature (12)..(14): n is a, c, g, or t
  misc_feature (17)..(18): n is a, c, g, or t
  misc_feature (21)..(25): n is a, c, g, or t
  misc_feature (34)..(34): n is a, c, g, or t
  misc_feature (36)..(39): n is a, c, g, or t
  misc_feature (45)..(45): n is a, c, g, or t
  misc_feature (58)..(64): n is a, c, g, or t
  misc_feature (238)..(240): n is a, c, g, or t
  Peptide Sequence Number=SeqID_10121
  Probeset Number=SeqID_18363
agacattcctcnnnttnnttnnnnnattctattngnnnntttgantctattatttatnnnnnnntagattctttatttttttttcttttattattgggttagtatattctagactcattatagataataaatcgataatatatattcatttagttatacttaagtatcatttttcatatatacttagtataagtatttatatatatatgaattctagtgattatagactatctttatnnnaataataagaataataaaaaaaaatatgcaattaatataacaataaaaaaaaaaaataaaataacaggtacaaatattaaatcgaggtaccctttttatgattatgataaacttaccttccgtttttgtgcctttagtgggcctagtatttccggcaattgcaatggcttctttatttcttcatgttcaaaaaaacaagattttttagatatgagcagtaggaacaaatctcatatatttttttttagaataggaagcaattcgatgaattattcattcctaaaggtttacatcaaaatagtgctagttgatgaaagttacttcgtaaagaaagcagtgaaatacatttgcttagatttcttattaccttcaacaaaatataacaaaatatgagaaaagggagaaacaggaagacatgttttggatctcaaaagatacatgccacacagaagaaatacgggtagattttgtaacaggatgtcgaaaaccgattgatttcttctcggcctctatcagtctttttggttcattagggggtttattggttgcagcttccagttatgatggaatgaattacttatatttcatttcgtatgagtttgaccccgggctaatttcttttttgccacaaggggctacgataatggtctattcaaccatgtttctatttttaagtttttcttggtggcttctaattttt

SEQ ID NO: 3961 - DNA, 437 bp, Zea mays
  Peptide Sequence Number=SeqID_10122
  Probeset Number=SeqID_18364
ccggccgggatacttacctggacggggtcgacgagcgatcatcaaggctcgtggcctaggccaatggcccacattgcacttggtgggtgcgttggcttaccatctccccaagtgggagagtggacgtcataatttgtgatagagggggtacgcgttcggcgcggcccctgcaggcccctgccaaatctaaaaatattaattttggtccttggtgccggttgctgtgcgcatgatgtcgcgcggccccttacaaatctggaaatattacttttggtctttgggtgcgcaggttgctgtgctatgcgtgtgtttttataagcgtttacttttggcaaaaaaaaaaaaaaaaaagcggccgcaggacgcgagcggtcctactgcctctacgacaccgacgcctccacagtctacggcgtttacgctttcttcgtgctgct

SEQ ID NO: 3962 - DNA, 772 bp, Zea mays
  misc_feature (7)..(9): n is a, c, g, or t
  misc_feature (13)..(14): n is a, c, g, or t
  misc_feature (19)..(19): n is a, c, g, or t
  misc_feature (22)..(22): n is a, c, g, or t
  misc_feature (24)..(26): n is a, c, g, or t
  misc_feature (28)..(28): n is a, c, g, or t
  misc_feature (30)..(30): n is a, c, g, or t
  misc_feature (32)..(32): n is a, c, g, or t
  misc_feature (34)..(34): n is a, c, g, or t
  misc_feature (37)..(37): n is a, c, g, or t
  misc_feature (39)..(39): n is a, c, g, or t
  misc_feature (42)..(43): n is a, c, g, or t
  misc_feature (50)..(50): n is a, c, g, or t
  misc_feature (53)..(54): n is a, c, g, or t
  misc_feature (59)..(60): n is a, c, g, or t
  misc_feature (62)..(64): n is a, c, g, or t
  misc_feature (69)..(69): n is a, c, g, or t
  misc_feature (71)..(71): n is a, c, g, or t
  misc_feature (83)..(83): n is a, c, g, or t
  misc_feature (85)..(85): n is a, c, g, or t
  misc_feature (89)..(89): n is a, c, g, or t
  misc_feature (94)..(96): n is a, c, g, or t
  misc_feature (104)..(104): n is a, c, g, or t
  misc_feature (107)..(108): n is a, c, g, or t
  misc_feature (111)..(111): n is a, c, g, or t
  misc_feature (115)..(115): n is a, c, g, or t
  misc_feature (117)..(117): n is a, c, g, or t
  misc_feature (124)..(124): n is a, c, g, or t
  misc_feature (127)..(129): n is a, c, g, or t
  misc_feature (135)..(135): n is a, c, g, or t
  misc_feature (148)..(149): n is a, c, g, or t
  misc_feature (152)..(152): n is a, c, g, or t
  misc_feature (155)..(155): n is a, c, g, or t
  misc_feature (157)..(157): n is a, c, g, or t
  misc_feature (166)..(166): n is a, c, g, or t
  misc_feature (168)..(168): n is a, c, g, or t
  misc_feature (174)..(174): n is a, c, g, or t
  misc_feature (183)..(183): n is a, c, g, or t
  misc_feature (186)..(186): n is a, c, g, or t
  misc_feature (189)..(191): n is a, c, g, or t
  misc_feature (207)..(208): n is a, c, g, or t
  misc_feature (212)..(212): n is a, c, g, or t
  misc_feature (217)..(217): n is a, c, g, or t
  misc_feature (219)..(219): n is a, c, g, or t
  misc_feature (225)..(225): n is a, c, g, or t
  misc_feature (229)..(229): n is a, c, g, or t
  misc_feature (232)..(232): n is a, c, g, or t
  misc_feature (235)..(235): n is a, c, g, or t
  misc_feature (239)..(239): n is a, c, g, or t
  misc_feature (241)..(242): n is a, c, g, or t
  misc_feature (248)..(248): n is a, c, g, or t
  misc_feature (252)..(252): n is a, c, g, or t
  misc_feature (254)..(256): n is a, c, g, or t
  misc_feature (259)..(261): n is a, c, g, or t
  misc_feature (263)..(263): n is a, c, g, or t
  misc_feature (265)..(265): n is a, c, g, or t
  misc_feature (270)..(270): n is a, c, g, or t
  misc_feature (272)..(274): n is a, c, g, or t
  misc_feature (276)..(276): n is a, c, g, or t
  misc_feature (278)..(279): n is a, c, g, or t
  misc_feature (283)..(283): n is a, c, g, or t
  misc_feature (294)..(294): n is a, c, g, or t
  misc_feature (298)..(298): n is a, c, g, or t
  misc_feature (300)..(301): n is a, c, g, or t
  misc_feature (303)..(303): n is a, c, g, or t
  misc_feature (306)..(306): n is a, c, g, or t
  misc_feature (308)..(308): n is a, c, g, or t
  misc_feature (310)..(310): n is a, c, g, or t
  misc_feature (316)..(316): n is a, c, g, or t
  misc_feature (322)..(322): n is a, c, g, or t
  misc_feature (325)..(327): n is a, c, g, or t
  misc_feature (336)..(336): n is a, c, g, or t
  misc_feature (339)..(339): n is a, c, g, or t
  misc_feature (341)..(342): n is a, c, g, or t
  misc_feature (361)..(362): n is a, c, g, or t
  misc_feature (369)..(369): n is a, c, g, or t
  misc_feature (374)..(374): n is a, c, g, or t
  misc_feature (388)..(388): n is a, c, g, or t
  misc_feature (393)..(393): n is a, c, g, or t
  misc_feature (407)..(407): n is a, c, g, or t
  misc_feature (409)..(409): n is a, c, g, or t
  misc_feature (413)..(413): n is a, c, g, or t
  misc_feature (416)..(416): n is a, c, g, or t
  misc_feature (429)..(429): n is a, c, g, or t
  misc_feature (442)..(442): n is a, c, g, or t
  misc_feature (497)..(497): n is a, c, g, or t
  misc_feature (505)..(505): n is a, c, g, or t
  misc_feature (771)..(771): n is a, c, g, or t
  Peptide Sequence Number=SeqID_10123
  Probeset Number=SeqID_18365
ataaatnnnaacnnaaacnatntnnncnanantnaangnatnnaaaaacntanntgaannannntagancnctgtcagcaaananatangactnnnataacacncannaantatntnatacaanacnnnaaatgnatataataggaannatnccnantaattatananaatcantacccaganagngannnaaaatggaaagttaanncaanattananaataanaatngancanaccntnnttcaanacanannntannnantncggancnnngncnntttnaagtcaatatncacngnnanatntnangcagtntaacangcnnnagtccaccncantnnagaacgcacaataagcganngaaccgnaccanggatacagttagtnccgtnctggccaatgtcgngngccnttncggtggacggcgngcagtggaatttntacaacaaccggatcaagcgttatggcgcgaccggatcgttcgacttccgcagcnagtcgttngatgccttcgcgcgggtgaaatacgccacctatctcaacaccaacacgatgaaccagaccgcgctccgcaacgagctgacgcgcggccagaccaatccgaatggcggttcctacaacgcggcgggcgtatacacgccgctgggcatcaatccggccagctatttccgtaccgaggacgtagagcaggaactgctgtcgacgcagatcggtgcgaagtggcatcatgacggcttcaccgcctcgctcgagggggggcccggaccaang

SEQ ID NO: 3963 - DNA, 685 bp, Zea mays
  misc_feature (560)..(561): n is a, c, g, or t
  misc_feature (598)..(598): n is a, c, g, or t
  misc_feature (602)..(603): n is a, c, g, or t
  misc_feature (614)..(616): n is a, c, g, or t
  misc_feature (621)..(623): n is a, c, g, or t
  misc_feature (663)..(664): n is a, c, g, or t
  misc_feature (676)..(676): n is a, c, g, or t
  Probeset Number=SeqID_18366
gattcaggtgaaggtagcagctaccaatcgttgtttgttccttactttgtcatttgtgtttggttttcttcttcgcttctgagaatgtctagcagctgtgggtgtggaagtagctgcaagtgcggcagtggctgcaactgcaacagctataccgagaagacaaccacagagactctggttatgggcgttgcacctgtgaagacccagatcgagggtgctgaaatgggtgttgctgctgagaacgagggttgcaagtgtggctcaaactgcacatgcgacccttgcaactgctagtgaggtgttgttgatcaaagcttgaagcagagaatatgtgtaacaaaagtccatactgaataagaattgtgtgtctgttttgtgtttggttcaatctacaccgtttaaagttttagaataaagtgaccattgttcatcttcagcagattctaatgttctaggatttgttgctggtgtcttgagccatggttgctttgtgtttggtttgtcttgtctaaagtttagctaatctgaataattaatctctgcttataaatggaatactnntacgtccttatgaatgaataaaatgtattttgtatangcgnnacaaaaaaaannnaaaannnaaaaaaatcttgtcggccgccttggcccaatcgacttttnnctcgaccaagcntatgcttgc

SEQ ID NO: 3964 - DNA, 724 bp, Zea mays
  misc_feature (1)..(1): n is a, c, g, or t
  Peptide Sequence Number=SeqID_10124
  Probeset Number=SeqID_18367
ngccggggtgcgctgcggacgggtcggatctgagacgagacgatccccccctcccctcaaccggaacttgttttaccccatctcatcccactgactccacccacccacccgcccgctgcctccgccggatctcgtcggactcggatccgcccgaccacgaccaccccgcgccgccggcgtcgcaagaccatgacattaaaggaaatggtggtgctcggcacattccacatcaactcagaggtcgagaacgaatgacaccctgtaaaggtctgctactactcgccctatactgcgcagtacatttgactagggcgagcaactagttaaccgcgctgctggcgtagcaacggtctcacaggaaaaggggaggtggtaactgcttgattaacttccatcatgatcgtcactaccaggggcaagaggatgatgcaccaatgcacagaatccaaagtctttcgtggatctccaatcatccctgaagaaaggcagaaggagtatctacttgagtgttccatcaagacactcccctactacggagttcaaccataggttccaagaagcttgatttggagaaaggagtgggggtcgacactgcagaaacgagtactcgaacacactccacttggtttcttgaccttttttgaggcccctgatcctgccaatttggagaagttccttggaactatacgaatgatgctcaaaggtagttatcatttctcctcat

SEQ ID NO: 3965 - DNA, 594 bp, Zea mays
  misc_feature (572)..(572): n is a, c, g, or t
  misc_feature (577)..(582): n is a, c, g, or t
  misc_feature (584)..(585): n is a, c, g, or t
  Probeset Number=SeqID_18368
gactccacttgccccatcaaaacataacagacacaaggtcattgaaaaaagaaaaaaccaaataagagtttcaagaatcaatactacaagatgagttcaacaaggagagcttggatggtggcagccagtgttggagttgtggaacccttgaaggatcagggaatctgcaggtggaatcatgcattaaagtcagctcaaaatcatgtcaaaaaccatgttagacctttctctcaagcaaagaagctttcttcctcttcttctatgatttccagcagtctaaaagagaagacaaagcagtcagaggaatcattgaggacagtcatgtacttaagctgctggggtcccaattagacgaggccatccaactatttttttttttaactcttttcttttaggctcctcttgtcccctaaggtagctctaatgaacagaaaagtttttggtatctacacctgtaagcactacaaattttctcctaacaaagttatgattgtcgctggaggtgcgtattaagattggctatgactgtaaattgatatatcaataaaaaacttaccagctttggccacctnattannnnnntnntaaaaaaat

SEQ ID NO: 3966 - DNA, 430 bp, Zea mays
  Peptide Sequence Number=SeqID_10125
  Probeset Number=SeqID_18369
gagctcacttgtttttggccgccctttttttacgcatgaaacacgagaaaaaaaatattttgcgacgtgatccagtggacatccagtggggaaaaaggcagtcaaatgttccatatttctagtaatgttcccacaccattaaagagaataaaccgatgcattgttacacagcaaagaaaccatcaacaaacaaagagctggctatgatggactaatctgccagaggtaccaaaaggtacgaaaaaatttgtcccaatcacattggttgccctcgtgatctaactgataaaggtaccttgccagcctgtatgcttctccggtggtgtacatgcccagttgaataccccagcaattgtaacctgagtgatggtcagctggtgctcgcaagaacggcaagacaccgccggggaggacttgctaaggccccggg

SEQ ID NO: 3967 - DNA, 430 bp, Zea mays
  Probeset Number=SeqID_18370
ctagccacattttgtttcctcgtctcctctcactcgttcaaccggcgccgctcgtcttcaaggaaaggtttgagagaaaatgagtcgcggagctgcagccgttgccaagggaaagaagaagggagtgtccttctccattgactgctcgaagcctgtcgatgacaagatcatggagattgcttccctcgagaagttccttcaggagaggatcaaagtcggtggcaaagccggtgcccttggtgattccgtcacaatcacacgtgagaagaacaagatcactgttacctccgaaggccaattctccaagaggtatttgaagtacttgacgaagaagtacttgaagaagcacaatgtgagggattggcttagagtgattgcggctaacaaggaccgtaacctctatgagttgaggtacttcaacatcgctgag

SEQ ID NO: 3968 - DNA, 345 bp, Zea mays
  Peptide Sequence Number=SeqID_10126
  Probeset Number=SeqID_18371
aaaatttaagctttattatttgacattcagtaggtcagtccaaactcatctacgtcttactcggggtgaggaggctgggccatgggcatctgtggccttttcaagttacaagtcagtaacagcagtccaaaggtagccaacacgtcttgagtttattgcatcattgtaaacaagaaatcttatctcctcctgaccagacacccaaaaggttataaaagaaatttaatttagatccaacttgaagacaggtactaaaagtttcaagcctcaccttgacattttttaaagactaagtgtgatcctctataaggcactgccatgctgtaggaacattcattctgccac

SEQ ID NO: 3969 - DNA, 733 bp, Zea mays
  misc_feature (601)..(733): n is a, c, g, or t
  Probeset Number=SeqID_18372
tgctgctcccccccgcggcggccgcccctctactactggtgcccccccccggctgcaggtcggcgccaccgggggggggggctccccactcccccccccccccccccgtgaagagactccaaactcgttcataaggggatgctgagtcttattataatatgttttacatcatcattttaactcaaacatcttttgcatcatatcattgcatcattcgacatcataccatcatgcatcattctgcatcaaccacgaagagaaaaagaagggaaatggttctctcatctgtagatgtgacttagctacgaagatatatttgggatttttgaaatcatggactaaaaatatgctacactcatcgtcataaataacacaaataaagggataatgctttgatttcagcaacagacattttacaacatttcgagaccttcggatgaaaagggattttctttacgaagcgtgaaaagaagggaaggtgttttttcgccatcagctccaaaacagtacgtacaattatttcacgctgcataaataaatatattacacaatgcaactgaacacaacacacacttgcctttacatatagccaaaatacaannnnnnnnnnnnnnnnnnnnnnnnnnnnnnnnnnnnnnnnnnnnnnnnnnnnnnnnnnnnnnnnnnnnnnnnnnnnnnnnnnnnnnnnnnnnnnnnnnnnnnnnnnnnnnnnnnnnnnnnnnnnnnnnnnnnn

SEQ ID NO: 3970 - DNA, 672 bp, Zea mays
  misc_feature (3)..(5): n is a, c, g, or t
  misc_feature (43)..(43): n is a, c, g, or t
  misc_feature (45)..(45): n is a, c, g, or t
  misc_feature (670)..(671): n is a, c, g, or t
  Peptide Sequence Number=SeqID_10127
  Probeset Number=SeqID_18373
gtnnnggaaccccccttggggtgggacccgggaatttcggccntntggccggggacagagagagagggagcaaggatgtcgaagcgaggtcgcggtggatcggcggggaacaagttccgtatgtcgctgggtttgccggtggcggcgacggtgaactgtgcggataacacgggggcgaagaacctttacatcatttcggtgaagggaatcaagggtttattgaaccgtctaccttcggcttgtgttggtgacatggtgatggccaccgtgaagaaggggaagcccgatctcaggaagaaggtcttgccagctgtcattgttcgccagcgcaagccttggcgccgaaaggacggtgtttacatgtacttcgaagataatgctggtgtcattgtgaatcccaagggtgaaatgaaaggttctgctattactggtccaattggtaaggagtgtgctgatttgtggccaaggattgcaagtgcggccaatgctatcgtatgagtgcgaattctagttcgatgatcttatgtttctgcttgtaggacttaaatttatctcagattttttttaaagctttaaagttgtctcggtttgttctttccttaacttatccgcaagaagatttttgaagagatgtgattaatttctagctaagaaatattcctgtttcggnng

SEQ ID NO: 3971 - DNA, 561 bp, Zea mays
  misc_feature (312)..(312): n is a, c, g, or t
  misc_feature (335)..(335): n is a, c, g, or t
  misc_feature (339)..(339): n is a, c, g, or t
  misc_feature (343)..(343): n is a, c, g, or t
  misc_feature (345)..(345): n is a, c, g, or t
  misc_feature (347)..(347): n is a, c, g, or t
  misc_feature (349)..(349): n is a, c, g, or t
  misc_feature (351)..(355): n is a, c, g, or t
  misc_feature (357)..(357): n is a, c, g, or t
  misc_feature (359)..(360): n is a, c, g, or t
  misc_feature (364)..(365): n is a, c, g, or t
  misc_feature (368)..(372): n is a, c, g, or t
  misc_feature (377)..(379): n is a, c, g, or t
  misc_feature (382)..(561): n is a, c, g, or t
  Peptide Sequence Number=SeqID_10128
  Probeset Number=SeqID_18374
tccccgcggtggcggccgctctagaactgtggatcccccgggctgcagtagttccacatcacgacgcgaggggattgggcttccgattctgatcgcggagagttgtgctcgaaaagtaaggacaaggggtgagaggccaagtatcaagtgtgcgatttgaagacgaagaatttgagattgggctagttggtgagatgattcagtcttggatactgtcaacatgctctaatgtgaagacgatcgtgacagagcctcactcgtcagcattcaatacatcgcccaatgcacactgaatctcaaccaaagtctcantgcgccctccgcccgagtcgaantggntcananancncnnnnncncnnctcnnccnnnnncctgnnnccnnnnnnnnnnnnnnnnnnnnnnnnnnnnnnnnnnnnnnnnnnnnnnnnnnnnnnnnnnnnnnnnnnnnnnnnnnnnnnnnnnnnnnnnnnnnnnnnnnnnnnnnnnnnnnnnnnnnnnnnnnnnnnnnnnnnnnnnnnnnnnnnnnnnnnnnnnnnnnnnnnnnnnnnnnnnnnnnnnnn

SEQ ID NO: 3972 - DNA, 685 bp, Zea mays
  misc_feature (1)..(110): n is a, c, g, or t
  misc_feature (112)..(118): n is a, c, g, or t
  misc_feature (120)..(124): n is a, c, g, or t
  misc_feature (126)..(127): n is a, c, g, or t
  misc_feature (130)..(130): n is a, c, g, or t
  misc_feature (132)..(132): n is a, c, g, or t
  misc_feature (136)..(137): n is a, c, g, or t
  misc_feature (143)..(146): n is a, c, g, or t
  misc_feature (150)..(150): n is a, c, g, or t
  misc_feature (181)..(181): n is a, c, g, or t
  misc_feature (189)..(189): n is a, c, g, or t
  misc_feature (619)..(619): n is a, c, g, or t
  misc_feature (663)..(663): n is a, c, g, or t
  misc_feature (666)..(677): n is a, c, g, or t
  misc_feature (680)..(683): n is a, c, g, or t
  Probeset Number=SeqID_18375
nnnnnnnnnnnnnnnnnnnnnnnnnnnnnnnnnnnnnnnnnnnnnnnnnnnnnnnnnnnnnnnnnnnnnnnnnnnnnnnnnnnnnnnnnnnnnnnnnnnnnnnnnnnnnncnnnnnnncnnnnnanntcngnaccnnatgttnnnncagngcatggtttacagcagatgcagcggttacgncggccgtntatgccgtcgtcgaggacgaggccgccaccgacgcggcatacgcgctgcgcgacgctgccgaggccgagctgctccggacgcgtccgacgacgccggccggtcttgcggcgctcaccacctgggcccgcgggcggatgagctggctcaagagcagcggcagctcgcttgatggcgacaatctgtatgcgatcagtgcagcgatcgatgacgcgacgcacgggatgagtcgcctaaagccatggtcgtcaattgcgtcgccatcgattgcagcagccgctcctgcggaggatcccatcttcgcagcaatcgagaaacacgaggttctgatcgctccctacgttgccgcctgggaggcgcgcgggatgttcgacgactgcaacgtcgttgacgaagagcagaaggccgaactgctccgcctgaatgatgagngtgatcgcactcatctaccgctcgagggggggcccggtacccantgnnnnnnnnnnnnccnnnnct

SEQ ID NO: 3973 - DNA, 787 bp, Zea mays
  misc_feature (27)..(28): n is a, c, g, or t
  misc_feature (39)..(42): n is a, c, g, or t
  misc_feature (57)..(57): n is a, c, g, or t
  misc_feature (60)..(61): n is a, c, g, or t
  misc_feature (63)..(63): n is a, c, g, or t
  misc_feature (71)..(71): n is a, c, g, or t
  misc_feature (75)..(76): n is a, c, g, or t
  misc_feature (87)..(88): n is a, c, g, or t
  misc_feature (90)..(90): n is a, c, g, or t
  misc_feature (97)..(98): n is a, c, g, or t
  misc_feature (121)..(122): n is a, c, g, or t
  misc_feature (137)..(137): n is a, c, g, or t
  misc_feature (145)..(145): n is a, c, g, or t
  misc_feature (152)..(152): n is a, c, g, or t
  misc_feature (164)..(164): n is a, c, g, or t
  misc_feature (178)..(179): n is a, c, g, or t
  misc_feature (191)..(192): n is a, c, g, or t
  misc_feature (199)..(200): n is a, c, g, or t
  misc_feature (211)..(211): n is a, c, g, or t
  misc_feature (230)..(230): n is a, c, g, or t
  misc_feature (265)..(267): n is a, c, g, or t
  misc_feature (269)..(269): n is a, c, g, or t
  misc_feature (278)..(278): n is a, c, g, or t
  misc_feature (293)..(293): n is a, c, g, or t
  misc_feature (296)..(296): n is a, c, g, or t
  misc_feature (326)..(326): n is a, c, g, or t
  misc_feature (397)..(399): n is a, c, g, or t
  misc_feature (411)..(412): n is a, c, g, or t
  misc_feature (416)..(416): n is a, c, g, or t
  misc_feature (430)..(431): n is a, c, g, or t
  misc_feature (438)..(439): n is a, c, g, or t
  misc_feature (446)..(447): n is a, c, g, or t
  misc_feature (451)..(451): n is a, c, g, or t
  misc_feature (485)..(485): n is a, c, g, or t
  misc_feature (504)..(504): n is a, c, g, or t
  misc_feature (508)..(508): n is a, c, g, or t
  misc_feature (523)..(524): n is a, c, g, or t
  misc_feature (526)..(527): n is a, c, g, or t
  misc_feature (538)..(539): n is a, c, g, or t
  misc_feature (542)..(542): n is a, c, g, or t
  misc_feature (551)..(551): n is a, c, g, or t
  misc_feature (561)..(561): n is a, c, g, or t
  misc_feature (563)..(563): n is a, c, g, or t
  misc_feature (567)..(567): n is a, c, g, or t
  misc_feature (572)..(572): n is a, c, g, or t
  misc_feature (591)..(591): n is a, c, g, or t
  misc_feature (595)..(595): n is a, c, g, or t
  misc_feature (598)..(599): n is a, c, g, or t
  misc_feature (608)..(608): n is a, c, g, or t
  misc_feature (611)..(612): n is a, c, g, or t
  misc_feature (616)..(617): n is a, c, g, or t
  misc_feature (634)..(634): n is a, c, g, or t
  misc_feature (642)..(642): n is a, c, g, or t
  misc_feature (645)..(645): n is a, c, g, or t
  misc_feature (649)..(649): n is a, c, g, or t
  misc_feature (653)..(653): n is a, c, g, or t
  misc_feature (670)..(671): n is a, c, g, or t
  misc_feature (674)..(675): n is a, c, g, or t
  misc_feature (678)..(678): n is a, c, g, or t
  misc_feature (683)..(683): n is a, c, g, or t
  misc_feature (689)..(689): n is a, c, g, or t
  misc_feature (693)..(693): n is a, c, g, or t
  misc_feature (701)..(701): n is a, c, g, or t
  misc_feature (704)..(704): n is a, c, g, or t
  misc_feature (708)..(708): n is a, c, g, or t
  misc_feature (712)..(713): n is a, c, g, or t
  misc_feature (716)..(716): n is a, c, g, or t
  misc_feature (734)..(734): n is a, c, g, or t
  misc_feature (739)..(739): n is a, c, g, or t
  misc_feature (748)..(749): n is a, c, g, or t
  misc_feature (751)..(751): n is a, c, g, or t
  misc_feature (753)..(756): n is a, c, g, or t
  misc_feature (759)..(759): n is a, c, g, or t
  misc_feature (766)..(766): n is a, c, g, or t
  misc_feature (770)..(771): n is a, c, g, or t
  misc_feature (773)..(773): n is a, c, g, or t
  misc_feature (776)..(776): n is a, c, g, or t
  Peptide Sequence Number=SeqID_10129
  Probeset Number=SeqID_18376
ccacacaaggcaccaagagagaccccnngccccggcccnnnnggagcgcacaagcgncannanccacaagncacnngcccaggccannanccacagnncccccccaggggcggggggggcnncgaacacccagccgngcaagccnacaggcnacaacaagcgcnagcggcgagcgccnnacaacaaccaanngcccaanngcaacaacaanccggggcacaacgaacccnacaaaccaacgcaacgcaacaacaacaacaacagnnncngccagcacngagccacccagccgnggngaaccccggcacccacctgcaacagcagcngccggcaaccaacccaccggccccgggcaaacgaagcccgcagaccagcaacaacaacagcgcgcaacagnnngcggccagcgcnncagncaaccagccagggnngaacccnnagcgccnnaccnacaacagcaacaacgggggggcaacgagcccgcncgcgaggggcaaggcaccnacanaccggcaacaacagnngnngcaacaacagnngcngcaacaaangggaccagcncnaacncagcnagcgggggcaaacccggcngccnacnngcaacaacnacnnccanncaaccaacggacggggncgaacgcngcngcgnaccnacaacagcgacaacagnnacnnaanccacnagcggnggcnaacccagnggncgcngccnnccnacagcagcaacaagggcngccanacaaccagnncncnnnngangaacccngccnngncgnggcagcaaccc

SEQ ID NO: 3974 - DNA, 230 bp, Zea mays
  Peptide Sequence Number=SeqID_10130
  Probeset Number=SeqID_18377
tgcatgcctgcagggttcattggacgcactaaatgagattcttaaagaacctgtaccaatgaaccgcttcagaccaaatattttagtggatggatgcaacccatactcagaggacctgtggaaaaccataaagataaacaacctaacattcctaggtgtaaagttatgcaaccgttgcaaggtgccagcattatcaagagatgaaacctgcactgaccaatgaacttaca

SEQ ID NO: 3975 - DNA, 618 bp, Zea mays
  misc_feature (613)..(613): n is a, c, g, or t
  misc_feature (615)..(615): n is a, c, g, or t
  misc_feature (617)..(617): n is a, c, g, or t
  Peptide Sequence Number=SeqID_10131
  Probeset Number=SeqID_18378
aagatgtccctgctcaatgacaagaggccaagatcaatcgttctcaacgacacgacgttgcgcgacggcgagcaagccccgggagtggcttttacgaccgcagaaaaggtgtccattgccggcgccttggcgcgggccggcattgtggagatcgaagccggtactcccgcgatgggcgaggaggagatcgccgccattcgcgccatcgtcgacgcagatctcccggccagcatcatcggctggtgccggatgcgaacggctgacgtcgacgcagccatccaggccggcgtctccatggtgaatgtctcgatcccagcctccgacgtgcagatcgcggccaagctcggcggcagccggcaagcggcgcttgaccaggtgcggcgtgtggtcggctatgcgcgcgacaaggggttggacgtcgcggtgggcggcgaggactcatcgcgggccgacgtcggcttccttgtcgagttgatcgcaaccgcgaaggctgcaggcgcgcgtcgtttccgcattgccgataccttgagcgtgctcgatcccgatgcgtcgtttacgttgttggccgcgctccgggccacgaccgatctcgagggggggcccggtaccaatngntnt

SEQ ID NO: 3976 - DNA, 489 bp, Zea mays
  Peptide Sequence Number=SeqID_10132
  Probeset Number=SeqID_18379
cctatggagttgccattggtaggaagaagaaaccccctgctgcaaagaaggataatgctgagggccaaaaggttgaggcaccacctgaggaaccgaaaaagagcacccatgtcccgaggaagcttaaaaagcccaaggagggaggtccccttgccccccccattgaggagcaatttgccagtggccggttgctggcatgcatttcttcccgccctggccagtgtggccgagctgatgggtacacccttgagggtaaagagcttgggttccccatgaagaagccccaaaggaaaaagggcaagagccctgtagcttagagcattcccatggattgcccggcccccaaatgtgggtcctgatggggcccttctttttggttaggggtcccaagtccagggcgttatcccatgttttccgccctgattaggcccctgttttctaaaagcgattgggccctggcccaatttgagcgggggatgattatttgtt

SEQ ID NO: 3977 - DNA, 476 bp, Zea mays
  Peptide Sequence Number=SeqID_10133
  Probeset Number=SeqID_18380
accttgatgggggcggctatggcagctgtctctctctctctctctctctctctctctctgtgatagagagggaaagagagagagagaggctagctcttgcatgtgtcctcgaggataaggatcagtgggaacgaagccggtggagctgctttacgtaacgtacagtacagctgaactgctccgtttccagtgaagatccactgatcttcttgatcgaatgccgtacgtagtggctcgattcagcaagcgatttgcctgatgcgtgcgttgttgttctttcctgctgtgtgttgatgattaggggatcttgtaataatcggcttggctgtatacggtgatcggtcctctcttgttctctagccaacgctagctgtgtacgctacgtacgtgggattattccggtcttccctactttcccaaacgacacacccatatttttattataaaaatatttccccttaaaaaaaaaaaaaaaa

SEQ ID NO: 3978 - DNA, 454 bp, Zea mays
  Peptide Sequence Number=SeqID_10134
  Probeset Number=SeqID_18381
ctctgcatttaggttttcattttagcggcgggcgaaggagcaggagaagaaggtcctatccatggcgactcaagcggccaaacaatccgtgcaatgcttcgggcgtaagaagacagcagtggctgttacccactgcaagcctggatgcggtatgatcaagctcaacggctccccgatcgagctgttcaacccagagatcctccgtttcaagatcttcgagcctgtcctcctcctcggcaagcaccgtttcgctggcgtcgacatgaggatccgcgtcaagggtggtggtcacacttcccaggtctacgccatccgtcagagtatcgccaaggcgctcgtggcgttctaccagaagtacgtggacgagcagtcgaagaaggaggtgaaggatatccttatccgttacgataggactctccttgtggcggatccgaggaggtgcgagccgaagaag

SEQ ID NO: 3979 - DNA, 1104 bp, Zea mays
  misc_feature (1)..(499): n is a, c, g, or t
  misc_feature (1100)..(1104): n is a, c, g, or t
  Peptide Sequence Number=SeqID_10135
  Probeset Number=SeqID_18382
nnnnnnnnnnnnnnnnnnnnnnnnnnnnnnnnnnnnnnnnnnnnnnnnnnnnnnnnnnnnnnnnnnnnnnnnnnnnnnnnnnnnnnnnnnnnnnnnnnnnnnnnnnnnnnnnnnnnnnnnnnnnnnnnnnnnnnnnnnnnnnnnnnnnnnnnnnnnnnnnnnnnnnnnnnnnnnnnnnnnnnnnnnnnnnnnnnnnnnnnnnnnnnnnnnnnnnnnnnnnnnnnnnnnnnnnnnnnnnnnnnnnnnnnnnnnnnnnnnnnnnnnnnnnnnnnnnnnnnnnnnnnnnnnnnnnnnnnnnnnnnnnnnnnnnnnnnnnnnnnnnnnnnnnnnnnnnnnnnnnnnnnnnnnnnnnnnnnnnnnnnnnnnnnnnnnnnnnnnnnnnnnnnnnnnnnnnnnnnnnnnnnnnnnnnnnnnnnnnnnnnnnnnnnnnnnnnnnnnnnnnnnnnnnnnnnnnnnnnnnnnnnnnnnnnnnnnnnnnnnnnnnnnnnnnnnnnnnnnntgctgttatgcctcgctccctctgtgttcgatgaaatgtcgaactaggaatcgatgacctcgccttgtcctcgcgattgtggttggctagtatcgtcgcctgccccaccgtggtgctcgccaaaacacctgaacccgagtttcatcgtcgtccatgcgaatatcatgccagttcgatcatggtacgtgaattaaccacgtgatgcggagaacccgagccaagttgaccccaagcgcggaatgattcgcaaggtgatgctgatggacgaacttgaagatggataattaaacgagtaccatgacaaaggatgatcgtcaagtggacatcccctaacaaacactaacctagtgttatccaggttatagttttgtgctgctgatgatggtgttaagtgccggtgggcacaaccttctataagtctatgtacttcttctatacttcttattgaggatggtcacttaagctagcatatatttcaacttataaacaatttataacgtttcaaagttatttctttgaatcacttttgtaatcactccgatcatgtacattgtaaaacttgatgtaacatgtaaaatttggtaataagatttccgctgcnnnnn

SEQ ID NO: 3980 - DNA, 380 bp, Zea mays
  Probeset Number=SeqID_18383
ggaggggatttttttttttttttgcaaaagggatgatagatacacggggcttcatagacatccagatcctcagtcatggggccaggattcaatacggatacacatgagcctgacaaggggagccacacatcacaccgctctcacttattattgaacacaattatacacccatgcagagaaaaccaagcgagtacaggaacacccctctctcgacgtagccggccccacgcccaccacctcttctccctcagtctcactcaccacaagcaacagcagcttccaagggccggagagggactcattattgggaaccatcaaattacacacgcatgcagtacagaataaacaggtgtgtgggttgtgtgcgccggagctagctt

SEQ ID NO: 3981 - DNA, 499 bp, Zea mays
  misc_feature (37)..(37): n is a, c, g, or t
  misc_feature (43)..(43): n is a, c, g, or t
  misc_feature (46)..(46): n is a, c, g, or t
  misc_feature (53)..(53): n is a, c, g, or t
  misc_feature (55)..(55): n is a, c, g, or t
  misc_feature (60)..(60): n is a, c, g, or t
  misc_feature (63)..(64): n is a, c, g, or t
  misc_feature (76)..(76): n is a, c, g, or t
  misc_feature (79)..(79): n is a, c, g, or t
  misc_feature (84)..(84): n is a, c, g, or t
  misc_feature (94)..(95): n is a, c, g, or t
  misc_feature (100)..(100): n is a, c, g, or t
  misc_feature (109)..(109): n is a, c, g, or t
  misc_feature (113)..(113): n is a, c, g, or t
  misc_feature (166)..(166): n is a, c, g, or t
  misc_feature (182)..(182): n is a, c, g, or t
  misc_feature (187)..(187): n is a, c, g, or t
  misc_feature (189)..(189): n is a, c, g, or t
  misc_feature (193)..(193): n is a, c, g, or t
  misc_feature (199)..(199): n is a, c, g, or t
  misc_feature (202)..(204): n is a, c, g, or t
  misc_feature (207)..(207): n is a, c, g, or t
  misc_feature (209)..(209): n is a, c, g, or t
  misc_feature (223)..(223): n is a, c, g, or t
  misc_feature (230)..(230): n is a, c, g, or t
  misc_feature (236)..(236): n is a, c, g, or t
  misc_feature (240)..(240): n is a, c, g, or t
  misc_feature (244)..(244): n is a, c, g, or t
  misc_feature (255)..(256): n is a, c, g, or t
  misc_feature (259)..(259): n is a, c, g, or t
  misc_feature (278)..(278): n is a, c, g, or t
  misc_feature (280)..(280): n is a, c, g, or t
  misc_feature (284)..(284): n is a, c, g, or t
  misc_feature (308)..(308): n is a, c, g, or t
  misc_feature (312)..(312): n is a, c, g, or t
  misc_feature (315)..(315): n is a, c, g, or t
  misc_feature (328)..(329): n is a, c, g, or t
  misc_feature (343)..(343): n is a, c, g, or t
  misc_feature (347)..(347): n is a, c, g, or t
  misc_feature (349)..(349): n is a, c, g, or t
  misc_feature (351)..(351): n is a, c, g, or t
  misc_feature (357)..(357): n is a, c, g, or t
  misc_feature (359)..(359): n is a, c, g, or t
  misc_feature (362)..(362): n is a, c, g, or t
  misc_feature (366)..(366): n is a, c, g, or t
  misc_feature (370)..(370): n is a, c, g, or t
  misc_feature (387)..(388): n is a, c, g, or t
  misc_feature (421)..(421): n is a, c, g, or t
  misc_feature (425)..(425): n is a, c, g, or t
  misc_feature (429)..(430): n is a, c, g, or t
  misc_feature (450)..(451): n is a, c, g, or t
  misc_feature (468)..(469): n is a, c, g, or t
  misc_feature (471)..(471): n is a, c, g, or t
  misc_feature (473)..(475): n is a, c, g, or t
  misc_feature (478)..(478): n is a, c, g, or t
  misc_feature (485)..(485): n is a, c, g, or t
  misc_feature (489)..(490): n is a, c, g, or t
  Peptide Sequence Number=SeqID_10136
  Probeset Number=SeqID_18384
aacaacagcaacaggggcggccaacacagagccaccnagccgnggngaacccngncaccnacnngcaacagcagcngcnggcanccaacccacnngcgcnggcgaacgnagcngcagaccagcaacaacaacagcggcgacagggggtgccagagcgcaggcaacnagccagggggaacccngccgncnaccnacaacnacnnncancnagcccgcgcgcggngggcaangcaccnacgnaccnacaacaacagnngcngcaacaaaagggaccagcncngacncagcgggcgggggcaaacccggcngccnacnaacaacagaagcnnccaaacaaccaacnggcngngncaaacncngcngcgnaccnacaacagcgacaacagnnacccaaaccaaaggcaggggccaacccaagggncgcnaccnnccggcagcagcaacaacaanngccgccagacaaccagnncncnnngangaacccngccnngcagcaacc

SEQ ID NO: 3982 - DNA, 573 bp, Zea mays
  Peptide Sequence Number=SeqID_10137
  Probeset Number=SeqID_18385
ccggccgggaattcatccagacaagtcatatctagctagtagctccctgaaaagttcactagagaagcatttgagggaggagccatgtctgaggagaagcaccaccaccacctgttccaccaccgcaaggcagaggaggaggaaggcgcctccggcgaggtcgactacgagaagaaggagaagcaccaccagcacatggagcagctcgtgcagctcggcgccatcgccgccgccgagtacgctctgaccgagaccatcctctgggaatccaccccctccccgttgattcccctctcggagttctctgaccctattatcgcgaggaaatatggaccacaagccgacatggaaaccttggagctcctgaacactacagctacccagaaggaaattatggtggctgtgagagtcctgcggcgagatccgcgtgagaagctctgtcaagttatccatgacacccccttgagctgcttggctatagcaagcaggggccttggcaaactcaagagggtgctcttacgaagcctcaccgattacgtcgtgaacaccgcaacctgcccctgtccccgttgt

SEQ ID NO: 3983 - DNA, 187 bp, Zea mays
  misc_feature (36)..(36): n is a, c, g, or t
  misc_feature (47)..(47): n is a, c, g, or t
  misc_feature (52)..(52): n is a, c, g, or t
  misc_feature (57)..(57): n is a, c, g, or t
  misc_feature (61)..(61): n is a, c, g, or t
  misc_feature (76)..(76): n is a, c, g, or t
  misc_feature (111)..(111): n is a, c, g, or t
  misc_feature (118)..(118): n is a, c, g, or t
  Peptide Sequence Number=SeqID_10138
  Probeset Number=SeqID_18386
aattaatcctcgtccctctcgcgcacagcgctccantttcttccacntcccnaaccntacnggcggcgcagcagcntcacaaccaccacccgaagaatggtgaattttctnaagcccnggcaaggccgtaatcctcctccagggcagattcgcgggccggaaggcggtgatcgtgcgcgtgttcgag

SEQ ID NO: 3984 - DNA, 868 bp, Zea mays
  misc_feature (1)..(28): n is a, c, g, or t
  misc_feature (296)..(296): n is a, c, g, or t
  misc_feature (298)..(299): n is a, c, g, or t
  misc_feature (302)..(303): n is a, c, g, or t
  misc_feature (306)..(308): n is a, c, g, or t
  misc_feature (337)..(338): n is a, c, g, or t
  misc_feature (845)..(868): n is a, c, g, or t
  Probeset Number=SeqID_18387
nnnnnnnnnnnnnnnnnnnnnnnnnnnncgccgctacggtccaggcgttcttgctgcctccctcgtagactagactctagaccactatatatacagtaacctcgtccccgttttcttccgcaccaacttctcatcttcagcagccagtgtaaagagtgcggagaagcagtagcaaaagggattccattctcgtgttcttggagtgggccatcgatcgagctccgtgagagagagagagagagagcaagcaatggcgacagcagggaaggtgatcaagtgccgagccgccctgcccngnnccnncgnnnaccccctgcgggaggggggggaggagganngtccagttaagattaacagctttcccctttctttcttttttctttttctattttttttcctacccacctctcctcctttctctttctttctacttcactcccctttttcttctttttttttttttttgtctttttcttctgtttggtttcatttctcgttttgttcttctttttttttttttttctttttatctctttcttctcttttttttttttttattttttttttttttgtatttctttattcatgatgttctcctccccctccccttcccccctcccccccctccccccccccttcctcccccctctttcccccctccccctgaccccccctcccccctcttcatcttctctcctccccctagatttctctcttctctcctctcccccttttcttttccctcttatctttcaccccttcttttccccctctctcttcctctcccttacttcccttcttcctttctctctccccttccccttctcatttcccttccttccttnnnnnnnnnnnnnnnnnnnnnnnn

SEQ ID NO: 3985 - DNA, 601 bp, Zea mays
  Peptide Sequence Number=SeqID_10139
  Probeset Number=SeqID_18388
tcgaagccggccgggccgggatgcaatgggaacaacgtcgagagattcgcgacttaacaatcataatggacaccggcatagatcccaaggactgccagctgcgtgcatgcgtatgcccatctgcgcttccacacgctctactacctgacatccatggcgttcaagtgagcgttgtcgctccacgtcccgaccgccatccacatacctacgagggtctgccacgctgccggacctcgtgcccgccctggccctgccagcacccgagctactgctactcggacgcctgatgcagctgcatcgctacgcttctcgtcttcgcaccagccgaccatgcgcatcaccgcctgaaaccgctgccctggctgctgctggagcctctgctactgggacgaccacacctaacagaaagacttcgtgctgcgacccctgcctccacactattggcagcgcctactaccactggccgactggcatgagaaggagcaggaagatcaccgccagctgccgtcaccgctcgaggccctgcccggggtgcccctcctccaccagagccctcagctgctggtccacgacatgtgccggcgcctgctatgaggagtga

SEQ ID NO: 3986 - DNA, 588 bp, Zea mays
  misc_feature (470)..(470): n is a, c, g, or t
  misc_feature (572)..(572): n is a, c, g, or t
  Peptide Sequence Number=SeqID_10140
  Probeset Number=SeqID_18389
tcgagtcagctacgtaggcccccccccccaatcaacaacaatatccagaccttctctgagaatcaaatcaaacaggaagctcacagaagtccaaaattacagttataattcatctgtcacccttgaccccagtctgatccagccatgtttagaaacaattacgataacgattcggtgactttctcaccgcaaggccgtatcttccaggtggaatatgctcaagaagctgtcaaacagggttccgttgtggtcggattagttagcaagacacatgctgttctcgtggggttgaagcgaaacgcagaagaactctcgtcgtaccagaaaaaagtcatcgaaatcgactcacacatgggcatcgccattgccggcctctcctccgacgcccgggtcctttccaacttcatgaaacagcaatctctcggctcacgaatgacatacggccgcgccatccccctagaccggatcgncacccaaatcggtgatcgcgcacaaaccaacacacaacattacggcaaacgaccatacggtgttggcctcttagttgcgggtgtcgatgaggcaggcccgcntttattcgagtttcaa

SEQ ID NO: 3987 - DNA, 669 bp, Zea mays
  misc_feature (5)..(5): n is a, c, g, or t
  misc_feature (7)..(8): n is a, c, g, or t
  misc_feature (652)..(654): n is a, c, g, or t
  Peptide Sequence Number=SeqID_10141
  Probeset Number=SeqID_18390
gaaantnnttctagagattgtaattaattatcttctagagcgtgtttattgagaatcatatttgcttttttctcatctgaaaatgtcttgctgaggtggtaactgtggttgcggaagtggctgcaagtgcggcagtggctgcggaggctgcaagatgtacccagacttgagctacacagatcaaacaaccactgagacccttgtattgggactggcacctgttaaggcccaattcgagggtgctgaaatgggtgttggagctgagaatggtggctgcaagtgtggagacaactgcacctgcgatccctgcaactgtaagtgaagtgaagagtgaaaaagcttcaagcagagatggatggtccttaaccaattagcatcaggaataataactatgattattatttgaagttaaattatgtgcctttatgtgttcgtcttagtgcactctggtgtttggtttacacacccttttagagtgttagaataaagtggccatgtcttatccttttgcaaattcaaatgttttggatttgtgatgggtgtatctaaccatggttgcttttgcttgcctgcgtttggttgcttctgtataaagttcggcttgtctgaattatcaatctctgcttattaatgaaatacttttgtcttatcnnnaataaattataacta

SEQ ID NO: 3988 - DNA, 869 bp, Zea mays
  misc_feature (601)..(869): n is a, c, g, or t
  Peptide Sequence Number=SeqID_10142
  Probeset Number=SeqID_18391
ataaatcatatgagaaacgactgtggtcgggaccgggccttagacccatgctttggcgtggtactgacgaggagatttctttaaccacaacctgaaattcgctcccatgggaagtcaactccaggatctgagtagtgctactcagaccacctaactaactcagctataaccctttcgcacatacatttcatataggtatgaacgattttgtattttgtatctttcaaatgctaatcaaggaaatttctgatttcgcagacacaacatatgcttgatcagctcactgatcttcagaggagggagcaaatgctgtgtgaagcaaataagtgccttagaagaaagctggaggagaccagcaaccaggtgcatggccaagtgtgggagcacggtgccaacttactcggctacgagaggcactctcctcaacagcaggccccatcacatgttggcaatggtttgttctttcatccctggaagctgcagcagagccaccctgcagatcggttcgctctgacatatgaatacttctgccgctggcaccctgaaatggatcttgggcaaagaataaataaagatgcgatgggcaatcatcttctactgnnnnnnnnnnnnnnnnnnnnnnnnnnnnnnnnnnnnnnnnnnnnnnnnnnnnnnnnnnnnnnnnnnnnnnnnnnnnnnnnnnnnnnnnnnnnnnnnnnnnnnnnnnnnnnnnnnnnnnnnnnnnnnnnnnnnnnnnnnnnnnnnnnnnnnnnnnnnnnnnnnnnnnnnnnnnnnnnnnnnnnnnnnnnnnnnnnnnnnnnnnnnnnnnnnnnnnnnnnnnnnnnnnnnnnnnnnnnnnnnnnnnnnnnnnnnnnnnnnnnnnnnnnnnn

SEQ ID NO: 3989 - DNA, 502 bp, Zea mays
  Peptide Sequence Number=SeqID_10143
  Probeset Number=SeqID_18392
acaagtatgcccacatgtgttttgaaatattggatggacacaaataccataatctagtcacttgcaccacgattaacaagctatggaggaacaacgaatatacaagtaaacatcatataagatagcctcaggatgcatcttctactaattaatcaagtccagctttcttcggtcacaaagaatttaattgttgggggaaaagatcatctcaatatggttttcgaggctcatgcatgcatctacgtgtgtcttagctatggcagtgaatgactatgaacctaaaatctattattggacgaggagtagccacaaaacagaaagataataattggctcctaatccaatgttgcgacgtaaatctaatccccgctattgcgtgactcactttataccaattggcaagttttttatgttcaacacaaaaaaaaacgcataagacagcccctcattttcttgctctcgtagccttttatatccttttatgtcgtcttactgagtggac

SEQ ID NO: 3990 - DNA, 481 bp, Zea mays
  misc_feature (477)..(477): n is a, c, g, or t
  Probeset Number=SeqID_18393
ctcagccgttggagctccttttttacagctacaacccttccacaaagcttgatcaaatgcacctatggccagagttcattcaatcgctaggctgatcactcccacttcatctgaggcgttacagatggagagtgaagcgctggataccattgatatggccccaatttctgaggttatgaaggcaacatctcaccactttaagatttttgaacttagatccattgtgtaacaccctgaatttggggtataaaatttctttcctaatatccaccaaattcaggtgttacccgctttcttcccttcttttctactcattgctctaaacagtggagagttatttttgttttatataactataagcctagtaaaataaaaccctaagaaggtccctgtttgttgcatagcatggcggaatagcagtctccttggtatgttcatttgttgtgacttggcactcaaaaaaaaaaaaaaaaaagnttat

SEQ ID NO: 3991 - DNA, 523 bp, Zea mays
  Peptide Sequence Number=SeqID_10144
  Probeset Number=SeqID_18394
ggactgctcacagatacaaactgaactcctgcacgagcatgggaaagaacatgccactattcatgcagcctccgcaaccaggtggcctcctttcatccctccccccccccgccccgcctcctcccgccgcgcctcgccccctcttccccggcgcccccccccccgggccgcccccttcgcccgccagctcctccacctccggctgcctcggcttggccggcggcactcagcaagcggcccgagcgcccgagcctccccacatcccggttcccatgccccccccccccccccgcggcctccttccccccactctcccacccgcccggccgcctccacccggacgactctcaccctcaacgctccccgacgtcttggaaccggcccgtcctccggtctgcatccccaccaccgctccgttgctttcgcgggtcgccggacgattagctccccacctccagtcctgcgccgcgttgctcgggcgacgtgcgtcccccctcgtctctgcctaccccgcctcaagatc

SEQ ID NO: 3992 - DNA, 643 bp, Zea mays
  misc_feature (42)..(42): n is a, c, g, or t
  misc_feature (596)..(596): n is a, c, g, or t
  misc_feature (631)..(631): n is a, c, g, or t
  Probeset Number=SeqID_18395
tcgagtcagctacgtaggcccccccccccccccgcaatttanaggacagcgtatttggttggctgcaatggaagatttgaagtcaaagggaatgcgatttgccaagcaggctcttctttctggatgctcggctggtggtctggctactattatacactgtgatgaattcagaggttttttcccagagactaccaaagtgaagtgtcttagtgatgcaggattatttcttgatgcgattgatgtctccaggggacataccatcaagaatttattcagtggtgttgtaaggctacagggagtgcaaaagaatctgccgcacttttgtactaatcaccttgatcccacttcgtgcttcttccctcagaatttgattgccggtattagaaccccactattcattcttaatacagcctatgactcatggcaggtccaaacaagcttagctccttcatcagcagatccccatggcttttggcatgattgtagattaaatcatgctaaatgtacttcttcacaaatccaatatttgcaaggattcaggaatcaaatgctgaatgctattaaaggcttctcaagatcacctcaaaatggattgntcataaattcatgttttgctcactgccaatctganaggcaggataca

SEQ ID NO: 3993 - DNA, 601 bp, Zea mays
  Peptide Sequence Number=SeqID_10145
  Probeset Number=SeqID_18396
aaggtgcccttccagtccaggggccccggaggatacaagcgccccgtgttgggtttttcggccattgccaaccgcccccgggtgttttccaaagcccctttttccccattaagacccgacggcccccttttcgggccccttgtttgaaaacccctccctttttggcctggccaaaaaaaaacccgcgccccccctcattcaggtcctgtaagcgctgtttccccgtgccctacgcccggacgggccgcccaaacaatggggtaatccggcgggtatgtgttttttggtttggggggggcgggcggggtatacgcggcccgtgcgccccctttggctttggctccaggggcgtcccgttgggtgttttttttttttgccaaaaaaaaaagggtttgggttggggtggtcccctggcccgccccccggggtttttttccccctttttttatcccttataaaggtgaaggtgaagggtccccgggttttatggcaaaaatgctccctgttctatttttgttattaaaaaaaaaaaaaagaaaaaaaaggaaggggggggaaggggagaagaggggggggggggggtgaaaaaactcgagggggg

SEQ ID NO: 3994 - DNA, 664 bp, Zea mays
  misc_feature (522)..(523): n is a, c, g, or t
  misc_feature (560)..(560): n is a, c, g, or t
  misc_feature (562)..(563): n is a, c, g, or t
  misc_feature (582)..(585): n is a, c, g, or t
  misc_feature (596)..(597): n is a, c, g, or t
  misc_feature (609)..(609): n is a, c, g, or t
  misc_feature (623)..(624): n is a, c, g, or t
  misc_feature (633)..(636): n is a, c, g, or t
  misc_feature (649)..(652): n is a, c, g, or t
  misc_feature (659)..(659): n is a, c, g, or t
  misc_feature (661)..(662): n is a, c, g, or t
  Peptide Sequence Number=SeqID_10146
  Probeset Number=SeqID_18397
gggggtatcggtctctgagagcagttctcttctgtttcgaaacgtgaaaacaagggctttgggattgggaaggttagggattcaccttcgttcttcgtgttgaatctctcattcctaatcctcttcccatagcctcagatctgaaactgtaacatggcttcaaagcgcttccttaaggaactcaaggacttgcagaaagacccacctacttcttgcagcgccggtcctgttgctgaagacatgttccattggcaagccacaattatgggtcctgctgatagtccatatgctggaggtgtatttctagttaccatccatttccctcctgattatcctttcaagccccctaaggttgcgtttaggactaaggcctttcacccaaatatcaatagccatcggtagcatttgtcttgatatcctgaaggaacaggggagccctgctctcaccatccctaaggcactcctttctatctgctcactgctgattgatccaaacccggatgacccacttgtacctgaganngctcacatgtacaaaagtgaccgagctaagtatgagncnnctgcacgcagctggactcnnnngtatgccatgnnctgatctatgtntattgaatggcatnnatgaagacnnnnttgggttcgcttnnnnctcttcncnntc

SEQ ID NO: 3995 - DNA, 398 bp, Zea mays
  Peptide Sequence Number=SeqID_10147
  Probeset Number=SeqID_18398
ttttattgtttcggcctaatacttattgatgtgttctatggcctgaagtctggtcccttctatagtgtcttttgttatttgagaatcagctttgtcttccagcctggtttaggattcatgaaacaattacaacagaaactaggtcgaaagcatcgcaaacctttacagactatatacatactccacctgacaataggattgagaataattgtcatggcgatgcagatttttgttcacggggtggtctggaagaaaggtgtatatctcaatagacttgtgcagatattcagatatgcaccacgtgaacaactaaccattcctgattttgtgttccagtcatcgtgttcgacgctttgtgtgtaaggcattgtaagcctggctatttttattcagatgtt

SEQ ID NO: 3996 - DNA, 704 bp, Zea mays
  misc_feature (2)..(2): n is a, c, g, or t
  misc_feature (468)..(468): n is a, c, g, or t
  misc_feature (561)..(561): n is a, c, g, or t
  misc_feature (596)..(596): n is a, c, g, or t
  misc_feature (599)..(599): n is a, c, g, or t
  misc_feature (624)..(625): n is a, c, g, or t
  misc_feature (635)..(635): n is a, c, g, or t
  misc_feature (641)..(641): n is a, c, g, or t
  misc_feature (648)..(648): n is a, c, g, or t
  misc_feature (661)..(662): n is a, c, g, or t
  misc_feature (679)..(679): n is a, c, g, or t
  Peptide Sequence Number=SeqID_10148
  Probeset Number=SeqID_18399
cnttggtaccgggccccccctcgagtcggcaaagaggagcgattggcgtctgggcccgctcacggacgatctcgccccacacttcatgaacggaaacgagctctggtcggggacctcatatatgaatggctcggcgaagatcggcaccggtccgggtcgtgctcaattcaagcccttctcggattggtgagccctcaatcgatcacgctcggcttcgaggccttaccgtctcagtccctggcccaagcgatccacgccgagctctcccggctcctcgacgaggccgtccgcccgctgtgagccgccctagacgcgagtccaaacaaggcaaaaacgcaatagagttttcgcatgtagcctcgaaggtcgtagaaggccgatccgaatttgatacgatgcgcccagctcatgactaccgagatcgcgcacgacttcattcgagacatggtcgcggcagacgttgccgangcaaacacggcggcaaggtgtgcacgcgctttccgccgacccaacggctatttcacatcgggcacgcaagtcgactgcttaacttcggcttgnccaaaacacggaggcagtgtacttgccatggacanacnaacccaccacgaggacccgattctnnaggcaacgcnccaagnccgttgnttggtttctgggnnaaagggcttaccctcantatacaaaggtttacaactggccag

SEQ ID NO: 3997 - DNA, 659 bp, Zea mays
  Probeset Number=SeqID_18400
cttcacataacactgggtgttgcaattggttcatccacccagatatcaatgtttgtgatcccattttgtgtcgttattggttggatgtgggcccaaaggatgcacttgaattctcagctatttgagacagccactctcttcatcacagtgcttgtggtagcatttatgctacaggatggcaccgcgaactccttgaaaggacttatgctgatcctatgttatctaatagttgctgccagtttctttgttcatgttgatccacaactcaagtgatggttgatgccgtagatgctgtaagtaatgcgtcaaaccccttttgaaccttgttactcctttcttgtggaggtgctactccatagccacgttcccccctgtttcaagcacgcatgctggcaaaaaaaaaagcgcgggaagatcacccattgtcggttcctctcatgaaccgcaaaaggaattcttgtattgtgtggacactgaggtgtactaggggtagtctcaatgtacacagacccaagaagtcccagcatgtcacattcgattaattggatgggtgagtccccctttgtgtttcgggttcccgttgtgatgcgggcagaggctttgatcccgcctgaggctaagatctctcatccttttttgtggtgatgatgtccgcgcac

SEQ ID NO: 3998 - DNA, 545 bp, Zea mays
  misc_feature (541)..(541): n is a, c, g, or t
  Peptide Sequence Number=SeqID_10149
  Probeset Number=SeqID_18401
ccccgcgtccgccccgcgtccggcgcaaacagatcgggagagagagagagagagtgaaataaggtctccaccagcggcgtccgtttcgtcgtggggcgcgggtcaccggtggcgcgcagttttcgctggcgcgctaatctctggggcagggtatggcgcggatggagcctaggcggtcatcggtgctccctgcgtgagttcgtgacttcaccggggtccttgtgcgtgctcgccagagtcctggaaatctggcggagatgcgccgtcgtgtggaccgggaactagcgctgccttcctcgggagaagaacaggtggttcaagaggagccacataacgaggagttcgattcgatctaggtggcgtctcccagttgactttctggcaccaatgatggattttagttcgatttatatttatattttattttgtaagacttccgctatgtaataagtactctaattatattgtgacatttatctctatacactctgttattatatatgatgtcccccttggcgcaaaaaaaaaaaaaaaaaaaaangtat

SEQ ID NO: 3999 - DNA, 785 bp, Zea mays
  misc_feature (255)..(256): n is a, c, g, or t
  misc_feature (772)..(773): n is a, c, g, or t
  Probeset Number=SeqID_18402
gatatctctcatcccttatcttctatcactttgtttctttgcaatcatggttctagctggtaaactcatcactgaagttgggatcaaatcaccagctgacaagttcttcaacctcttcttaaaacaactccaccatgttcaaaacctttgtgatagggtgcatggaaccaagctgcatgaatgtgatgactggcatggtgttggtgaatcggttaaacactggacttatgtcatagatggtgaggtacacacatnncacgagaccattgaatccgttgatgaacaaaacaaaacaatcaaattcaacctctttggtggagatatcaataagcactataagagctttaagctcatccttgaagtgactgagaagaatgatggcggtgctgctgttaaatggaccattgaatatgagaaaaaacatgaggattttgtgcctccaaatggctggatggacttcctgcacaaatgcactagagacattgataataaactcctctaatgcatagctccgcaagttatggagcaaacaataaatatatattgggtttggcttgaagataagtgctttgtttatataatatgtgtgaagtttgacatggaggataaggacgcagtcttgtgttctgttgatccttttcgtttgtatgcaaaaaggtattgtcggtgtcggtgatgtcttgaagtgtgttaaattattatatgaaaatgttcactgtaattaaatattatatgctttatgttttataattttgcagtgccttttattgcnnaaaaaaaaataa

SEQ ID NO: 4000 - DNA, 771 bp, Zea mays
  misc_feature (4)..(4): n is a, c, g, or t
  misc_feature (9)..(10): n is a, c, g, or t
  misc_feature (12)..(12): n is a, c, g, or t
  misc_feature (15)..(15): n is a, c, g, or t
  misc_feature (17)..(17): n is a, c, g, or t
  misc_feature (19)..(19): n is a, c, g, or t
  misc_feature (22)..(23): n is a, c, g, or t
  misc_feature (25)..(26): n is a, c, g, or t
  misc_feature (29)..(29): n is a, c, g, or t
  misc_feature (31)..(31): n is a, c, g, or t
  misc_feature (36)..(37): n is a, c, g, or t
  misc_feature (39)..(39): n is a, c, g, or t
  misc_feature (44)..(44): n is a, c, g, or t
  misc_feature (48)..(48): n is a, c, g, or t
  misc_feature (52)..(53): n is a, c, g, or t
  misc_feature (62)..(63): n is a, c, g, or t
  misc_feature (65)..(66): n is a, c, g, or t
  misc_feature (69)..(75): n is a, c, g, or t
  misc_feature (77)..(78): n is a, c, g, or t
  misc_feature (81)..(82): n is a, c, g, or t
  misc_feature (87)..(87): n is a, c, g, or t
  misc_feature (96)..(98): n is a, c, g, or t
  misc_feature (100)..(100): n is a, c, g, or t
  misc_feature (105)..(105): n is a, c, g, or t
  misc_feature (107)..(107): n is a, c, g, or t
  misc_feature (118)..(118): n is a, c, g, or t
  misc_feature (120)..(122): n is a, c, g, or t
  misc_feature (128)..(128): n is a, c, g, or t
  misc_feature (136)..(137): n is a, c, g, or t
  misc_feature (144)..(144): n is a, c, g, or t
  misc_feature (147)..(147): n is a, c, g, or t
  misc_feature (149)..(149): n is a, c, g, or t
  misc_feature (183)..(183): n is a, c, g, or t
  misc_feature (191)..(191): n is a, c, g, or t
  misc_feature (200)..(200): n is a, c, g, or t
  misc_feature (213)..(213): n is a, c, g, or t
  misc_feature (262)..(262): n is a, c, g, or t
  misc_feature (280)..(280): n is a, c, g, or t
  misc_feature (298)..(298): n is a, c, g, or t
  misc_feature (769)..(770): n is a, c, g, or t
  Peptide Sequence Number=SeqID_10150
  Probeset Number=SeqID_18403
aaantattnnanaanancntanntnnaananttatnnancgatntaanactnnttattatannannaannnnnnnannaannttatnaaaactatnnnancccancnccttcataaancnnnaaacancaactttnntatgacnatncntagccaaaagctttattttcaaacacagatcganccgtctcncgccttaangccgttaaacagnccaccggagtgctagggcgggcgccatggcatgaacgtgcaagggccgnttcggtcccacggcctcnctgcttcttcaccagctntttctcgcgaaggattgtctccatgccgaccaggacaacggcaccacgatcgacacgcagccgaccggcaatggcgaagacaccgcacccgcggcgggcctgatctcgcaatacgtcaaggatttctcgttcgagaacccgaacgcgccggcgatcttccagaacccgaacccgcccgcgatcgacgtgcaattcaacatcggcacagcgcaggtcggcgaggaagtccatgaagtcctgctcaagatcgacgtgaaggcagaggccgagggccagaccgcgttcatcgtcgacctgacctatgccggcctgttcggcctgcgcaacgtgccggccgatgcgatccagccgttcctgctcggcgaagcgccccgcctgctcttcccgttcgcgcgccgcgtgctggccgattgcgtgcgcgacggcggcttcccgccgctgctgctcgagggggggccggtacccaattgnna

SEQ ID NO: 4001 - DNA, 846 bp, Zea mays
  misc_feature (1)..(5): n is a, c, g, or t
  misc_feature (637)..(846): n is a, c, g, or t
  Peptide Sequence Number=SeqID_10151
  Probeset Number=SeqID_18404
nnnnncggtccaatccagtcccccatccgatctcgccgggaaacctccgatccaagcgaagccaaggctttctcgtcctcctcctcaagatgcagatctttgtgaagaccctgaccggcaagaccatcaccctcgaggttgagtcctcggacaccatcgacaacgtcaaggctaagatccaggacaaggagggcatccctccggatcagcagcgtctcatcttcgctggcaagcagctcgaggatggccgcaccctggctgactacaacatccagaaggagtccacactccaccttgtgctcaggctccgtggtggcatgcagatcttcgtcaagaccctgaccggcaagaccatcaccctggaggtcgagtcctctgacaccatcgacaacgtgaaggccaagatccaggacaaggagggcattcccccggaccagcagcgtctcatctttgctggcaagcagctcgaggatggccgcacgcttgctgactacaacatccagaaggagtccacactccaccttgtgctcaggctccgtggtggcatgcagatcttcgtcaagaccctcaccggcaagaccatcaccctgcgaggttgagtcctccggacaccattgacaacgtcaaggccaagatnnnnnnnnnnnnnnnnnnnnnnnnnnnnnnnnnnnnnnnnnnnnnnnnnnnnnnnnnnnnnnnnnnnnnnnnnnnnnnnnnnnnnnnnnnnnnnnnnnnnnnnnnnnnnnnnnnnnnnnnnnnnnnnnnnnnnnnnnnnnnnnnnnnnnnnnnnnnnnnnnnnnnnnnnnnnnnnnnnnnnnnnnnnnnnnnnnnnnnnnnnnnnnnnnn

SEQ ID NO: 4002 - DNA, 707 bp, Zea mays
  misc_feature (1)..(1): n is a, c, g, or t
  misc_feature (4)..(5): n is a, c, g, or t
  misc_feature (17)..(17): n is a, c, g, or t
  misc_feature (19)..(20): n is a, c, g, or t
  misc_feature (25)..(25): n is a, c, g, or t
  misc_feature (31)..(31): n is a, c, g, or t
  misc_feature (39)..(40): n is a, c, g, or t
  misc_feature (44)..(44): n is a, c, g, or t
  misc_feature (51)..(51): n is a, c, g, or t
  misc_feature (56)..(56): n is a, c, g, or t
  misc_feature (60)..(60): n is a, c, g, or t
  misc_feature (68)..(68): n is a, c, g, or t
  misc_feature (70)..(72): n is a, c, g, or t
  misc_feature (79)..(79): n is a, c, g, or t
  misc_feature (95)..(96): n is a, c, g, or t
  misc_feature (98)..(98): n is a, c, g, or t
  misc_feature (131)..(131): n is a, c, g, or t
  misc_feature (137)..(137): n is a, c, g, or t
  misc_feature (140)..(140): n is a, c, g, or t
  misc_feature (157)..(157): n is a, c, g, or t
  misc_feature (172)..(174): n is a, c, g, or t
  misc_feature (704)..(704): n is a, c, g, or t
  misc_feature (707)..(707): n is a, c, g, or t
  Peptide Sequence Number=SeqID_10152
  Probeset Number=SeqID_18405
nctnnttggcccatccncnnacttnaaaaanaagcattnntccngttgggnttggngttngtttcgcncnnntctgaanttgcattaacttctcnncncaacacttaaagtggcttcggcggatatgaatnaaatcngcncaaccgctgtggttgcnggatctggttcagtnnngccgcggagtgtcgctaccaattgattgaggtgaaagggcccggggatcggttgcagacaaccaggtccggtggttgtcgttttgtgtgtcgcaggggatcccggtgagtgtgtgtcatgtgtcgtggatgcagcgaccgcatcagccgaagcgccggccgccgccgcgttcgcggtgcccgctgcgcgcgatgtgcccaatgcgcgtgatgagccaaatgcacgcgacgtgcccaatgcacgtactgcacccaacacgcgcaccccgggggcgctcatttgacctacgaagtcgccgttcgcaccttgtgcgaatttacggcgaagcgcggcaacctcgacatgcgcttcaccccgtcgccctcggccatggagggaatggccggccaccgcacgatcgcggcacgccggggcagctcattccagacggaactgacattggcgggcgactatggtttgcttcacgttcggggtcgcgcggatggctatgaccccgagcagaaccgactcgagggggggcccggtacccnatn

SEQ ID NO: 4003 - DNA, 1949 bp, Zea mays
  misc_feature (1)..(282): n is a, c, g, or t
  misc_feature (1949)..(1949): n is a, c, g, or t
  Peptide Sequence Number=SeqID_10153
  Probeset Number=SeqID_18406
nnnnnnnnnnnnnnnnnnnnnnnnnnnnnnnnnnnnnnnnnnnnnnnnnnnnnnnnnnnnnnnnnnnnnnnnnnnnnnnnnnnnnnnnnnnnnnnnnnnnnnnnnnnnnnnnnnnnnnnnnnnnnnnnnnnnnnnnnnnnnnnnnnnnnnnnnnnnnnnnnnnnnnnnnnnnnnnnnnnnnnnnnnnnnnnnnnnnnnnnnnnnnnnnnnnnnnnnnnnnnnnnnnnnnnnnnnnnnnnnnnnnnnnnnnnnnnnnnnnnnnnnnnnnnnnnnnnnnnnnnncgcccagcccctctctctggcgagcttgaccggcgtcgagctctagcggtcctcctccgctgccactcgttggaccttgcccctgctgcgccgtcggcagctccccacaccctctcctcctcaagcttgttcccatggtgccccagcccccaacgccgagctcggtcctgccctctgccatgacgcctggccgccgctgctccatctcagatcgcactcgcccagctctgttggccgcacccctatcccttatcccagctccctcgctggcgtcgatttgcttgcaggtggctgtgagttcttcggttcttccctgtgcgcacgcgagctcctttgcttggcccgttgtcgttcttaccgcgctcggctgttcgtcgtcgtcacccgatcgcgcaacgagctgatagccccggcattcgtcctttgtccgtgtcatgtgccccacgacctatgtccttgccgtcgcgtcgagcccgtcaaaccccgtcctctcctactcgacctcgtctttgcccttctggtggtcgccgtcgtgtctgggattttagcatgtctccctgctcgccgttgaacctgggttccctgctcagccttcatagctagcgcgtcgtctttcgtctgtggtcgagcgtctgctccatcccagcaccctgcattagtgctcgacaaaaagcccaaacgaatcgtcatgccatcgtcttcgtcgaatggaaatcatcgtgctgacacgccgatgtcgtcgatcgccatcctcgtctatgccaactctgtgtagctcgttaccacaccctgtagtcgcttccatgacgttgtcgtggggacttctgtgcgtcacatgtgcttcggtcacactaaatcaccctgcttccatttgtgtcgacagcaagccgtgaagacgctcttgtgctagccacgcgccacctgctcgacaaaacggatcccctgagtatctggtcaagaaatgagattgtgtgcatcgcttgccaggtgtgtgcggtcaaaggcgtcaagcaataaccatcgttgttcttccgactattgtgttggattggtcaggttgatcacgtgatgtgaaggacaagaactggattaatctcaaggtgatgcggatgatgaacctgaagatggataatctgaacgagtaccaaagcaaagaatggccgttaagcggacgtcgtctaacaaacactaacctagtgttattccaggtaccttcggactcggatcagaaccacaatatgaagaagtacaaagaatgcgaaggttggcacagagccgaagctatgcgcaggggaccttcggcatgatagcagaaaggggaaccgacttaaaagggaaaagactatttggacctcgatgtattactatagagtcattagcaaatgtaaagggcatgagtgtaattttacatgggctgcgtcctgtgcctataaatagatgaacagtgctcctgtactgttcacgctgacttgacatttgcttttgcgtcacgcttgtactcttaccttctttcaagccgaaggtacattgtaacttgttatcatttctatttttctatgataataaactagaaatgagttgataatgacaaaaaaaaaaaaaaaaaagcttcgggtggacccggtcaacttcaagctcctaagccactgcctgctggtgagcccatn

SEQ ID NO: 4004 - DNA, 1279 bp, Zea mays
  Probeset Number=SeqID_18407
atcggcccgccacgccccctcccccccgccgcgaggcctctccgccgcgccgcccgctcacagagcgcaccgccccgacgccgcccccgcccaccgcctcctctcccccgccaccccccccccccagccagtcgcgccccgcaccccgcccccccctcgctctcctccccgtctccatacatctcaaagcggcctcggcccccacatgattgcactaattacccactgatgccccggcaacagagtgggttgcacatggattagggcaacaggagtggtccaaagtatttttgttgctaccacgctgacgaatagcataacctattggtcttgccttatggagcagattcaaagacgttgtaggaagaacaaagagaggaggtattagaaattttaaaggccaatagcttcattgagtgggaagtggatgtcatatgcccaaaggatctatctgataaaatgttaaaaaggtcgaaagttaatctgaatgaaatatcacataactctgccatgggtcttgttagaaaagttcttcacatgggagttctactggcagaagtatatgtagatacagtgggagatcctgaaaagtacagaaccaagctaacagaaaagtttatagggatcaaatttgtggttgccaaaaaaagctgatagcctttaccctgttattagtggagcaagtatagttgcaaaggtcactagggatagagcactgcgaaactgggtgtttgatgaaacagctctgagtctgcacatgagaactagatcaggatatctaggagaccctgatactaagcggtggttagaagatcacaagcatctggtatttggcttcttcaaggacgcagtcgatgtgacatgggagtctgataaagttgatcaagaagagattgatagtggagacaccaagcgacaagtcaagcttttaagcctgggcttcactggtttcaaaaggaagaccgagaagattgaatcaaccggaaaaggctgttgcaaattcttccaggttcacaaacttgagttggtcaggaagttcccgtgatgtgtggtgtgctgattatgtagtacttactacttagtactatatttgttgtagaagctggagtgtatggttcggggcgtgatttgaaacatgttgaaattggttgtttagactggaattgaaatatgattgtattcccctattgctatttatgcccttatgccattacctacgcgctacagtagttactgtaactactgcaggtttatttttttgtcaaaaaaaaaaaaaaaa

SEQ ID NO: 4005 - DNA, 568 bp, Zea mays
  misc_feature (219)..(219): n is a, c, g, or t
  misc_feature (230)..(231): n is a, c, g, or t
  misc_feature (267)..(267): n is a, c, g, or t
  misc_feature (345)..(345): n is a, c, g, or t
  misc_feature (376)..(376): n is a, c, g, or t
  misc_feature (410)..(410): n is a, c, g, or t
  Peptide Sequence Number=SeqID_10154
  Probeset Number=SeqID_18408
agcaatctcatcaccggttgtattcctttgatagtatgtcaccaaaaatgcttttagccagtatgaaagcttccttccctcacaaaggagcacaaataataaaccctataagattttaaaccgtggtaaatagtttcttttccaccattgaatcaagaaaccttaaagcttcttttagcaatttcattctgtagcaccattctatcatacaagtatatncatcctcactnnggggttaagttagcactctgcatccctacgagaaanctttttgcttcctccaatctgtcgactttgctccaaacatctaataaaacaatcgtaaacatagctggctgagctgcnctgaagctttaatcacttccctcccaaaaanttcctcgagaactttccatgtcaactattttccnataaactaatagaatccaccaactaagtcatggtaggaattgggggggggggggggactagtgagctctctcctctctctctctctcgtgccgattcctgcagcccgggggatccactagttctagagcggcccgccaccgcggtggagctccagctt

SEQ ID NO: 4006 - DNA, 392 bp, Zea mays
  Peptide Sequence Number=SeqID_10155
  Probeset Number=SeqID_18409
atcacaatatcatcattaggataacattttcgtttcataaatagtcacatcatgttcattgattaagttaaggcaatagcaaaatgctaaccatgataacccaaaaggtaagcaaggacaaggtaaatagagagctagtcaatcctttggtttcaagtaatgtagtgcgggacagtgaatcacaaagtgcccggcccgtaataggtcagaggacacttgccttcacctggatgttgctcaggaaggtctccagcaacacactcgggaacctcagactgctcgttgttcttataagaaggccgagcccaccggcacttaacaccatcatcatcagcacaaaactataacctggaataaacactacattagtatttgtcagatgacgtccactt

SEQ ID NO: 4007 - DNA, 1125 bp, Zea mays
  misc_feature (1)..(23): n is a, c, g, or t
  misc_feature (1125)..(1125): n is a, c, g, or t
  Probeset Number=SeqID_18410
nnnnnnnnnnnnnnnnnnnnnnngcctcagctcaggaggtcctcgcgaggaccgtcccaggctggtgatcgtgtcgcggacggggtcccgcgtgatcgagaacgaggcggacgtggcggcgctggccgcggacgtcgggttcgacgtgcgcgtgatccggcccgagcgcacgacggagctgtgcaagatataccgggagctgaacggcagcgacgccatggtcggcgtgcacggcgccgccatgacgcacttcctgttcatgcggccggggaaggtgttcatccaggtggtgcccctgggcacgcactgggcggccggcgcctactacggcgagcccgcggcgcggatggggctgcgctacgtcgggtacaggatcctccccgaggagagctcgctgtcccgcgagtaccccaccggcgaccccgtgctgacggaccccgccggcgtggcgcagcgcggctgggacgtgaccaagaaggtgtacctggaccggcagaacgtgcggctggacctggcgcgcttccgggaggagctcgtcagggcgcaccggtacctggccggcggcggccgagagcgcccgagggatgtcgtcggacgggtttgactggtctcggtgagccaatggacatcacctggctgaaagcaacccacatgtcctctgctctgcattagttttcgctcccgcttagatttcacgattccggatttggtagtccccttggaacttcaacttcatgggagtgaagcacgacccccagatgaagtacaacatgaagctgggcatgccccgggacttctatcacgaggaccacaggccgacacacttccttgagttcagcaacatcgaggagggagaggtcgctgaaggtgatagggaggacacattcacgtagggcgctgggcgcctgttttagaaactcagtatctcaaacgccctttagctctgttttgaatggcaatgtgtgaaaaaaataaaaatgtaacctgactcgacgggtgtcatctgtttttttggcttaatcctgtaccataccttgttgtaagacagccctggagaggggtaaaaaattgtacaagtgcacgccatggcaacaggaaagattttacttagtagctatgctattn

SEQ ID NO: 4008 - DNA, 374 bp, Zea mays
  Peptide Sequence Number=SeqID_10156
  Probeset Number=SeqID_18411
cccggcgtggtctcgctctcgggcctcagcagccccacgcttgccagccgtcgcgaccttcccgctccgctacggggccaagttctgctacgagctccccgtcgatcggaaccgccgctacctcatccgccccacagtcttctacggcgcaacaacagcaacgacgtcctcttcgccgcctgcgcgtcgcccgccgacgccgccgccaagagcaacgccgtcgtcgggctcaagctcaacgacggagggcccggcctcatcggctccgggaagctggccttcggcggcggcgccggaggcggcggcaccaacaaggccgaccggtacaacaacaacaacctccccaacaccgacaacaagaccgtgtacaacac

SEQ ID NO: 4009 - DNA, 395 bp, Zea mays
  Probeset Number=SeqID_18412
gaggaggctaacgaactaggtgaactctttccttagaaaagtaagtactataaaatggcatcactcaaagccgagaaacctgctgagaaatcttgttgctcacaaccatcagggcaggtcaagaaagtgcctgctaccaccaaacctagtgggagcactcccaaagctctagcctccaagtcagctccaaagaaaactgagcagaagcctcagcctaagaagaaggcaagcagcaataagtcgaaggtatctgactaatccataaggattctgttgtacggtgctcttccaaggagtttatccatagtactatagaatataccacttgcttttgttgcttcatcaccatgtaactccttgctggcttggcctaataaataaaacatacttattcc

SEQ ID NO: 4010 - DNA, 867 bp, Zea mays
  misc_feature (453)..(453): n is a, c, g, or t
  misc_feature (456)..(456): n is a, c, g, or t
  misc_feature (867)..(867): n is a, c, g, or t
  Peptide Sequence Number=SeqID_10157
  Probeset Number=SeqID_18413
gcgccagagccacgcacgctagtgtcagtggcacgcagggcagccgcgcgcaccgaggggaggccagagctagcggcgaggccaagggcgcgggcgcgggcgcgaacggcctacgcagacggacatgatcgcgctctcaggcgcgcacacgatcggggtgacgcactgcgacaagttcgtgcggcggatctacacgttcaagcagcggctggcgtggaacccgccgatgaacctggacttcctgcgctcgctgcggcgggtgtgccccctcagctacagccccacggcgttcgccatgctggacgtcaccacgcccagggtcttcgacaacgcctacttcaacaaccgccgctgcagcagatgaagggcctgctcgcctccgaccaggtgctcttcgccgaccgccgctcccgccccaccgtcaaccgcttcgccgccaaccagaccgccttnttngacgccttcgccaacgccatggccaagctcggccgcgtcggcgtcaagaccgccgccgacggcgaggtccgccgggtatgcaccagggtcaactagccctgcccagctccgggtgtgcacatgaaatgaagctagctagctgctagcctacctttagctagctcgttattactaggggcgccgggggttgggaaagaatgctcatgagtcatgtccatccatccatccatcacacggttcacaatgtactattgattcgttggtccaccgattcttttctttccttggtgattgttgtgtatgtagcagaagtaataattaaaaaaccatgtaacaagaagagggatgagctttgagctccacacttgtactgcatccaatccaatgtaaatgaatgccacggttcgtcgn

SEQ ID NO: 4011 - DNA, 669 bp, Zea mays
  misc_feature (592)..(592): n is a, c, g, or t
  misc_feature (607)..(607): n is a, c, g, or t
  misc_feature (611)..(612): n is a, c, g, or t
  misc_feature (617)..(618): n is a, c, g, or t
  misc_feature (631)..(631): n is a, c, g, or t
  misc_feature (635)..(635): n is a, c, g, or t
  misc_feature (640)..(640): n is a, c, g, or t
  misc_feature (646)..(646): n is a, c, g, or t
  misc_feature (660)..(662): n is a, c, g, or t
  misc_feature (665)..(665): n is a, c, g, or t
  Peptide Sequence Number=SeqID_10158
  Probeset Number=SeqID_18414
acgctgcagctccccccgcgggccgccgccctcgcactcgtgctccccccgggctgcaggtcggcccctccagcgcgcgggtccccccccccccccgagaacatctcaatctcaattgaaatcttaaaatccaaaattttcccgagaaaaattaaagtttcctgagaaaatgtcaggtcgtgggaagggaggcaaaggattgggcaaaggaggagctaaacgtcacaggaaggttctgagagacaacatccaaggaatcactaagccggcgattcgatagattggctcgtagaggtggaatcaagcgtattagtggtttgatctacgaggagacacgtggcgttctcaagatctttttggagaatgtatatccgtgacgccgttacttacactgagcacgctcggaggaagacggtgactgctttggatgttgtttatgctcttaagagacaaggaagaactctctacggattcggcgggtagggtttttgattgttggttttttgtgtttcctacgtttattaaatatgttaattttcagaatttggcgttaacttcgaaaaaattaaagattggcctggccggtgtaaantttaaacggaatttngaannggttnngtttgtttgccantttncctantcaccncatttacctaattnnncgnaggg

SEQ ID NO: 4012 - DNA, 714 bp, Zea mays
  misc_feature (1)..(3): n is a, c, g, or t
  misc_feature (538)..(538): n is a, c, g, or t
  misc_feature (602)..(602): n is a, c, g, or t
  misc_feature (608)..(608): n is a, c, g, or t
  misc_feature (630)..(630): n is a, c, g, or t
  misc_feature (670)..(670): n is a, c, g, or t
  misc_feature (686)..(686): n is a, c, g, or t
  misc_feature (692)..(692): n is a, c, g, or t
  misc_feature (699)..(699): n is a, c, g, or t
  misc_feature (710)..(710): n is a, c, g, or t
  Peptide Sequence Number=SeqID_10159
  Probeset Number=SeqID_18415
nnnccattggggcccgggccccccctcgagacgtcactatcgcattctgtcgaatatcgacttccactatggacgctgctggcccctggacctggccctatgggacctcgccggcaaaatcaccgggcagcccgtatggaagctgctgggcggtctgtccaatcgagtccgcgcttacgcgtcctccggcacgcttcgcgatcccggcgccacggccgaagccgctgagcgctacctggccgaaggctttccggctctgaagctgcgcttccaccgcggcgactggcgcgatgatgtcaaaacactcgaagccgtccgcgcacgcgtgggcaaccggctggagttgatggttgattgcaaccagggttggcgcatgtcctgggacacggaagcaccctggagcctgaaagacgcaatcgcggttgctcgcgagttggagcgcctcggggtttattggatggaagaaccgctgcaccgcgccgattacgagggcatgcgcgcgctgcggcgtccgtggatattcgaattgccggcggtnaaatacccggcaggcgcacgagctgcgtgagttgataaccgaggttgcgtggatgtctgcaccngatcancgcttgagcggataccggatgngggcaagccatcatggccaagacacacattgtgttacgcncacacctggaccacgnatggantatggcnacctcaatggnccgg

SEQ ID NO: 4013 - DNA, 442 bp, Zea mays
  Peptide Sequence Number=SeqID_10160
  Probeset Number=SeqID_18416
attttccaggcacccaaagccttttttttggttaatcggttcgttcttcaatctcccccaagggaatgcaccatcccctgtaggaccagtgggttagtaacccgccgaatttggttcccctgtgcccattgttgatcgtcttaacacgacacctggggtttggggttcaccgctcccgctccggccggagtacataggagggctagagtaggaccagccggtagatagactgatgctcatctgtagctagggaaccagagtctgtttgttcagatgtccgagtataaccccccccccacaatgcccattctagcgccccatggttgcaaattttcagttcccccccccccccccccctttcctttgggtctggttagggaatttttgtgtgcttttgagaactatacacttgatctttctatgtagcattcaaaaaaaaaaa

SEQ ID NO: 4014 - DNA, 627 bp, Zea mays
  misc_feature (2)..(5): n is a, c, g, or t
  misc_feature (8)..(8): n is a, c, g, or t
  misc_feature (10)..(10): n is a, c, g, or t
  misc_feature (20)..(20): n is a, c, g, or t
  misc_feature (567)..(567): n is a, c, g, or t
  Probeset Number=SeqID_18417
gnnnnatngngggttgaacnacttggtaccgggccccccctcgaggcgcgacagactttgcattggaagcatggctattggcgatgctcctcatcggcgtggtgacaggcgtcgtcgcccagtggctcgtgcagcgcgacgccgtgagtggcaagacggaccccatcgcgttcggatggctcaaccccgccgtgcaggcggtcaaaaaaggcgactccttcgtcgtcgcctatgtgcttaccaagaccagccacgacggcttcatcgtggcttatgagggcacggttcagcagctcgcgctcgacgaagaccagtcgatcaagctggtcatcctcaacgacgtcgaccgtttcctggtcaaaatttctgagagcggcctagaccgggtcgacacaagctcgacgccgatcacccaattgcaggtgacagcggccgagattgcaaatgtggcactggaggtcgtgcaggcgccagctgcggatgttgaggccgtcgcacaagaggacgcggctgaacggagctgaccagcctcacggtcagccgaaccgcgctggccaaacccgtctntgaaaaggatgcttgaaacgggaaagcttgcggcttctcagaagcctcgtttacttaacc

SEQ ID NO: 4015 - DNA, 567 bp, Zea mays
  Peptide Sequence Number=SeqID_10161
  Probeset Number=SeqID_18418
cccttcgggggggcctttttttttttttttctccccaggaaccccttcaattaccttggaccttcctgttaataatccatgatataaccttccaccttgttccctcctccataaatcccatatatccatggaacctccaaccacctcccttccagaagaagtcccatggataccatccgcggcatccccaagcccttcctcatcgcccggctcggcaatatgcaccaggctgctttgccgcaccaggagtgcgctcgctgataatgttgtcgcggtcgatggcttccttttcgtcgcgctcgagctgctggtcaagaatcaccgccgttgtcatactcggtggattcaatgggggcttcgtctttgaggacggggatttcggattggccgatgcgggattggtaggagttctccattgcgttgccagtggggacttcggtggagctcatgatgatagtggtgggaggattgttgggttggttaaagtttgttggtgtttgtgtattgtggtaagatgaaatattgtgatgttgtgatcccgggcccggccggcccctcgagcgggcc

SEQ ID NO: 4016 - DNA, 525 bp, Zea mays
  Peptide Sequence Number=SeqID_10162
  Probeset Number=SeqID_18419
agaaaaatgggagaggatgaaaaaaaaagtagtataacgtgaagtggaacgactaaggtgtctgcagaagacatggaggcttcccgaatgaagagggatcccccatgacgatcctatgaaagattttctcaactgaaaagtgtggtagataactagatgttcatggcactgtatcacattggttgccccgtgccttgcatcagtgttgtgttactgtggggtggctacgcctgtcctaaggatatggccagcagaccgtgcatgtggcagtgtgtgttgcacttaaattatgatatgggaggggtaaggctggagatagcttaaccagagtggtggtggtgctgtgatctagtggcgggatgtaagaaactggctacaccttttacaagctgcgtgttggagatgtatggggctgtccgcgttggattgacgggagcagtgggaaccgctggagttgtgtgtccaaaatactgtaaaagcagtagaagccgatattaattaaacccacactgtttctgatattac

SEQ ID NO: 4017 - DNA, 714 bp, Zea mays
  Probeset Number=SeqID_18420
gccggccggtggggggccacccccctctgcatcacgctttaggaaagcaatcaagacacgattgcttaggccgccatgcagatcttcgtgaagacccttacgggcaagactatcacccttgaggtggagtcgtccgacaccatcgacaatgtaaaggccaagatccaggacaaggagggcattcccccggaccagcagcgtctcatcttcgccggaaagcagctcgaggacggccgcactcttgccgactacaacatccagaaggagtcgaccctccacttggtcctccgtctccgtggtggtggtaagaagaggaagaagaaggtctacaccacccccaagaagatcaagcacaagcgcaagaagaccaagctagctgtgctcaagtactacaaggtcgacggtgatggcaagatcgagcgcctccgccgtgagtgcccccagcccgagtgcggtgctggtgtcttcatggccgctatgcacaaccgccagtactgcggaaagtggcacctcacctacgttttccacgaggccaaataagcgcgccactaccggggtacgcgacaccgatcgattaacgagtaacggcattcttggcatggcctgggaaggaagctgaataaaattccccccgcattggcccgaccatggtacccctccatccactccaaaaaactcggcgcccacccgaccccacaaaaaaaaaagggccct

SEQ ID NO: 4018 - DNA, 813 bp, Zea mays
  Peptide Sequence Number=SeqID_10163
  Probeset Number=SeqID_18421
actcctatgggcgattgggttcctcgaggccggccgggatccacactttcaacactcaaacgatctattccacgtctttggctaacgccccttgttgtaaccactactacttttaactccttaatcaataacccacattcacaatggctggcggcgatatcaagaagggtgccaaccttttcaagacccgatgtgctcagtgccacaccgttgagaaggatggtggcaacaagatcggacctgctctgcacggtctctggggccgcaagaccggttccgtcgagggttactcttacaccgatgccaacaagcagaagggtattgagtggaacgacgacactctcttcgagtacctcgagaaccccaagaagtacatccccggtaccaagatggccttcggtggcctgaagaaggctaaggaccgcaacgacctcattgcctacctcaaggactccaccaaataagcgactacaaatcgcgtgtaatgttacgactttcgatagatgggaaccgccaaggggcgactgtactatagatttttacacagcacttgttaagacatgccacgtgctttacccattcctatctcctctttatgcgtcttccgttccatacacttttttgcatacaacacaaccgtcttttgcacccaccaagaaagacatggcgttggtttgaagcggaaaaacaggaatgacatgagaccaaatttaaacgtgtcccgcatcatagcccgatttttgttacgatagagatgttaaaactattctttttctaccctaaaaaaaaaaaaaaaaaaaaaaacccgcggcc

SEQ ID NO: 4019 - DNA, 590 bp, Zea mays
  Peptide Sequence Number=SeqID_10164
  Probeset Number=SeqID_18422
ctaactcgttgtgagtctagccccagagagaccgatatcacgtcgaaaggcgtggaacggggccgcagacagcgaacctcgtccttccgactgtttactggctgtggagccgctccgggtggcttggtagtgtggagtaggttcgagggatttctgggacaatacttcgacccaagggggggggagtggtcatcgcaactgtgttgcgaccgcgagtccgccctctcgcgcgggtagcttcaccacgcggagatctgagcgaggttacgcgtctcttgaagagcaaagttggtcaagtacctgggaggctcaagtctatgaagaaccggtggccgaggatccaggtgttcagcaggtagaagttgctgagcaggagctcattgaaggagaagaacaggtggtccaggaggagccgtacaatggggagtacgagttgatctatgtggcatctctcagtcagctttgtggctccaaggaataatacttagttcgctttattattatcatttattttttgtaagactttcgctatgtaataatgacatttatgatatttgtgacatttatctctaaaaaaaaaaaaaaaaaag

SEQ ID NO: 4020 - DNA, 713 bp, Zea mays
  misc_feature (5)..(5): n is a, c, g, or t
  misc_feature (531)..(531): n is a, c, g, or t
  misc_feature (536)..(536): n is a, c, g, or t
  misc_feature (563)..(563): n is a, c, g, or t
  misc_feature (579)..(579): n is a, c, g, or t
  misc_feature (588)..(588): n is a, c, g, or t
  misc_feature (608)..(608): n is a, c, g, or t
  misc_feature (619)..(619): n is a, c, g, or t
  misc_feature (627)..(627): n is a, c, g, or t
  misc_feature (637)..(637): n is a, c, g, or t
  misc_feature (645)..(645): n is a, c, g, or t
  misc_feature (655)..(655): n is a, c, g, or t
  misc_feature (657)..(657): n is a, c, g, or t
  misc_feature (665)..(665): n is a, c, g, or t
  misc_feature (678)..(678): n is a, c, g, or t
  misc_feature (698)..(698): n is a, c, g, or t
  misc_feature (700)..(700): n is a, c, g, or t
  misc_feature (711)..(711): n is a, c, g, or t
  Probeset Number=SeqID_18423
ttganccattgggtaccgggccccccctctacgagcccaagctacttgacgtattgaccaaggccggcgcgaaatactgtgcgattgctccacgtgatgacattcctgggtcgcagcacgtgatggggaccctgcgatcgggagacgacccaaagacgagcgtcaccaacaagaatggacgcttctgggacattggtaatctgtatgcgagcgacggcgcgattttcccgacgtcttctggttacaacccgacgatgaccatcgtcgcaatggccctcagagtgggcgccgccatgatcaacgagacgtccccagcgagcgtcatcacgtaagcattggacactacgcctccggtgtcacatcgacgaagccgaggctctcgtagagctcttccgcgggggtattgcctcgcgtcaccaccaacaggagcttgtcgaatcccaagtctgtgagcgcgtgcatgctctcgacaatcagactacgggcaagtcctcggcgcttcgctcgcgcggccgtcatcgtgaacgccancagangttttctttgtgcacatgaccacgagnacacaggaagcctttngaggcgtangactggcacacagaacaccnggccaaatatntcggctcnaaactgtgcnactcgtgnagctcttcananctcgcctngcgcgaggtcctnggaacgtaaacttattgcgnancccctgggtcnat

SEQ ID NO: 4021 - DNA, 422 bp, Zea mays
  Peptide Sequence Number=SeqID_10165
  Probeset Number=SeqID_18424
acacgatgcatcggttgccccatcgatccccctatcaagagggaagcttctctctccctccggttccagaggaacgctacccgcccgcgcccgttgcctctgtgaaatctccccttcgcttggtgacagtgaaaccctccaccggtgctccgtgctcgcctccggtgatggagaagccgaagaccgtggcgcataggtacacggtgccgacgtcgcctccgtcgatgcggcgcagcagcctgatggtcacccacaccgcgtccccagaccgatgcggccgcgccggcgtcgaggaggaggccggattagcagtagctgccatggacagtaccgctgacggggtgcagtcaaatgagatgctagacaggctgaagcaccgcggtaggctggtgtcgctgctggccgacaaccgctcctccccc

SEQ ID NO: 4022 - DNA, 393 bp, Zea mays
  Peptide Sequence Number=SeqID_10166
  Probeset Number=SeqID_18425
cgggcggagaatttcaagctcaagcaaaaaacacaaagcgcgttaaaccacactcaaaccatgcgccagccaacaaacagccctcctagtcccgaccagaactcgctcgtagccccgagaacccgacagcgcgagatgggtcccgagctgatgacagccaagatgaccgccaaggccgccgcggcggcggaggcggcggcgaagcctgccacgagggcgtacgtgacgttccttgcgggcgacgacgactactggaagggcgtggtggcactggccaaggggctgcgcaagggacgctcggcctaccccctgagggtgaccgtgctgcccgacgaggccgagtcccaccgacgcatccacgggacgcaaggagtgcgtcgtccgcaagatcga

SEQ ID NO: 4023 - DNA, 463 bp, Zea mays
  Peptide Sequence Number=SeqID_10167
  Probeset Number=SeqID_18426
ccccattccccaaatgttgacccatacccacgacaaaaactaaccctaggcatcgccccttccccgcctccgcccacgcgccatggctgcctaccccctggtctccagggaagcactcgccgcgcagagaggcgccattcgatcccggaaggtagtggcagcagcagcaactccttctcgttcgtgacgccttgttccacggtggcggcgcagcgggcaactggtaggctttcggcggcagacattgcaaactccctgaggtacaagctatatgactctacctccagtgcattccacaatgtcgtcccagctttggagggtttgcatctgagcggccatggttctggaggaagcgcatcaggcaccctgagcaatgcaggggttggctctccttccccatgtcctaaccaggctaagtccaaagagaatatccaacctaaccgctacacagtttcggtacagt

SEQ ID NO: 4024 - DNA, 3517 bp, Zea mays
  misc_feature (1)..(206): n is a, c, g, or t
  misc_feature (3517)..(3517): n is a, c, g, or t
  Probeset Number=SeqID_18427
nnnnnnnnnnnnnnnnnnnnnnnnnnnnnnnnnnnnnnnnnnnnnnnnnnnnnnnnnnnnnnnnnnnnnnnnnnnnnnnnnnnnnnnnnnnnnnnnnnnnnnnnnnnnnnnnnnnnnnnnnnnnnnnnnnnnnnnnnnnnnnnnnnnnnnnnnnnnnnnnnnnnnnnnnnnnnnnnnnnnnnnnnnnnnnnnnnnnnnnnnnnnnngggcagcatccccacatgacttgagtacacatgcatctgatatgaatctagatgggccattaggcaattcaaggagaaacttgtccagatcaccacctcttgatgtgttccctaggaatgtgtcccccaagagaccactagagaggctgccaccatctcattctgtattgggacctgatcccagaaaattgactgatcgaaatggcagggtaagatggggtttggatgatggtgcacagtggcctacaatcagtatgcttgatgaagagtacaggaagcaaagtgcaagggaacttattgatgcatatggaaattgtcaaggacgagatgctgatgaacgacttcctaaagtgcagcgcctggattcaaatggtatgactagcagatctagtgcacgaaattggtggcatacatgtaaatcctaaaattcatgggaggatatgagcccaactttgactgatcgagtcagaagcagcatgccatcttttcctcctggaaccatgagaactggatttcctggggcaaatgcagggttactggaatctgatgttgggaggcacaatttcctaagccaagctactagattatcggttgatggttcaccgtttaatcttgaagataggttttcaactgcaagtcatgttgacatgtccacaaggagatatccaagcaattttggtgttcagaatggagctcttttgaaaagccaattcaaggagaaacttgtccagatcaccacctcttgatgtgttccctaggaatgtttccccaaagagaccactagagaggctaccaccatctcattctgtattgggacctgatcccagaaaattgcctgatcgaaatggcaggttaaggtgggctttggacgatggtgcacagtggcctacaataagtatgcttgatgaagagtacaggaagcaaagtgcaagggaacttattgatgcatatggaaattgtcaaggacgagatgctgatgaacgacttcctatagtacagcgcctatacctgagacaaaacatgtgcaaatctcatgcacgaaattggttaacttcagaggaagagtattcatgggaggataatcagtatttgttccgcatcatcagtatgatgccttggaccggaaaacaggtacccgtaacttagctcaaccaccatatcagcaccaagatttgttgctaccaagccaacagaatccaggtacaattttgggaaaccaagttcatcctcatctgccccaacagttacatccccattcccatcctcaccatcaggagacttttagaagctttgcccctggcatgactgtatctccattccaaggacaaggaggcaatgcaaccatgacaccagtttccgttctgccaactttttctgtaccacctgctgtgccaccctatggcgtgctgtctgcacctgggtttcctatgccaccattaccgcccggaccaccacctgtcccactgcagatgggttcatcatcatcacaagttggtggccctcaaccatttgtctctggacttttgagtaaccttatgcggcatggtgtaatttcactggaaccacctagccaatcccaggattctgttggagttgacttcaatgtagacctcaaggtacggaatgagcctgtcatcaatgctttgtatcaggatctttcaaggcagtgtaaaacttgtggccttcgatttaaatgccaagaggagcatcgtgctcacatggactggcatgttacaaaaaataggaattcaaagaaccgtaagcaatcttcacgtaaatattttgtcacggtggaggaatggttaagagctgcagaaacagtaggaaacgatggagttcctgcttttgtgccctcagacccagtcccagatagaaaggaagagagagaaattgctgttcctgcggatgaggagcaaacagcctgtgcattatgtcaagagccatttgaagatttctacagtgatgagactgatgagtggatgtatagaggtgcggtctacatgaatgcaccagacggtaatattgatggtctggaaaggtcacggttgggacctattgtccatgctaaatgtcgatctgggcccagcaatacttagggtgggcatggctgggatgacttgatagcttttttttccgttgcggctgtaggcatgacctgtaaactactggagactcagaatttggtatggttagattttttcctatctatggcttcgttaacagccaatgcacagaatgttaatgtgacaatagtgcataactgtaaaatttttctgtaattcagtgattggaagttagtaatcggcacaacattcactattgtcatattgtgcttttgcccccgtcattttgtccttccatagttgcacagtgctgctttttcattacagccgtagtgtgatctatacttaagcttcatgtttagggtttctgcagcacagttgttgtcaggacagcggtttatggagccatggtctcactggacatgggaaacaatatatttcaatagtcctgctttcttcctcgttaatatcttgtgcaggatacataccagttctctatgttggttggtagctttggaagggaccgtgcaagatgaccaagagtgctggccactatttatgcctaagtattgaaagggactagatactgtcattaccttattgccaatttttttagtattttcctttgtaagttgagagcattgtttgtgactattattcttggttgcttgtatagttccatcttgctgatatgtttatactccaaaatgtgggtcagaatgtcttatcagactttattctttattctggttggtatatgctcttaatgttttttgtcccagaattctgaacatactctaatgggaattgctaccatgccgtccaccttgggaacactattgggcttccattgcgaatacaagacctgaacatccttcattgaataccacatcggggaaatgccaaattacgtacaataatgataaatccttggggaatatcacctgcctgccacagtgccccttcaccatgcaatcacaaactttaccactaattccacctgataccaaacattaagtatctatctatttccctgtgctataacaaacatctatggactttaaggtggacataatgttttttagagctagtttgggaacctcattttcccaagggaaattgtatcttgaggttaacccccctgtaaatagaggatagtctccttgctagtatttggctgtatgcaacatgtttttggctacgattatatatgttatctgactaaataaaaatgctggatgtgagttn

SEQ ID NO: 4025 - DNA, 599 bp, Zea mays
  misc_feature (47)..(47): n is a, c, g, or t
  misc_feature (77)..(77): n is a, c, g, or t
  misc_feature (139)..(139): n is a, c, g, or t
  misc_feature (145)..(145): n is a, c, g, or t
  misc_feature (203)..(204): n is a, c, g, or t
  misc_feature (235)..(237): n is a, c, g, or t
  misc_feature (242)..(243): n is a, c, g, or t
  misc_feature (254)..(254): n is a, c, g, or t
  misc_feature (269)..(269): n is a, c, g, or t
  misc_feature (272)..(272): n is a, c, g, or t
  misc_feature (356)..(356): n is a, c, g, or t
  Peptide Sequence Number=SeqID_10168
  Probeset Number=SeqID_18428
ccaagcttcattgccttacaagtccatgtgcatagggtcctgctcgncaggtgtcccaccaaaaactccgccaccancggagtaaaggtaatctccggctcctgtgctgacttgtgtggggcattgtttgcccatgctntgcaanaccagctctcgggagcagtggcttcgttcccgatcaggtggcatgggttacatagtgnnaggttattcccccccccccgtgtaaaaaagnnnagttnngaatgcccccnatcagtcctctagtnatntgtgataaaaaaaagcaaacccacctccagagaccgcggtttagagagaaacccggcccttgtcgcagttctgatcaggccatnctccgcactcgcccccccgccaatcggcagtcttcctggcgatgctcgccgccggcgaagccaagggcggccgccgcaagcccagccggcgacgccggggtagaagggggctgtgtacgggaggacaacggatccaactgctacttcggcgtgtcgtcgttcttgaatcttgacctctcctatccaacgcccgggcaccgcccagcgcccacgcgtccgcccacgcgtccgcccacgcgtccg

SEQ ID NO: 4026 - DNA, 465 bp, Zea mays
  misc_feature (443)..(443): n is a, c, g, or t
  Peptide Sequence Number=SeqID_10169
  Probeset Number=SeqID_18429
aataagtttacattccctctgaactcttcgcacaaatcgatttcaatggcgggccgcggcaaaactctcggatccggggctgtgaagaaggcaacctcgagaagtagcaaagccggtctccaattcccggtgggtcgtatcgctcgtttcctgaagaaaggcaagtacgccgaacgcgtcggagccggagctccggtctacttatcggccgttctcgaatacctcgccgcggaggtattggagttggctggtaacgcggcgagggataacaagaagacgaggattgttccgaggcacattcagctcgcggtgaggaacgacgaggagttgagtaaattgctgggagatgttacgattgctaacggaggagtgatgccgaatattcacaatcttcttcttcctaagaaggctggtgcttcatccaagccatctggggatgacgnttgattaaatctatgttgttct

SEQ ID NO: 4027 - DNA, 602 bp, Zea mays
  misc_feature (1)..(2): n is a, c, g, or t
  misc_feature (10)..(10): n is a, c, g, or t
  misc_feature (21)..(21): n is a, c, g, or t
  Peptide Sequence Number=SeqID_10170
  Probeset Number=SeqID_18430
nnacagaaancttggtgatgnacgtcctctaggtttgcttgttggggtcaataaccataaaaaaacaactatttttggtgctgcacttctatatgatgagactactgagagctttatttggttgtttagaacctttctgaatgtgatgtctggaaagaaaccacaaactattttgacagatgaagacgcagccatggcaaaagcaatcaagatagttctacaaggaactcatcatagaatttgtgtatggcatatgaatcagaatgcatgcaagcctctccgcagttgttgaagattataagaaattcaatgttgaatttcagaaatgtatatatgatcaagaggaggagggatgggaaaatgcggggaaccaggagcgaaccacattcaaccttcaagggaatcaatggcttcaacgactttttgataaacgatatctgtgggcattagtatatggcagaaacacattctctgctgatatggtgtccactcaccgggatgaaagcctgtgattttagagcgacgcaaagtacaccaaagccgaaggcagcacatgcagctccaatagcttcatcgcatccatcattcaacatccatatggc

SEQ ID NO: 4028 - DNA, 440 bp, Zea mays
  Peptide Sequence Number=SeqID_10171
  Probeset Number=SeqID_18431
agttaatattctgtgcagattctatacaagagacacccaagagcccagatatcaatacactcactgatgaccactcctaggccatcgagtatcacgccagtacaaggaaataattgcaggaccctaatatcgtaggcagcatttgcatgaacgcagagtgcaaaatcatagctgtgccggtggtttacccagatatctactttctcactgataagttccaggaggcttccttcaggcacgcccccacaagggaggcgtcgggggagcccaggcacgtggacagcgcctccacatgcggtctcctgatctcgctacggctgcggtcgcgtgagaaagccccgtggagcagccacgctgctgggacggtcgcttccttgtcgtgtacagcagctcaagaagcgtcagttggtcttgatcgcctggtcaatgtagccggcatt

SEQ ID NO: 4029 - DNA, 419 bp, Zea mays
  misc_feature (42)..(42): n is a, c, g, or t
  misc_feature (56)..(56): n is a, c, g, or t
  misc_feature (63)..(63): n is a, c, g, or t
  misc_feature (65)..(65): n is a, c, g, or t
  misc_feature (67)..(67): n is a, c, g, or t
  misc_feature (84)..(84): n is a, c, g, or t
  misc_feature (93)..(93): n is a, c, g, or t
  misc_feature (106)..(106): n is a, c, g, or t
  misc_feature (116)..(116): n is a, c, g, or t
  misc_feature (119)..(119): n is a, c, g, or t
  misc_feature (124)..(125): n is a, c, g, or t
  misc_feature (129)..(129): n is a, c, g, or t
  misc_feature (134)..(134): n is a, c, g, or t
  misc_feature (142)..(142): n is a, c, g, or t
  misc_feature (151)..(151): n is a, c, g, or t
  misc_feature (154)..(154): n is a, c, g, or t
  misc_feature (161)..(161): n is a, c, g, or t
  misc_feature (200)..(200): n is a, c, g, or t
  misc_feature (245)..(245): n is a, c, g, or t
  misc_feature (248)..(248): n is a, c, g, or t
  misc_feature (251)..(251): n is a, c, g, or t
  misc_feature (270)..(270): n is a, c, g, or t
  misc_feature (278)..(278): n is a, c, g, or t
  misc_feature (286)..(287): n is a, c, g, or t
  misc_feature (317)..(317): n is a, c, g, or t
  misc_feature (319)..(320): n is a, c, g, or t
  misc_feature (329)..(329): n is a, c, g, or t
  misc_feature (344)..(344): n is a, c, g, or t
  Probeset Number=SeqID_18432
cgaggaagcaagaacaccacccgcccaggcagccaagagcangcagggggcgctcnccaagcncnangagcaagcgccacaagngcgacccanaaaccagggcacnggccaccagncangccanngggnaccangaacccangcacgcagnacngcaagangcaacaggggcccgccagcgggagggcgagaccgacccnggagccgcagcaacggggggccccaccgcaacagacgaagccagngangangccacacgagacgacgccnaacaaganggcaccannggagaagccgagcaagacggcaccaagggncnngccgagcangaagccgcaaacgangacgccacaaaggcaccgcgacgccgccccgcagaacaggccgcaccagcagggaccacgcaggcccaacccaaa

SEQ ID NO: 4030 - DNA, 559 bp, Zea mays
  misc_feature (420)..(422): n is a, c, g, or t
  misc_feature (426)..(426): n is a, c, g, or t
  misc_feature (431)..(431): n is a, c, g, or t
  misc_feature (461)..(461): n is a, c, g, or t
  misc_feature (463)..(463): n is a, c, g, or t
  misc_feature (465)..(466): n is a, c, g, or t
  Peptide Sequence Number=SeqID_10172
  Probeset Number=SeqID_18433
cccacgcgtccgcccacgcgtccgatgcgagaatactgccgcactttgtgataatgggagggcaaacattgaatgcaagctgaaccatactattgacaagccagaagaggctaccattatagagatgcaggagccggtttccctgacctttgccctgcggtacatgaactccttcaccaaaggcgtcttcactggtccgagcaaagtcacgatcagcctgtcgtccgagcttccagtggtggtcgagtacaagatcgctgagatgggtttcattacattttacctggcccccaagatcgacgacgacgaggagatgaagccctgatggcctgtgacgacatcagtgctcatgctgccgacttttcgtcgtcttccacccatggtttgcttattatttattgtttgcagaacaaagggaannntggntgttntgttttccccccaccacacaaaaaaatttngntnnttatttgtaaaaaaagtgtgtccatggatttatagtgaatctagattagtgggcttgtgctttgtgcatgccgatgctgactgcccataaggt

SEQ ID NO: 4031 - DNA, 694 bp, Zea mays
  Peptide Sequence Number=SeqID_10173
  Probeset Number=SeqID_18434
gccggccgggctgggatctagtattcgggcagcaccactatgccaatgcgctcatcacgcaaaaagaacccgcatggatccaatcgcgagggcggcagctgcatcgtcccatcgtgccagcaaccgtagaccgtccaagccatctccgatcaccgtcgcgcgaacaccattcgggtctaaaggaaatggcagtcacgcgtggaggttgccttcctggcgcatgctgacgtccactgcggccatacctggcgcgaatgaaccgcaggaacgctctactgcaagagaatctgatacgaagtccaaggacaacaacgacaacaacgaccaggacaggctgcatgactaccacagaaacgaattaccggcactacttacggcctcatcgaggcccatcccacagagaaagactcaataggagcgcacggagaccgagaaacggatcctccagcgagttgacgagaacaggcagtgctaatgagcaggatcgaatgggcgatcatggagggtcgcccgcacgggatgaaaattctcgcaggtatatcttcgctgttcccgctctagctatggcactgctttgcgtaaacaactactccgaggatgcttgactgacacgcattacggcctgactgttttcctgttacagccatagcgagcgaggaaacatattatctcgatcgcaatatagactaagatg

SEQ ID NO: 4032 - DNA, 685 bp, Zea mays
  Probeset Number=SeqID_18435
atctccacccaaagcactgggagtagctatatcattctagcacacccacacaatcacaatggcacccagtgctgccctcttcatcgccctgagcctcctcctctccgccgtcgccgcccacggctgcggaagcacctattgccaaccgccggtcgtcgtgccgacaccacccatcgtcgttccgccgccataccatgaaggaggagggcacggccacggccacggcgggcagtgctccatcaacgtgctcaacctgagggtgtgcgccaacgttctcagcgaactgctcggcctcaagatcggcgttccggtgcacgaccaatgctgcccgctgctccaggggttggccgacctcgacgccgccgtctgcctctgtatcgccgtcagggccaacatcctcggcctccacctcaacgtgcctgtggacatcagcctcctcctcaaccactgcggcaagaagtgcccgtccggtttcacttgcccagcccattaacagaagtaccgttttgcatgggcgcccaataagatttgctttccgtacttcgttttcatgatgtgtggaactgttccactcccacattttaattgtgtaaccagtactactacagtatttatttatttttggcaaacaagcatgtactcttcatattgataaatatcaacagtgagcaataattattactcc

SEQ ID NO: 4033 - DNA, 456 bp, Zea mays
  Peptide Sequence Number=SeqID_10174
  Probeset Number=SeqID_18436
gaggcatagcagcagcatacaaagctttgaattcaacagctaagttcatatccggtgcttttctttcttcctcaaaaccaaacatgtcaagctcatgtggcaactgcgactgtgctgacaagagccagtgcgggaagggaaacaactatggtgttaacattgtagagactgagaagagccacattgagactgttgtcatggatgttccagctgctgagcatgatgggtgcaagtgcggtactaactgcacttgtgtcaactgcacctgtggccattaaggaatatatgaaaatgtaattgccatgtgtatggcaatacaaaccccctaataatgtaatcttttactaaataaatgtgtgtgctgttatcgtacttcacgtctgtataagtgatacacaatcatttctagttcctgcatagttataaaacagccatggctgtggcattctgtggcct

SEQ ID NO: 4034 - DNA, 565 bp, Zea mays
  misc_feature (555)..(555): n is a, c, g, or t
  misc_feature (559)..(559): n is a, c, g, or t
  Peptide Sequence Number=SeqID_10175
  Probeset Number=SeqID_18437
gagagagagagagagagagatctctatatccccccccccccccccaactcgttgcagtcagtgtgctaagaagattgcagtctttgccttgcctaaggaccaattaattgatcgttgctggaaatccagccatgttaatttacgtttatttcagaaacttagtttggatatggctaattgtttggtaacgtaataatttctacctactagccatattaggcgacttctacaatttctataatttatattagtgaatgcaactttttaaattaatttgatttcacctattgttttgtcttcatttggactaacgttcttctctgtaatatgtcattcaaaaatttggttggaactcctggatgtcttttagaccatttgacagagactaaaggtttttgccttacgaaaatcaagtatttggtatgttttcagttttcttattacggagcacattttggcttcagattggtttggagttccccatctgccttttagcctcacatcatgccgacatggggggggaggcccgcgggtccagggccggtttccctcccnttanaaaaaa

SEQ ID NO: 4035 - DNA, 502 bp, Zea mays
  Probeset Number=SeqID_18438
attcggctcgagcacaaacaaatgaggatggggtatctgcatactacctgtggaactccaaactatgtagcacctgaggtgcttgctgataaaggttatgatggtatggctgcagatgtatggtcctgtggcataatcttatttgttcttatggctggatacttaccctttgatgatgcttggctgagatgcttgactacgacgaagagttcgaggccgagttccagcttttcgacgacgatgacgagtgcgaggccgagttccagcttctcgacgaccaccaaccatctcccgcagcttcgcctgaggccagcggctgcaagcggaagcctgcccttgctcctactgctggtgcccccgcttccacggatccggcgaccccgtgctccaggaagtacaggggcgtccggtaccgtcggtcaagcaggtgggccgcgccgatcaggtacccgcggcaggggcgccgcgcctggcttggtacgtaccgcaccgccgaggaggc

SEQ ID NO: 4036 - DNA, 869 bp, Zea mays
  misc_feature (1)..(32): n is a, c, g, or t
  misc_feature (819)..(869): n is a, c, g, or t
  Peptide Sequence Number=SeqID_10176
  Probeset Number=SeqID_18439
nnnnnnnnnnnnnnnnnnnnnnnnnnnnnnnnaattctcatctcaccagtaatctcgtcctagccaggcttcccttgccctaggattgcgccgccgccgatccaaccggcttctccccgcccgacggccgcgatgtacaacggcatcgggctgcagaccgcgcgggggtcgggcaccaacgggtacgcgcagagcaacaagttcttcgtcaagccccgctccacatccggcgggggtccgggcgggccccacaggccgctgcgccccgacgccgccggcgcggatggcggcgggatgcgcaagcccaacaaggagatcctcgagcacgaccgcaagcgccaagtcgagctcaagctgctcgtgctcagggacgcgctcgaggagcacggctacaccgaagacgagatcgaggagcgcgtcgcggaggcgcgcaaggccgcggaggcagaggcggccgcggccgtggctgcggaggaggcagggagcggtcgtggcgccgggcgaccgcctctgcccggcagagggtttgcagacacacagagcaaccatgttgcagaacggaaggagaaacaacttgagactctaagatctgctttagggctgaacgtggagtatgcaaactgaggaaatggatctgttggcgtcatttaggtttcagattgccacagataaggccagatgtcgattgtctagcactagatgtagtggcttctatattagtatgggagtcttctagtacttaaagagtaatcccatattcgaattgtatatgttctggttatatgttcgggcatttgtccatcttttggatcgtaaaannnnnnnnnnnnnnnnnnnnnnnnnnnnnnnnnnnnnnnnnnnnnnnnnnn

SEQ ID NO: 4037 - DNA, 789 bp, Zea mays
  misc_feature (30)..(30): n is a, c, g, or t
  misc_feature (262)..(262): n is a, c, g, or t
  misc_feature (265)..(265): n is a, c, g, or t
  misc_feature (268)..(268): n is a, c, g, or t
  misc_feature (278)..(278): n is a, c, g, or t
  misc_feature (283)..(283): n is a, c, g, or t
  misc_feature (287)..(287): n is a, c, g, or t
  misc_feature (289)..(289): n is a, c, g, or t
  misc_feature (303)..(303): n is a, c, g, or t
  misc_feature (306)..(307): n is a, c, g, or t
  misc_feature (317)..(317): n is a, c, g, or t
  misc_feature (320)..(321): n is a, c, g, or t
  misc_feature (325)..(325): n is a, c, g, or t
  misc_feature (347)..(347): n is a, c, g, or t
  misc_feature (353)..(353): n is a, c, g, or t
  misc_feature (358)..(359): n is a, c, g, or t
  misc_feature (369)..(370): n is a, c, g, or t
  misc_feature (381)..(381): n is a, c, g, or t
  misc_feature (383)..(383): n is a, c, g, or t
  misc_feature (387)..(387): n is a, c, g, or t
  misc_feature (390)..(392): n is a, c, g, or t
  misc_feature (398)..(398): n is a, c, g, or t
  misc_feature (404)..(404): n is a, c, g, or t
  misc_feature (410)..(411): n is a, c, g, or t
  misc_feature (417)..(419): n is a, c, g, or t
  misc_feature (422)..(423): n is a, c, g, or t
  misc_feature (426)..(426): n is a, c, g, or t
  misc_feature (431)..(431): n is a, c, g, or t
  misc_feature (433)..(434): n is a, c, g, or t
  misc_feature (439)..(439): n is a, c, g, or t
  misc_feature (441)..(441): n is a, c, g, or t
  misc_feature (444)..(444): n is a, c, g, or t
  misc_feature (448)..(448): n is a, c, g, or t
  misc_feature (454)..(456): n is a, c, g, or t
  misc_feature (461)..(461): n is a, c, g, or t
  misc_feature (463)..(464): n is a, c, g, or t
  misc_feature (466)..(466): n is a, c, g, or t
  misc_feature (469)..(469): n is a, c, g, or t
  misc_feature (475)..(478): n is a, c, g, or t
  misc_feature (484)..(487): n is a, c, g, or t
  misc_feature (491)..(492): n is a, c, g, or t
  misc_feature (495)..(495): n is a, c, g, or t
  misc_feature (497)..(497): n is a, c, g, or t
  misc_feature (500)..(500): n is a, c, g, or t
  misc_feature (504)..(506): n is a, c, g, or t
  misc_feature (508)..(509): n is a, c, g, or t
  misc_feature (512)..(512): n is a, c, g, or t
  misc_feature (517)..(517): n is a, c, g, or t
  misc_feature (522)..(522): n is a, c, g, or t
  misc_feature (525)..(525): n is a, c, g, or t
  misc_feature (528)..(528): n is a, c, g, or t
  misc_feature (534)..(534): n is a, c, g, or t
  misc_feature (539)..(541): n is a, c, g, or t
  misc_feature (543)..(543): n is a, c, g, or t
  misc_feature (547)..(548): n is a, c, g, or t
  misc_feature (552)..(552): n is a, c, g, or t
  misc_feature (555)..(555): n is a, c, g, or t
  misc_feature (557)..(557): n is a, c, g, or t
  misc_feature (561)..(561): n is a, c, g, or t
  misc_feature (563)..(563): n is a, c, g, or t
  misc_feature (568)..(568): n is a, c, g, or t
  misc_feature (572)..(572): n is a, c, g, or t
  misc_feature (574)..(574): n is a, c, g, or t
  misc_feature (576)..(576): n is a, c, g, or t
  misc_feature (584)..(584): n is a, c, g, or t
  misc_feature (586)..(586): n is a, c, g, or t
  misc_feature (588)..(588): n is a, c, g, or t
  misc_feature (591)..(591): n is a, c, g, or t
  misc_feature (594)..(594): n is a, c, g, or t
  misc_feature (597)..(598): n is a, c, g, or t
  misc_feature (600)..(601): n is a, c, g, or t
  misc_feature (603)..(604): n is a, c, g, or t
  misc_feature (607)..(607): n is a, c, g, or t
  misc_feature (610)..(611): n is a, c, g, or t
  misc_feature (613)..(613): n is a, c, g, or t
  misc_feature (615)..(616): n is a, c, g, or t
  misc_feature (618)..(618): n is a, c, g, or t
  misc_feature (623)..(623): n is a, c, g, or t
  misc_feature (625)..(625): n is a, c, g, or t
  misc_feature (627)..(627): n is a, c, g, or t
  misc_feature (629)..(629): n is a, c, g, or t
  misc_feature (632)..(633): n is a, c, g, or t
  misc_feature (635)..(635): n is a, c, g, or t
  misc_feature (637)..(638): n is a, c, g, or t
  misc_feature (642)..(645): n is a, c, g, or t
  misc_feature (647)..(647): n is a, c, g, or t
  misc_feature (650)..(650): n is a, c, g, or t
  misc_feature (652)..(653): n is a, c, g, or t
  misc_feature (657)..(657): n is a, c, g, or t
  misc_feature (659)..(660): n is a, c, g, or t
  misc_feature (662)..(662): n is a, c, g, or t
  misc_feature (665)..(666): n is a, c, g, or t
  misc_feature (673)..(674): n is a, c, g, or t
  misc_feature (677)..(677): n is a, c, g, or t
  misc_feature (679)..(680): n is a, c, g, or t
  misc_feature (685)..(687): n is a, c, g, or t
  misc_feature (690)..(691): n is a, c, g, or t
  misc_feature (693)..(693): n is a, c, g, or t
  misc_feature (696)..(697): n is a, c, g, or t
  misc_feature (700)..(700): n is a, c, g, or t
  misc_feature (704)..(705): n is a, c, g, or t
  misc_feature (714)..(715): n is a, c, g, or t
  misc_feature (717)..(717): n is a, c, g, or t
  misc_feature (721)..(722): n is a, c, g, or t
  misc_feature (724)..(724): n is a, c, g, or t
  misc_feature (726)..(726): n is a, c, g, or t
  misc_feature (732)..(733): n is a, c, g, or t
  misc_feature (747)..(747): n is a, c, g, or t
  misc_feature (749)..(751): n is a, c, g, or t
  misc_feature (753)..(753): n is a, c, g, or t
  misc_feature (755)..(755): n is a, c, g, or t
  misc_feature (763)..(763): n is a, c, g, or t
  misc_feature (765)..(766): n is a, c, g, or t
  misc_feature (770)..(770): n is a, c, g, or t
  misc_feature (773)..(773): n is a, c, g, or t
  misc_feature (776)..(777): n is a, c, g, or t
  misc_feature (779)..(779): n is a, c, g, or t
  misc_feature (784)..(784): n is a, c, g, or t
  misc_feature (788)..(788): n is a, c, g, or t
  Peptide Sequence Number=SeqID_10177
  Probeset Number=SeqID_18440
ccggctgagccccccccccccccccccggnggacgggccggagacgggcaaggacgagagcgagaggcggctgacggctgcggaggaaggatctggacgccggggatgggcgccgccatggcagccgctcggaagggggacaggccggagacgagcaaggacgggagcgagatgtggcagaggtccacctcgccgaaggtgaagtacaacagcggtccggaggtccggtgcgcggcttgcgaggctgattttggcggtggcngcntgnaggggatganacgtntgananacggtgtccgcggntannggttttttanttnntttngccggtttcctgttgccctctncttatnttaannacgggggtgnntatatttttanantagnttnnnttgttntctttntttggnntctacnnnttnnttntcctncnntttcntnacnatantagttnnntgtananntnatnttatannnnttatcnnnntatnntcntntantgtnnngnntcncattnttatnttnctncttgtnttatnnntnttcnntttnatncntgtncntattnctgntntntttttatncntnttnttngtnnanntnnctntcnntntnntnttgancntnanttnntntnnttannnntntancnntttntnntntannttttgtnnttnanngtttnnnatnntnatnnatntttnnattattttnntntatnnanantttttnnttttatttctcatntnnntnanattctctntnntttnctnttnntnttgtnttcnc

SEQ ID NO: 4038 - DNA, 1255 bp, Zea mays
  misc_feature (1255)..(1255): n is a, c, g, or t
  Probeset Number=SeqID_18441
gcattctaccatttcatgatgtcccttatttacatgtgtaaaatgatccacatcaataaaagtcaccccttcgtattatgaagcaaaataacaagcttacatgctattactgatatacttcctgttcttacagccaggatctcttggcctacgtgtagacagactccaggaagatgtccatcttttgcttctccatcaccgtcgttatcatgcagcctgctggaatgccacagcgggacaggagcatggtgatgagcatgcgcatgatgactgcaagtgtctccgcatcccgacgttcgacgactggaacctgcaggacgacatgcccgtcacccaatactgtcatgcaggcacttattcatcagagttccgtcgacataaaaggactacgacgaggatctgttcaaggtgccccagtgttcctgccaagccctacaactacaagaaggttttgggtggatttgtaggttggtcatgtgaattgcatcaaacagggagtcagggacgatattgaagttgtggctgtggatgacccttttgttgatgctaagtacatggccgttcgcaggatagaggtggtgaggcttctaagcatactaaatttctgcatcatgatgaatcatatgtgatttgtttcgattcaactggatagaagaatcagttgctgatttgatggagtcgcagcttgcttggcggacatagggtctgttgcatggattatggtttatgtgccagcgcccagtggtagacagtgtgattcaatgtgcttgctgttcatctgtccaaaactgctaaagtagcttctgaaaatggatgacatgctggacacttgctcactcggttcttgattttgattttgagaagttctgttcaatctccttgtcaaatttgaatgtgtatgcgtgcttggtctgtggaaaatatttccaaggaagagggttgaaatctcatgcatatacgcacagccttgaagcaggccatccaaacagcaccatggatcgttgtatagtcctggatcctacaagggacgccagcaaggtagcaaatttggtggcagtactacaagttggagttctgttggcagcatatttggtactatcgacttgagtggcaatcaacaaaggggcagcatgccatttggtagtcacaatggctctctggagtttatgaattagcaaaaccatgggccacgcgctacaaaatcgaagatacaaggcacagagaacacctcaggagatgagagaagcgagaaaan

SEQ ID NO: 4039 - DNA, 633 bp, Zea mays
  misc_feature (32)..(33): n is a, c, g, or t
  misc_feature (181)..(181): n is a, c, g, or t
  misc_feature (282)..(282): n is a, c, g, or t
  misc_feature (295)..(295): n is a, c, g, or t
  misc_feature (613)..(613): n is a, c, g, or t
  misc_feature (623)..(623): n is a, c, g, or t
  misc_feature (629)..(632): n is a, c, g, or t
  Peptide Sequence Number=SeqID_10178
  Probeset Number=SeqID_18442
aatgtgaggttagcttcactcattaggcaccnnaggctttacaactttatgcttccggctcggtatgttgtgtggaattgtgagcgggataacaatttcacacaggaaacagctatgaccatgattacgccaagctcgaaattaaccctcactaaagggaacaaaagctggagctccaccncggtggcggccgctctagaactagtggatcccccgggctgcaggaaatggccggcgcgctacctgctgcagcaccccggggtgatcgacgagctggccagngaacagctgttcnccgaacgctttgtcgccgccgacttcgagcacgagatggcactgcgcctggccgccctggagagcaccggcgaggacgacgacgaaaacctgctgaacctgctgcgccgcgcccaccatgcggaaaccttccgcaccctggcccgcgacgtggaaggggccatcacggtggagcaggtggccgacgacctcagcgccctggccgacagcgtgctgcgcgtgaccgcccagtggtgctggaagcgcctgaagcaacggccaccgcgacacccctaacttcgccatcattggctacggcaagggggggcccggtacaaanggtttaaacncaaatnnnnc

SEQ ID NO: 4040 - DNA, 1045 bp, Zea mays
  Peptide Sequence Number=SeqID_10179
  Probeset Number=SeqID_18443
gttgctacaaggtttatcgttaggccatccaagaagggttcaactgttcagcgccctcgcaccaggactttgactccttttcatgatggcatcttggaggatgttgtcttcccagttgagattgtggggaagcgtgtcaggtatcgcctggatggtgccaaggtcatcgagatcttcttggacctaaaggagaggaacaacaccgaatacaagctagagacctacactacggtctaccgcaggctgtgtgggaaagatgtggtctttgagtaccatatgatcgatattgcataaatatgatgcccttgatatctccatttcatttcatcgaatctggatgttttgttggggtctcaaccttaactggaatgttgccaagtccagaaaaatgttggaagacagtgtcaaaatggaggtaagcttacaagttaaatccccccattaatttttactaaccttgtgttgctttcctcaagtatcatggtatatgaaccccggtaaagtaactaaacatcattgttgttgcatttaacctgaagtttctattgaaggggaaacgagtaaaatgtacatggcaagttttcaagacagcggggagaactgttgttgtcatgagaccagcaaagcattcaagaagtccctctttttaaagtgttatctttagtgtcttctctttctgaaaattgttgctctttgtaaactcatctgtatgccattctcaaatttcagaacacatcatttcatggaagacatatatggttccttgtatactctttggaagtatgcaatccttagcctgctggtcaagagaaaatttttgtactatttttcctaaggcgtacaatggcaaatgctatgcccataaagtctgcccgagaaccggtaggcctcgtactcatccatatccatcagcaggttgaccgctgctttttggaatagcagtcatgccagttttttttggagatcttcttgtaactttcaaacttgagctatccgccaagtattacaaaaccagtgctgcatagtattacaaaacgccttcacc

SEQ ID NO: 4041 - DNA, 622 bp, Zea mays
  misc_feature (601)..(622): n is a, c, g, or t
  Peptide Sequence Number=SeqID_10180
  Probeset Number=SeqID_18444
ttttgtgctaacattttgaccaccaccctatggttctttatgtagacagctgtttccggtgttcctggctttctccttggctgttgaagcattacatgcatttatgcaagatgaatcggagcacaagcatgtgccgtttgtgtctgctgtctccagtcgggtgggtagctgtctctgctgttactagtctttctccactgccttttcatgctgacaccttatcttctaaaaaactgtcttccaggcattatctgattgtttctgctgtcaccaatcttttggttaatttacttggtgtttggttcttccggaactacgctcgtgttaacataggtacgggaagcaacttatatcctgttgcttctggtgcaaatggagattttgtacttgtttccctgcaagggttgtaaattaaacagaattatgattggcagtttacaggaatgcagaggatatgaattaccactcggtctgtttgcatgtgttggcagattcaatacggaggtacatgcattcccaggcattgttggactcttcccttgtgcacattatacttttgtaccttgctggttgccacacgcgatattgatcgactgacgcnnnnnnnnnnnnnnnnnnnnnn

SEQ ID NO: 4042 - DNA, 278 bp, Zea mays
  Peptide Sequence Number=SeqID_10181
  Probeset Number=SeqID_18445
atatcttctgtgaggcagccataaccccagcactttgtcatgcacttccaagcttcatacaggcacaagagaacagaactccaatccttttgtgcctgtatgaagctggcaggcatgacacagtccagcttttggactatcttctgtgaggcagccagcccagattggcaaactgaaaatgcaccagatatattacctatttgcttctacgcgtggactttattacgagtaaagtcagggtctgctaacagatttatagcccaagtaatgaatacaat

SEQ ID NO: 4043 - DNA, 705 bp, Zea mays
  misc_feature (7)..(8): n is a, c, g, or t
  misc_feature (17)..(17): n is a, c, g, or t
  misc_feature (19)..(19): n is a, c, g, or t
  misc_feature (81)..(81): n is a, c, g, or t
  misc_feature (98)..(98): n is a, c, g, or t
  Peptide Sequence Number=SeqID_10182
  Probeset Number=SeqID_18446
aaatggnnttcccgctntntcggaaaaactatatataacagagtccccattgcctcattgatgggtcaacccaataatccncttttcagagttgtatnccgcaggcaacctttgggtagatggagcatagctttaatttagagagaagttaatgtagaaacgctcatatggatgttttaaaatcgagtgaaatagaggcgagtttttagatgtagatcaggtaagatcatcggtagcgaggaaattagggatggatatgggagggttggtacctgctgataggcatgttgagggggttgttgaaatgactttagatgccatccaaggatcgcaaaaaaaattatctgcaaaacgattatttgattggcatgccgcattatttcctacaggaagatcggggatgcaaaagataacggtaggtgcttggagagataacaaaaaagaagatcccatgcaggtagtttcgggagccatgggaaaagaaaaagtacattttcaagcgcccgatgccgatttgttggatggtgaaatgaaaaaatttatagcatggtttaatgaagaacaaacgatgaatggggtattgaaagcggcggtagcgcatctttggtttatcacgatacatccttttgatgatggtaatggtaggatagccagagctataagcgatttacaattatctcgagggggggcccggtaccccattgg

SEQ ID NO: 4044 - DNA, 846 bp, Zea mays
  misc_feature (821)..(829): n is a, c, g, or t
  Peptide Sequence Number=SeqID_10183
  Probeset Number=SeqID_18447
cattgggtacctcgaggccggccgggataccctgatgcttgtaaccgccactgcccctatcacctggttgttgccgatcccagcgcccagatgcaaagccccccggcgcggctcttaccggcggcccggcacggtgctagcctgcgcagctagcgcggcgtgcggcggccagccaaccgacgaccgtggcagcccgcggcgcgacccggccagccgcccctattttcccttgcgtgcggccaaccagcatagcgcgcgcggcagcccagcgtggctcggccatggcggcctgcgcggccctcggcgcccagtgtgagtccggcagccggcgggtgagcagccccgtgacgatcgtccccggaggttcccggcgcccgttcctggcctgtacgcgatcgccgagatcgcgattcgtttccgagcttcgagggatcgaagatcaagagttggcgaccaagtgatctggttcttcgagttctacgaggctgaagatcctgagcatctatttggtgaaggtaaagtagaaggtgtcgaggcggatctccaggagttccaagacatcgacgagttcgaggattaggctagcgacctcccccagtcagctgcctgtggtgggtttatttacgctgcctacgtttctattctgtgcactttgattttactatgtacatgactctagccttccatattattacctaccctttattgctcttccaagccttgcgctatgatgccctcttcctgcaatccccccgtctatgaaatattaccatgacagctccctcccccctcctttttttctttattattgactctcccannnnnnnnntactctctcctcccccc

SEQ ID NO: 4045 - DNA, 520 bp, Zea mays
  misc_feature (419)..(419): n is a, c, g, or t
  misc_feature (458)..(458): n is a, c, g, or t
  misc_feature (492)..(492): n is a, c, g, or t
  Probeset Number=SeqID_18448
aactagtggatcccccgggctgcagggagagagagagagagagagctcactagtccccccccccccccccgctccacgctgttggcgttggtggtgttttctcgtagtcaaatctctgtgcctaggttttggcatgatgattgaggcggtggtggttaccttccctcggatggtgtaattttacaggataagttcctcttgtttcgtctggctctgtcatctttactgattgttgatccaattgggatattgtggcacttccagagctagggcacctgcggttttttgtgaatcaacttgtttctgttgatattttatgattgtttatttaatcttaagttgcgtaggctgtatgtctataatgaataactatgttcagtggcggaggacgccagaaaatctaggtgttgctaacccancgacgaataaaaatttatgacacatgatcacataacatntcaactaatgctttcttcaagattttgatgttgngtccttcacattcttgatgcccaaaaat

SEQ ID NO: 4046 - DNA, 964 bp, Zea mays
  misc_feature (601)..(964): n is a, c, g, or t
  Peptide Sequence Number=SeqID_10184
  Probeset Number=SeqID_18449
aagctggagctccccgcggtggcggccgctctagaactagtggatcccccgggctgcagggagagagagagagagagagctcactagtccccccccccccccccaaaacaccccgtaggtgcccctgagcctttcaaggcacgcagcaggccccggcctggccaacctgtgacaaaagaggcaatttcagctgcaatcacctctataggcaaggaaaaagcccctggcctcagtggctggaccaggggcctgctggaaatcgcgacctcggctcccgacgcctccatcctcagcgccttacgcctactggccgatatgatacgacagggcactgctcccggcgctgaccttctgtgtgccgccaggctggttggcctacagaagcctgatggaggcgtacgccctatagccgtaggggacatcctctaccgcgtcgccctgaaggctctgttggcaactaatttccagcctggaatgctactgccgaaaccagctaggcgtgggaaaatcccaggagggtgcttgaaaactgcccattaacacatgcccccaggaagggggatcctcagggccccgaaacgacctcctgtaaaaaacacannnnnnnnnnnnnnnnnnnnnnnnnnnnnnnnnnnnnnnnnnnnnnnnnnnnnnnnnnnnnnnnnnnnnnnnnnnnnnnnnnnnnnnnnnnnnnnnnnnnnnnnnnnnnnnnnnnnnnnnnnnnnnnnnnnnnnnnnnnnnnnnnnnnnnnnnnnnnnnnnnnnnnnnnnnnnnnnnnnnnnnnnnnnnnnnnnnnnnnnnnnnnnnnnnnnnnnnnnnnnnnnnnnnnnnnnnnnnnnnnnnnnnnnnnnnnnnnnnnnnnnnnnnnnnnnnnnnnnnnnnnnnnnnnnnnnnnnnnnnnnnnnnnnnnnnnnnnnnnnnnnnnnnnnnnnnnnnnnnnnnnnnnnnnnnnnnnnnnnnnnnn

SEQ ID NO: 4047 - DNA, 594 bp, Zea mays
  misc_feature (155)..(155): n is a, c, g, or t
  misc_feature (223)..(223): n is a, c, g, or t
  misc_feature (234)..(234): n is a, c, g, or t
  misc_feature (241)..(241): n is a, c, g, or t
  misc_feature (265)..(265): n is a, c, g, or t
  misc_feature (339)..(339): n is a, c, g, or t
  misc_feature (348)..(348): n is a, c, g, or t
  misc_feature (385)..(385): n is a, c, g, or t
  misc_feature (399)..(399): n is a, c, g, or t
  misc_feature (470)..(470): n is a, c, g, or t
  misc_feature (477)..(477): n is a, c, g, or t
  misc_feature (481)..(481): n is a, c, g, or t
  misc_feature (484)..(484): n is a, c, g, or t
  misc_feature (505)..(505): n is a, c, g, or t
  misc_feature (510)..(510): n is a, c, g, or t
  misc_feature (514)..(514): n is a, c, g, or t
  misc_feature (519)..(519): n is a, c, g, or t
  misc_feature (521)..(521): n is a, c, g, or t
  misc_feature (530)..(530): n is a, c, g, or t
  misc_feature (542)..(543): n is a, c, g, or t
  misc_feature (553)..(553): n is a, c, g, or t
  misc_feature (577)..(577): n is a, c, g, or t
  misc_feature (585)..(585): n is a, c, g, or t
  misc_feature (593)..(593): n is a, c, g, or t
  Peptide Sequence Number=SeqID_10185
  Probeset Number=SeqID_18450
aaaagctggagctccaccgcggtggcgggccgctctagaactagtgggatcccccgggctgcaggggagagagagagagctcactaagttccccccccccccccccccccaggatcccccaggttatcggaacctcggaaagcagtttatcaggncccgttccccgttccccgtcctccatcctcagtcccagggtctccttctagttctgtcgttctctggncaagggatttnccgtgcnaggacgtacggtccccgaggatgnagactcgcaaccctgaccagccttccccggacccacgcgagcgggacaccgaggcagacgacgtctacaagggnggaagcganggcaaggtatactggtggagctttgggtacgttcagnatttcaattttggntttggcctggtttccaaggggagtttggcatcaagccgaatattggctggaaaacggatgatggctggggnctgcaanggcnggnggtggactgtaactaggggcnaaaangggncgagngntttccaagntaacttccaggnnaatggcgcantttggaatggcagaaaacggaaantccaatgnattcccana

SEQ ID NO: 4048 - DNA, 752 bp, Zea mays
  Probeset Number=SeqID_18451
ttttttttttttttttgaataagtacagaaaccatttctattcgaagctttcaaatagctccacaacaaagcacgattctgctgatcgatggcagatttgtattacatatatgctactggtgaatcctgactactcagaagacgctaagggagtaagggttggtgggttggtttgcaacttggaagtaagtgtaatgaaagggattgagtggccaaaatttattactattcaattatgaatattaagtgatttttgaccccacaattacacttagtattaaacgagaccgtaacttaggcgctcatgtacacaatagtcatcaacatatcagcaacaaacggtaagcagcgctagcaggaggcagagaagccgtcgtggttctaggagtaggtgccggcgtcgtagttcaggcactacccaggcggtccctaccccgacccccgccctgttcgccaccgccgcgccccccaccttcgccacgagcccctcacccccgacagcaggcgctccgcccccgccgctggcccggccgtgcccgccgctccgcccgtggaaccgcccgcccaaaccggcggcgcctccggtcttccggccttgcatcggcgccgtctcacaattctcagatccgtctgtcggtttgccactaactaactagcaaatcaagggctagctgcgctctgtgctgtatgctggagctgcaggtgtattttgatctgtgtgctgcagctgtagcttctgaagatgttgtgct

SEQ ID NO: 4049 - DNA, 444 bp, Zea mays
  Peptide Sequence Number=SeqID_10186
  Probeset Number=SeqID_18452
ttctggacaactgatgagaatgagccggtacaggcaatgatgaaagaccagttcgcattctatgtggagcagaaggctctggagatatgggatgaccagaaccgtgaattgattctttcccgtatcaaggtccacttgaatgcactgaaaagatacacctatgggaagcatatcgtggcacgtggtgagaagcttatcgctgcaggagaacggctcattggtgccccatcctgttgctgagatggcaataaagctatatacaggcggcacaatatcacctgtacagacagacagggatagcgaggcctagctgtttaccattaccagtagtcggtcatattgatcgacggagaggttaaaaaaggctctcaaatcctctgatgcaataaaaggatagccgatggaagataaataaaagaatgagataagatgaagagattttgc

SEQ ID NO: 4050 - DNA, 563 bp, Zea mays
  Peptide Sequence Number=SeqID_10187
  Probeset Number=SeqID_18453
ttatgatatttgtacatacataatgtaatgtaatgttgctaggaatcagccaatcaggttcatgacctcatgggctgggaatcagttgttgcttgcttgttcagttttcactttgtgtcttttagtgatgcagtctttgtcttactcttgcttgtgtgcacgatgcacttgcttgttcagttttcatgcacttgcttagttgcttgttcagtttttctttctgcataaatttcatttttttatctgttgatttctgcttttgattccttatttaaactttgcagacaggaaatattggtcatatggagacagttctgcacagcgttttgagtgccagtatgagctatatatatgttgcatttctccatgtttgggctcagcatgtaatagaaccgtaggaaggttgttgcgagacttgtatggcatgcttaaatttctggataaaatctagcatatactaagtctattacatgcttaaatttttgaaaaaatatgtatcgagaattggatggaatgcttaaatttctagataaatgacatgttctatgtttaaatttctggag

SEQ ID NO: 4051 - DNA, 600 bp, Zea mays
  misc_feature (571)..(571): n is a, c, g, or t
  Probeset Number=SeqID_18454
ttttttttttttttttgacaaggaatggtaatcaattttttaaggaagggaatgcatcaattgtttagcacacaacttctattaactaatgcatcatacaaggtgattaagtttttaaaacaacaaggaaaagaataatgcactgaggcttacgcgggataaaactaggttagtgtttgttagacgatgaccacttagcgatcagccttttgttctaacactcgctcagtctgtccatcttcatgttgatccaccagcatcaccatgtggagtatcccaccctttacatcatcttggggtcgactcagctctggtcctctgcattacatgattaactagcgtacctaatgagatgcataatgcacatgaatgaatatgagtataaatagcacaagatagataaagctactcgaagaagattaaacacttatggcaagacatcgcaaatccaataagaaaacactaggtgtcatatcacattaaaaatatagctatggcattcgaacttaaccagatccaatactaacagcacgcaacagtaaaccatgcataagcactttaccctccttanaacatacccgatagacttatagacctcag

SEQ ID NO: 4052 - DNA, 707 bp, Zea mays
  misc_feature (5)..(5): n is a, c, g, or t
  misc_feature (10)..(10): n is a, c, g, or t
  misc_feature (15)..(15): n is a, c, g, or t
  misc_feature (19)..(19): n is a, c, g, or t
  misc_feature (22)..(23): n is a, c, g, or t
  misc_feature (25)..(25): n is a, c, g, or t
  misc_feature (49)..(49): n is a, c, g, or t
  misc_feature (51)..(51): n is a, c, g, or t
  misc_feature (176)..(176): n is a, c, g, or t
  misc_feature (680)..(680): n is a, c, g, or t
  misc_feature (688)..(688): n is a, c, g, or t
  misc_feature (691)..(697): n is a, c, g, or t
  misc_feature (700)..(700): n is a, c, g, or t
  misc_feature (702)..(704): n is a, c, g, or t
  misc_feature (707)..(707): n is a, c, g, or t
  Peptide Sequence Number=SeqID_10188
  Probeset Number=SeqID_18455
caccntaaancggangttnaanncnaaattcctttcggcttcaaattantnttcaacccagttccgaccagaaccggctctatcgtggcggtgtcatggcgatcaccgtggcgagtgtcgtggtaatgtcgtcgtgatgagtatcgtgatggtcatcacgatctactcgcacaacngcatggtcatcaacaagacgccgactagcccgagagcgatgaatactgcccgggattgcgaaatagagggacttgaaaagccacgacaggagccccgcggtcccggccgcgcccagcggcgctgacgagaacaggcccgccgcagcacagcaccgcgagcatgcgggcaattgcacctatggtgcgttcgttcatggtgccacgcctctccgggccggtccactcctgtggccgttcagaaacaaagtgcaccctgtagtacctacacgttcaagaggcttgcgttcacgatcgcaggagccatctccggaacgtcacgcgcgtctgcctgccgggaatagatcgccttcaaaacgctgaagagacgcgcgccgaagtgcccgaactaccttgcccaacgtatcggcgcgcgcgcatcgaacaacgcgtcgatgatgggacacttgggtattttcccgcccccgcactgagaagccatcgtctcgagggggggcccggtacccnattggttnaannnnnnnctntnnnctn

SEQ ID NO: 4053 - DNA, 442 bp, Zea mays
  misc_feature (59)..(59): n is a, c, g, or t
  Probeset Number=SeqID_18456
ctgcaggtaccggttcgtatttctgttatacccacgcggctaacactccggctggaggncagggcactgggctgtctagctctagatcctccgggcagccgcccgcgatcttggacgtatccatctggaaagtcacttttccaactccaagctgaacggatcttgtgcgttcacatgctggctgctcaatccagtgaaagcccgagtaacactgtgctgatccactggtatataacgacaagccccttcacggatgcttccactcgcaaattcttccaaacccgcagatactttggcctagaccctgaccaagtgacattcttccaacaaggcacacttccatgcccctctgccgatggtaggtcgatggtagatctattatggagacaccgtattgggtagcgaaggcttctgacggcaacggtggagtttatgctgcgct

SEQ ID NO: 4054 - DNA, 400 bp, Zea mays
  misc_feature (393)..(393): n is a, c, g, or t
  misc_feature (397)..(397): n is a, c, g, or t
  Peptide Sequence Number=SeqID_10189
  Probeset Number=SeqID_18457
ttttttttttttttttaaggacagagacacattcctctgcttctttcttttcgtcacacccaatttttacaggcttcaccgctctctttttcatcttttttcccccattcacatgacaagcatcatcatcaagagccgtgaacgcgaacgagcgcggaaacgtgtcagaagagaagggacgacgggcaggagaggaggggtgaggggcggggacgagggacgcccgcgggccgccggcgtggcggggcagaaggcggcggggcgggcggcccaagcttccttgagttaattacatgatttgtttgaaggagaagtaacgactacgactcgcttagctcggtttcgatttctgagcggcgccggcgggcggcccgcagaaggcttcccggttgncggnggc

SEQ ID NO: 4055 - DNA, 652 bp, Zea mays
  misc_feature (44)..(45): n is a, c, g, or t
  misc_feature (73)..(74): n is a, c, g, or t
  misc_feature (97)..(97): n is a, c, g, or t
  misc_feature (100)..(101): n is a, c, g, or t
  misc_feature (124)..(124): n is a, c, g, or t
  misc_feature (146)..(146): n is a, c, g, or t
  misc_feature (172)..(173): n is a, c, g, or t
  misc_feature (205)..(205): n is a, c, g, or t
  misc_feature (207)..(208): n is a, c, g, or t
  misc_feature (226)..(226): n is a, c, g, or t
  misc_feature (243)..(243): n is a, c, g, or t
  misc_feature (252)..(253): n is a, c, g, or t
  misc_feature (269)..(269): n is a, c, g, or t
  misc_feature (280)..(280): n is a, c, g, or t
  misc_feature (289)..(289): n is a, c, g, or t
  misc_feature (322)..(322): n is a, c, g, or t
  misc_feature (324)..(325): n is a, c, g, or t
  misc_feature (335)..(336): n is a, c, g, or t
  misc_feature (419)..(420): n is a, c, g, or t
  misc_feature (475)..(476): n is a, c, g, or t
  misc_feature (525)..(526): n is a, c, g, or t
  misc_feature (558)..(558): n is a, c, g, or t
  misc_feature (573)..(574): n is a, c, g, or t
  misc_feature (580)..(580): n is a, c, g, or t
  misc_feature (604)..(604): n is a, c, g, or t
  Probeset Number=SeqID_18458
gtgtcaagtgaacctgcaaacctggcggtgtcactttggctggnntagcctgagtgtgtgagggggagtgatnncgagccctagctgagcgctccgnatnncctcgcttaggctagggataccnccgccatacccacacaagtctnttcttcaacaagggtttagggaggtnngacatgccaacatagtagaatacgcgatggcncnntctgctcactctgtggcngtggagaggtcctcctncttcctttnncccaaaggaaagtccngcgaatggggnggcgccacncccaggccatgagccgcctgccgcgccccaggncnncgcccacccnngtctccatttggtcgtcgtccgcgcccttcccgcctaacgcctcgatgagaactcgtgaagaacccgcgaaaacgaaatcgcnngtcgcccggggcccggggcattccctgggggatggacgaagagtcgaacgcgacnngtgcgggaagcggctttggcgtccattcggggctggagaacacgggagnngccaaccgcggcaggcgtacccggcacgctgngctggtcaaacggcnngccggngcctttgggcccagtaccattctntccggcgcccatcccttctttcgagggagaacgcctgttacccagttc

SEQ ID NO: 4056 - DNA, 757 bp, Zea mays
  misc_feature (601)..(757): n is a, c, g, or t
  Peptide Sequence Number=SeqID_10190
  Probeset Number=SeqID_18459
gcgttcgcccacgcgtccggtatctcctgcgccgggtgggctgatcagtgatcacccgattagctgtagctgcgaactttatgtacgcgtgggtttcagtttgctttgcacatgccctttatggctttatcgttcaaactcaactacgagagaacgttaccaggatctggccttcgacatgctggggggggggcatcacccactgatcatacagcttggagagcactttgggatcgaccttgcactcgctgtcaccagcagtggcattgtcatccaaggtgacgttctgcccgaacgtcctagccttcttctctactctcttcttgaccttctcttccacagccttgaatgtcagcatatccatcagagaaatgctgtccttttcttttattagtcgactataatcttgaggagcgtctttgaacttcacctcagccacatatttacccatatgaattctttgtgatagaacctgcagacacgctaaatccagtgccactggttgggcatagctgccatcatccccatccacagtgaataacgggagccattcatccaaaaacattttcccgcatgcatcaatcccggtggccaattaaannnnnnnnnnnnnnnnnnnnnnnnnnnnnnnnnnnnnnnnnnnnnnnnnnnnnnnnnnnnnnnnnnnnnnnnnnnnnnnnnnnnnnnnnnnnnnnnnnnnnnnnnnnnnnnnnnnnnnnnnnnnnnnnnnnnnnnnnnnnnnnnnnnnnnnnnnnnn

SEQ ID NO: 4057 - DNA, 762 bp, Zea mays
  misc_feature (150)..(150): n is a, c, g, or t
  misc_feature (231)..(231): n is a, c, g, or t
  misc_feature (243)..(243): n is a, c, g, or t
  misc_feature (250)..(251): n is a, c, g, or t
  misc_feature (253)..(253): n is a, c, g, or t
  misc_feature (262)..(264): n is a, c, g, or t
  misc_feature (270)..(270): n is a, c, g, or t
  misc_feature (276)..(276): n is a, c, g, or t
  misc_feature (281)..(281): n is a, c, g, or t
  misc_feature (284)..(284): n is a, c, g, or t
  misc_feature (286)..(286): n is a, c, g, or t
  misc_feature (292)..(292): n is a, c, g, or t
  misc_feature (296)..(296): n is a, c, g, or t
  misc_feature (305)..(305): n is a, c, g, or t
  misc_feature (308)..(309): n is a, c, g, or t
  misc_feature (312)..(313): n is a, c, g, or t
  misc_feature (319)..(319): n is a, c, g, or t
  misc_feature (334)..(335): n is a, c, g, or t
  misc_feature (341)..(341): n is a, c, g, or t
  misc_feature (343)..(345): n is a, c, g, or t
  misc_feature (347)..(347): n is a, c, g, or t
  misc_feature (352)..(352): n is a, c, g, or t
  misc_feature (357)..(357): n is a, c, g, or t
  misc_feature (364)..(366): n is a, c, g, or t
  misc_feature (372)..(372): n is a, c, g, or t
  misc_feature (374)..(374): n is a, c, g, or t
  misc_feature (379)..(381): n is a, c, g, or t
  misc_feature (387)..(387): n is a, c, g, or t
  misc_feature (389)..(389): n is a, c, g, or t
  misc_feature (396)..(396): n is a, c, g, or t
  misc_feature (400)..(400): n is a, c, g, or t
  misc_feature (404)..(404): n is a, c, g, or t
  misc_feature (418)..(420): n is a, c, g, or t
  misc_feature (422)..(422): n is a, c, g, or t
  misc_feature (427)..(428): n is a, c, g, or t
  misc_feature (430)..(430): n is a, c, g, or t
  misc_feature (432)..(434): n is a, c, g, or t
  misc_feature (441)..(443): n is a, c, g, or t
  misc_feature (447)..(449): n is a, c, g, or t
  misc_feature (456)..(456): n is a, c, g, or t
  misc_feature (459)..(459): n is a, c, g, or t
  misc_feature (468)..(471): n is a, c, g, or t
  misc_feature (473)..(473): n is a, c, g, or t
  misc_feature (475)..(475): n is a, c, g, or t
  misc_feature (477)..(477): n is a, c, g, or t
  misc_feature (480)..(480): n is a, c, g, or t
  misc_feature (486)..(486): n is a, c, g, or t
  misc_feature (489)..(489): n is a, c, g, or t
  misc_feature (494)..(494): n is a, c, g, or t
  misc_feature (497)..(498): n is a, c, g, or t
  misc_feature (502)..(503): n is a, c, g, or t
  misc_feature (507)..(507): n is a, c, g, or t
  misc_feature (511)..(511): n is a, c, g, or t
  misc_feature (516)..(516): n is a, c, g, or t
  misc_feature (518)..(518): n is a, c, g, or t
  misc_feature (522)..(523): n is a, c, g, or t
  misc_feature (527)..(528): n is a, c, g, or t
  misc_feature (531)..(531): n is a, c, g, or t
  misc_feature (534)..(534): n is a, c, g, or t
  misc_feature (540)..(540): n is a, c, g, or t
  misc_feature (545)..(545): n is a, c, g, or t
  misc_feature (547)..(547): n is a, c, g, or t
  misc_feature (549)..(549): n is a, c, g, or t
  misc_feature (551)..(552): n is a, c, g, or t
  misc_feature (554)..(554): n is a, c, g, or t
  misc_feature (559)..(559): n is a, c, g, or t
  misc_feature (561)..(561): n is a, c, g, or t
  misc_feature (567)..(569): n is a, c, g, or t
  misc_feature (571)..(571): n is a, c, g, or t
  misc_feature (575)..(575): n is a, c, g, or t
  misc_feature (578)..(580): n is a, c, g, or t
  misc_feature (584)..(586): n is a, c, g, or t
  misc_feature (595)..(596): n is a, c, g, or t
  misc_feature (600)..(600): n is a, c, g, or t
  misc_feature (602)..(602): n is a, c, g, or t
  misc_feature (604)..(604): n is a, c, g, or t
  misc_feature (606)..(606): n is a, c, g, or t
  misc_feature (608)..(609): n is a, c, g, or t
  misc_feature (614)..(614): n is a, c, g, or t
  misc_feature (622)..(623): n is a, c, g, or t
  misc_feature (625)..(625): n is a, c, g, or t
  misc_feature (627)..(627): n is a, c, g, or t
  misc_feature (634)..(635): n is a, c, g, or t
  misc_feature (638)..(640): n is a, c, g, or t
  misc_feature (642)..(643): n is a, c, g, or t
  misc_feature (660)..(661): n is a, c, g, or t
  misc_feature (664)..(666): n is a, c, g, or t
  misc_feature (669)..(671): n is a, c, g, or t
  misc_feature (673)..(674): n is a, c, g, or t
  misc_feature (677)..(680): n is a, c, g, or t
  misc_feature (684)..(684): n is a, c, g, or t
  misc_feature (687)..(688): n is a, c, g, or t
  misc_feature (691)..(691): n is a, c, g, or t
  misc_feature (694)..(694): n is a, c, g, or t
  misc_feature (700)..(700): n is a, c, g, or t
  misc_feature (702)..(702): n is a, c, g, or t
  misc_feature (704)..(706): n is a, c, g, or t
  misc_feature (709)..(709): n is a, c, g, or t
  misc_feature (718)..(718): n is a, c, g, or t
  misc_feature (722)..(722): n is a, c, g, or t
  misc_feature (724)..(727): n is a, c, g, or t
  misc_feature (732)..(732): n is a, c, g, or t
  misc_feature (736)..(736): n is a, c, g, or t
  misc_feature (738)..(738): n is a, c, g, or t
  misc_feature (751)..(753): n is a, c, g, or t
  misc_feature (756)..(757): n is a, c, g, or t
  Peptide Sequence Number=SeqID_10191
  Probeset Number=SeqID_18460
tcgaacacactctgagtcttgaaggtcaacaacgtctagaataatggcatcatgtctgtgtgcttcttctgccatcgctgccattccttctccaagtttcttgggtggtaagaaactgaggctgaagaacaagttgactgttccagctgngtccagtccagatgcgttcgcgcgcgccgtcgcagctgatccatatagaccaatctggctcctcgggaagcactccttcanagtggctagacngcagccnncntggagactnnngattgnagcctnttganctntnatctgncccnggtcatgtntannatnnaccgtncaagcctacataccnnactgcngnnngnctatntaggngccgtcnnnatcccntnccacnnntcctancngaatatngtanttcncccccatcggccannntncaccnntngnnncgctcgnnntctnnntctcgtnaanaaccgcccnnnncncncncgncctcanctngactngtnngacnnaaangccngtganangggnnccgnnctnttncgcccngcccncncncnncnttccncntctttnnnanaccngtnnnatcnnnttggattgnntccntncnangnntatgngctctgcnncngncccggcnngannntnntccgcttgccccgcctnnctnnnttnnncnnatnnnncctngannctnacncatcgnantnnncgnggcggcccntgancnnnnaccgntggncnacgcgctccgggnnnccnntctgt

SEQ ID NO: 4058 - DNA, 548 bp, Zea mays
  Peptide Sequence Number=SeqID_10192
  Probeset Number=SeqID_18461
cccccccgtcaaaaaaattgtcttgctgggaccaaaaaaccccccaaaacctggtcctgtggttccagttcccccttggttggcccccgtgcccccccttgggctaaggggaatttcaattaccctgcccaagccctcattatatttccaccctgtattgctggctttttcacccccgctgacaaaccctttttagggaacgcccgccaaaaccccatcgggaagcttgccaagtcccctttatgcaaaaatgtagcttaacctggaaaggttctctggttcccccgccggtttatagggtgttttttcccccaaaatcagtggccccatttcttttcgtggccaagtaatttttgggtgtttggctattcaaaccaaaggtttttctgtaataacttgcccaactgatggccccccctattgtaccccgtttcccccgaatttgaatcaaaataaaaggtggttctatatgttcgtagaaaaaaaaaaaaaaaaaaaaaaaaaaaaaaaaaaaaaaaaaaaaaaaaaaaaaaaaaaaaacacaaaaa

SEQ ID NO: 4059 - DNA, 535 bp, Zea mays
  misc_feature (500)..(500): n is a, c, g, or t
  misc_feature (525)..(525): n is a, c, g, or t
  misc_feature (527)..(527): n is a, c, g, or t
  Peptide Sequence Number=SeqID_10193
  Probeset Number=SeqID_18462
agagagagagctcactagtccccccccccccccccctgcgtcaaatagactttcaaggtcatataggtccattaataactatttaaagtgcatcatctagacgcagtgtgggttcgatcctccgtgtctctctttggattttattttaggttgcctctcaggttgtagctggatctaggtatagggtacacacgtgtgcacgttctgcgtgtttcctacgcattaaaagtctaggtctccaaattccgttcctagtgtgtaatgggcgtgcacgcatgtgtacttgtggtgtgcagggattacattctcgttttatgatttctaaaaaccgttttgttgaccaaagtttgacttttatattttcaaattcgaaaccggaatacatcaaatcctgcatcggttttttgtttctcggtccatatcgagaacgagaaaatccatcgaattttgttgtttctcgatagtgaaggtgatccctagcggtatgtagtggtgtgcgnttcatggcgctcttgtaccatctananaaaaggcc

SEQ ID NO: 4060 - DNA, 945 bp, Zea mays
  misc_feature (1)..(19): n is a, c, g, or t
  misc_feature (945)..(945): n is a, c, g, or t
  Probeset Number=SeqID_18463
nnnnnnnnnnnnnnnnnnngcacgctgcacgctgcacgccgccgcgccgcacttctccccatccggcgccttctctatcctcgccgctgaagacgtcgtgccgtgcgtagctagcagtgctgacgcgcgctcgtcgaataaggattggatttggcttttcgtccccccaccgcctcctccggtccttcccctgccactccctattctcctcgtccgaagcggcaagctcaagctcaggagctcgcaaccgaggagtaccaatttctctagggatttggcgtatccaccagggagcaggaatagggtgaggcttcctgatggcgggggcgaaagcggatgtagacgcggaaacaggagacggcggctccttcagcgagcagaggctgattgataagctcaaaaggctcaacaactcagccgctagcatccagactctttcgcgttggtgcatttttcaccgcaagaaggccaaaagggttgtagacacatgggaaaaacagtttactagtgcaagggaggataagaaaatatcattcctatatctatcaaatgatatcctgcaaaacagtaaacgcaagggagcagactatgtggatgagttctggagggttctacctagatccctgaagcatgtctatgaaaaaggaggaggagaagggaagaatcaggtggcgagattgatatcaatctgggatgaccgtaaagtttttgggacccgtattgaaagtatgaaaaatggcattcttggtgacaaccctcctatattggataacaatgggaaatagtttaaatcctagctctaatcccacttcaaattctaaagctgcacggaagggattctggtacaatagtaaaaaaactcactgctggcgggatgccatgcaaagatcgtgtctgcataccaattagtgcttgatcagcattttgatgaagacactgctttan

SEQ ID NO: 4061 - DNA, 675 bp, Zea mays
  misc_feature (110)..(110): n is a, c, g, or t
  misc_feature (601)..(675): n is a, c, g, or t
  Peptide Sequence Number=SeqID_10194
  Probeset Number=SeqID_18464
cccagtcacgaaatccctgagcgctttcttgtcgagggtaacagacagcgccttgttcttcagggaccgcttattgatatgctttggcaccataaccgtcggcatctgcnccaccacgacgtcctcaccatcatcgccgatatcttcgttttctaatccagcaccatcatttttatccgatgtcagtactctaccatacagagcaatctccttctcttctttcctcctcttgcggtcttgtattttcttcttcctctccttctcctgcaaaatcttctgggccgcctttcttctctttttcttcctgcttgtggaacccagtcgcgaaagcccagagcgcatacttgtcgagggtaacagacagcgccttgttcttcagggaccgcttattgatatgctttggcaccatcaccgtcggcatgtgccccgccacgacgtcctcctcggactccgaagccgccatgtcctccccgtaatcctcctcttctgccgccgcctcctggcgcgccaagcctgcggagatcaagcgctctctctccctctctctggatctctctatctccgaaggcagagcgcgccgacgctatgcaggggatcaggnnnnnnnnnnnnnnnnnnnnnnnnnnnnnnnnnnnnnnnnnnnnnnnnnnnnnnnnnnnnnnnnnnnnnnnnnnn

SEQ ID NO: 4062 - DNA, 405 bp, Zea mays
  Peptide Sequence Number=SeqID_10195
  Probeset Number=SeqID_18465
gggggggattccccccagacccccagggttttgtttttcgccgccaaccagatgaagaatggtcgcccccttggagcttccaatatccaaaaggagagccccccccccctggtgctcggtcttcgcggtggttattaaccccccagtcgttaacgccgctcctgtatctgggttatcaagggtctccgccattgcccatggagggggctgtctttcaaagaatttgtatggtttgtgtcgtaagtcgtcactaacctggtttcatggcccagttgtgttctggttacccaaaactatggtgcgcccgcatatggtttaatcatgaataaatgttgtttgattttaccccccaaaaaaaaaaaaacccaccccaaaaaaaaaaacaaaaaaaaatataatataaag

SEQ ID NO: 4063 - DNA, 601 bp, Zea mays
  Probeset Number=SeqID_18466
aaagctggagctccccgcggtggcggccgctctagaactagtggatcccccgggctgcaggcccccccccccccccaaatatgtttagtttggtgcttcggtaatttctggatccgcgccacttgtggcctcactcgtatcgtaggccaacaccattgtatccacaccagtgtatccattacagacacactaggtgtagcatctaaaaaattcaaatctttaaaaatttctcaaactcgctctaaatttaaaatgaattttaaatttcgtttcaaaatgtttgtttgcgagttgatatcaacaataaaatatagtggtctatattatctccaaaatcctccttaaatatcctacaaatatttttccagtgatcccctctgattctttacagaaatactgaccaaatattcccccgatgattctccaaatattttcctcctaaaaaataccttcagaatcatttttaaagtccctacaaatattttctccataatcttcctcatgctcatacgtatacgtatgcctccggtgtcatacagtgagctctacaagctaattacagttatacaagacaaatccatgcttatctcccactaatcct

SEQ ID NO: 4064 - DNA, 657 bp, Zea mays
  misc_feature (599)..(599): n is a, c, g, or t
  misc_feature (610)..(610): n is a, c, g, or t
  misc_feature (614)..(614): n is a, c, g, or t
  misc_feature (617)..(617): n is a, c, g, or t
  misc_feature (621)..(622): n is a, c, g, or t
  misc_feature (624)..(624): n is a, c, g, or t
  misc_feature (630)..(633): n is a, c, g, or t
  misc_feature (637)..(637): n is a, c, g, or t
  misc_feature (639)..(640): n is a, c, g, or t
  misc_feature (649)..(649): n is a, c, g, or t
  misc_feature (652)..(652): n is a, c, g, or t
  Peptide Sequence Number=SeqID_10196
  Probeset Number=SeqID_18467
attgcgggcgcgccccccggcggcccccgcccccgcaccagtgggtcccccgcgctgcgcgttttcggcccgacgcgtccccgctactccccccccccccccgcctgcactcttcttcttccctgtcgccgcatcaaagagaactgaagcaataggcttttgaagctctctgcataaacatgactttcaagcgcaggaatggtggcaggaacaagcataaccgtggtcatgtgaaaccaatcaggtgttccaactgtggaaagtgttgccccaaggacaaggccgattaagagatttatcgtaaaggaacattgttgagcagggctgctattagtagatgttcaagaagctagcgtgctacgaaggttacacgtctcccaaagctttacgctaagacgcagtactgtgtctcgtgtgctatccactctcacgttgtgagcgcccgatcccgcaccaaccgtagagttcgtaccccaccacctcgttttgccagacgcaaggaggatacacccaagcctgcacaacctggtcaggctcctcgccctgccggccccgctcctgctccccctcgtgcctggaggccctcaccaccctgccanccccccccctntctnctntttnnanaaaaannnngtgntnnttccctctntanatttc

SEQ ID NO: 4065 - DNA, 488 bp, Zea mays
  Peptide Sequence Number=SeqID_10197
  Probeset Number=SeqID_18468
cccacgcgtgcggttctagtatcagcagcagccgctcttctagatgcaaccttactacctcctccttcctacgacataatatcttctattatagcgcctactaacaatacattactcgccgttgtacaacaacgtgactactaaaaccatgctgtcaccacacaaattaatcttgtagcacatcatccttttttcagctggtgtaataataaagaagacgccaccaatcatccttcttaacaacagctcagcatgaatggtgaataatacgacccctgctgtagcgcatcattcaccgcggctgttgtggttactaccagcatgaccactactatagtcagcagcgtactacccgctgcttctgctgctttccctcccttcttcgtcacgacggtcggctgttctccccaagctgtaatacagcggctgctttcatgatggctactaagtgctgcactgcagctccaccaccacaaactagatgaggg

SEQ ID NO: 4066 - DNA, 405 bp, Zea mays
  misc_feature (12)..(12): n is a, c, g, or t
  misc_feature (213)..(213): n is a, c, g, or t
  Probeset Number=SeqID_18469
gggaggagcggngggggaggcaggaatccccccgcccgcgcctccatcgccctgccggcgacggcccacatgccgaccgcctacagcctccgcgcgccgccctccgcctcgcagcagcgcctcaggctgcccctaccgccgcccccgccgccgctgccgttttgcccgggtggaggggccgcccgccggaggaggggtgtcggggtggcgtcntgcgcgcgtccgcgtcgcccttcgtcgtgctgcacgcgcgggggtggcccggtcctggaccctccctgccgtcctgctctgaagtgagccagccaccgtcgcctacctcggggacatcgcccgaacgaccagagcctcttttccccaaaaatgaatagcagttggtggggattatcggatgctactgcatga

SEQ ID NO: 4067 - DNA, 918 bp, Zea mays
  Peptide Sequence Number=SeqID_10198
  Probeset Number=SeqID_18470
ggccggccgggcccgggaagatagaaccacattccataaacccaacttaggctgtctctttcatctcgacaacgccacaggtgaccggaaaaccacgtccggcggtcctgcttctctacccggctggaattgctgaccggatcaacccgagacctggcatgattatcgatctgattgcgctatgatccgcttcatcctgctggacaaccgtgaggccaacactcgactgcccaagtattacgtcccgctcgaggactcgcaaaagcacaaggttgaatacgaggtacaccggctcgtggccaatcgggaccctaagttcaccaacttcgtcgagtttcgcacacaccaaagttatctacagcgagatatgctggactgcttttttctactatcgtgtggacataactgataatgaattcgcatccttggaatcgcattcccttgcttgtcgagatattggaccatttctttagcaatgcttgtgagctcgatttagtgtttaattttcccaaggtttacctgatactagatgaatttattcttgctgcggagctgccagaaccaagcaaaaaggccataattgagcgaatggctgaactggagaagctggaatgaccaacaccaggaagatgctgccgcgtgtgttgtattccaatttgtatgattcgtttcaggtgctttacatttgctgctcctggttcgctccggctgacagcgtgatgccccatgctgtccctcgaaagaatgctagtagtagctagccatgagtttggtgcccagttacattataaacgtaccctccaaaacataataatttccccgcagcaaaaaaaaaaaaaaaaggcccctaggggcaagaggggggggggggggggggaaacccagggggggggggggggggggggggggggggaggaa

SEQ ID NO: 4068 - DNA, 439 bp, Zea mays
  Peptide Sequence Number=SeqID_10199
  Probeset Number=SeqID_18471
cctatggcacaacatggtaccccccgtacgtgggcatcggaattcgttatcgagctttatttacaaggagcttgctttgccctggtttctcactatcttgaacgggcgtataagcccattgatgtagggggagggcaacttgtcatataaactctttgagggaggttctggatgatgttctaatctacaaatgtgttagaagatggccggatcctgcgtgactggcaggatttaccatttaaaaactatgcccccggagaatgagggagaattctatccgacttattacacgttctgatgccacatttgagaagagccagaactgaccacctaccaccctcttaagttagttaagcgaacacaagttgaattcatgctcccatgtggtttgttaccaagatctgttgtatatacatatgacttatcaatgattttcatg

SEQ ID NO: 4069 - DNA, 952 bp, Zea mays
  misc_feature (1)..(299): n is a, c, g, or t
  misc_feature (900)..(952): n is a, c, g, or t
  Probeset Number=SeqID_18472
nnnnnnnnnnnnnnnnnnnnnnnnnnnnnnnnnnnnnnnnnnnnnnnnnnnnnnnnnnnnnnnnnnnnnnnnnnnnnnnnnnnnnnnnnnnnnnnnnnnnnnnnnnnnnnnnnnnnnnnnnnnnnnnnnnnnnnnnnnnnnnnnnnnnnnnnnnnnnnnnnnnnnnnnnnnnnnnnnnnnnnnnnnnnnnnnnnnnnnnnnnnnnnnnnnnnnnnnnnnnnnnnnnnnnnnnnnnnnnnnnnnnnnnnnnnnnnnnnnnnnnnnnnnnnnnnnnnnnnnnnnnnnnnnnnnnnnnnnnncgagctctatgacaagctacgcggacatgaacctggctggcgtgaggatccaaaagatgatcctgtgttcaaagatgctgtgcaccatgctgtgaaatcgatacaagagaggtccaactcccggtatccctatgaacttctcgagatccttcgcgcccatgcacagggtgtgtgcagactttgcaagatttgacattctgatgacactgaagagaggcagcagggaagataagatcaaagctgtggcccataagagtctggaaggggtctttgtgctaaaccagcatcagccggccgagcatgatgagttcagcacctcagtgaactgacgaaactgtgtgagctgtagtatcgtacttcgtggtactactagtcatgagaggacgacccatccgcttttatctggatgtcatgtctggtcgacgcgtcgttgctggcttggcgttccgaaggcagcaggcatactggtgctggaagacggtacctgctgtcgcacttgccgttataataggcattggaacttgtcgatttcgggagctgatctgtttgtaccgtattgtttatttataatatgatggatcgtatgttgataaaaaaaaannnnnnnnnnnnnnnnnnnnnnnnnnnnnnnnnnnnnnnnnnnnnnnnnnnnn

SEQ ID NO: 4070 - DNA, 626 bp, Zea mays
  Peptide Sequence Number=SeqID_10200
  Probeset Number=SeqID_18473
tggttgcagttttttaggccccaagctttacatggactaagcctccatttgtttttgcacctcgagtttttgatccagcagttagcattacatccatccgttggttaaaaaaaggcttgccgggtttttttttggcatattatattagttgatggggccccccctttagttttactcaaaaatttattatttacgcgtcggccttggaaaaaaatccacccgtgcagtttttaaaaagcgtttactccatccaaccaacttacttaattttcaacttaaaagttggcatgtaaaaaaattttgaggaatacgtccccttttttttttcctggcggttaccttaagcccccaagggcgaaatcaaccctttgatgttggtaaaggttccaccagttgttgttttgttaaaaggtttttttatgtcttcgctagcgccttcctggaacctaatctcgttcctgtaagatagttctcgcctctgtaagatcagctaatgcatgcgcaaagctagaaatggtccgcctcctccgtcacgcggaattggttaaaaaaaaaaaaaaaaaaaaaaaaaaaaaaaaaaaaaaaaaaaaaaaaaataaaaataaaatataaatgggggcgctcgt

SEQ ID NO: 4071 - DNA, 1549 bp, Zea mays
  Probeset Number=SeqID_18474
ggctacccgggcccccccccgtggcagctccctaggcccccccccctgagagattggtaggcacagaacatgagggatatgatccttttcttggtggaattcaaaaatatgccactcccatgatgcccctagatgaagaaattctttctaaggttgcacaagatatggttgaggaatggtttgattgtgttgatgaggaggattcctttgaggaagtttctttaagtgcagcacttaatggtgttgagggtttggactatatggaaagaattcctcttgccacatctgagggttttcctcatgtgctttcacgcaaaaatggtgaaaaaggcaaaaggagatttgtttctggggatggtgaagagatgacattgattccgggaaccagtgttgaagaggcttacaacaagctaatagttgaacttgagaaaagtgttcctacattggttggcattgaatgtcccaaggatgagaaacttcctcgtcgcaaaatttttgataaacctaagacgcgctgcttcactattctccctatggagtttaatcttgtggtccgtcagaagtttttaaattttgtgaggttcattatgaagaaagggcacaagcttagtggtcaagttggaatcaacccatactccatggaatggactgggttggccaatagattactgaagtaaggcccacgatattctgtgttgcgattatgctagttttgatggtttgattaccaaacaagttatgagcaagatggcagaaatgataaacagtctttgtggtggtgatgaaaaattgatgcgtgaaaggacacacctgctgttggcttgttgttcaaggatggcaatttgtaagaaagatgttggcagagttgaatgtggaatcccttctggatttccgctcacagttatttgcaatagcatttttaatgagatgctcattagatatagctatgaaaaattactgcgcccaggctgaaagctccgcgtgcgttgtgcacgtgccctcccccatctcctggtttcgcctgggcggcccaccggtgctgacccgcctcacttctccgcgtcgttcctttttgcccaacgcgctttactttcagttggcccctaatagttgaacaagcttttcctaagcacggtttcttatctatccactccattcacctcgacaggctcatttgcacccaactactttagttcggaaaacatcttcgcaaatttttaataataatgccacttccatcaattcgcggattgtcttcctttaacacaccaaacctctttcgaccctccatgcccctaaatcgccttcttgcggccttgcgactctcctgaagggaactagggcatatgattcccctggtctcctcaaccttcccttctattgtcttccacggctacactatccccgcaaattggcaataacaccttaacctttgctcaatcctccgtaaatgggtgttactcaaaaatttccatatttgcctcacgctccaaaggttatcctctcccaaactcgtacaatgaaacgctctctcctcccacattaacgg

SEQ ID NO: 4072 - DNA, 823 bp, Zea mays
  misc_feature (236)..(236): n is a, c, g, or t
  misc_feature (239)..(239): n is a, c, g, or t
  misc_feature (243)..(243): n is a, c, g, or t
  misc_feature (259)..(259): n is a, c, g, or t
  misc_feature (261)..(261): n is a, c, g, or t
  misc_feature (268)..(268): n is a, c, g, or t
  misc_feature (279)..(279): n is a, c, g, or t
  misc_feature (287)..(287): n is a, c, g, or t
  misc_feature (297)..(297): n is a, c, g, or t
  misc_feature (301)..(301): n is a, c, g, or t
  misc_feature (322)..(322): n is a, c, g, or t
  misc_feature (329)..(329): n is a, c, g, or t
  misc_feature (335)..(337): n is a, c, g, or t
  misc_feature (342)..(342): n is a, c, g, or t
  misc_feature (345)..(346): n is a, c, g, or t
  misc_feature (351)..(351): n is a, c, g, or t
  misc_feature (361)..(361): n is a, c, g, or t
  misc_feature (375)..(375): n is a, c, g, or t
  misc_feature (383)..(383): n is a, c, g, or t
  misc_feature (390)..(390): n is a, c, g, or t
  misc_feature (392)..(392): n is a, c, g, or t
  misc_feature (396)..(396): n is a, c, g, or t
  misc_feature (399)..(399): n is a, c, g, or t
  misc_feature (408)..(408): n is a, c, g, or t
  misc_feature (410)..(411): n is a, c, g, or t
  misc_feature (418)..(418): n is a, c, g, or t
  misc_feature (420)..(420): n is a, c, g, or t
  misc_feature (428)..(428): n is a, c, g, or t
  misc_feature (430)..(430): n is a, c, g, or t
  misc_feature (433)..(433): n is a, c, g, or t
  misc_feature (435)..(436): n is a, c, g, or t
  misc_feature (438)..(442): n is a, c, g, or t
  misc_feature (445)..(445): n is a, c, g, or t
  misc_feature (448)..(448): n is a, c, g, or t
  misc_feature (452)..(453): n is a, c, g, or t
  misc_feature (459)..(459): n is a, c, g, or t
  misc_feature (462)..(462): n is a, c, g, or t
  misc_feature (465)..(466): n is a, c, g, or t
  misc_feature (476)..(476): n is a, c, g, or t
  misc_feature (479)..(479): n is a, c, g, or t
  misc_feature (492)..(492): n is a, c, g, or t
  misc_feature (501)..(501): n is a, c, g, or t
  misc_feature (504)..(504): n is a, c, g, or t
  misc_feature (506)..(506): n is a, c, g, or t
  misc_feature (509)..(509): n is a, c, g, or t
  misc_feature (517)..(517): n is a, c, g, or t
  misc_feature (520)..(521): n is a, c, g, or t
  misc_feature (523)..(523): n is a, c, g, or t
  misc_feature (525)..(525): n is a, c, g, or t
  misc_feature (529)..(530): n is a, c, g, or t
  misc_feature (536)..(537): n is a, c, g, or t
  misc_feature (539)..(539): n is a, c, g, or t
  misc_feature (541)..(541): n is a, c, g, or t
  misc_feature (544)..(545): n is a, c, g, or t
  misc_feature (548)..(548): n is a, c, g, or t
  misc_feature (550)..(550): n is a, c, g, or t
  misc_feature (557)..(557): n is a, c, g, or t
  misc_feature (563)..(565): n is a, c, g, or t
  misc_feature (568)..(568): n is a, c, g, or t
  misc_feature (570)..(573): n is a, c, g, or t
  misc_feature (576)..(576): n is a, c, g, or t
  misc_feature (584)..(584): n is a, c, g, or t
  misc_feature (586)..(586): n is a, c, g, or t
  misc_feature (588)..(588): n is a, c, g, or t
  misc_feature (592)..(592): n is a, c, g, or t
  misc_feature (596)..(597): n is a, c, g, or t
  misc_feature (599)..(599): n is a, c, g, or t
  misc_feature (609)..(609): n is a, c, g, or t
  misc_feature (615)..(615): n is a, c, g, or t
  misc_feature (619)..(621): n is a, c, g, or t
  misc_feature (625)..(625): n is a, c, g, or t
  misc_feature (627)..(627): n is a, c, g, or t
  misc_feature (631)..(631): n is a, c, g, or t
  misc_feature (635)..(635): n is a, c, g, or t
  misc_feature (637)..(638): n is a, c, g, or t
  misc_feature (640)..(640): n is a, c, g, or t
  misc_feature (645)..(645): n is a, c, g, or t
  misc_feature (647)..(648): n is a, c, g, or t
  misc_feature (650)..(650): n is a, c, g, or t
  misc_feature (654)..(654): n is a, c, g, or t
  misc_feature (660)..(661): n is a, c, g, or t
  misc_feature (663)..(663): n is a, c, g, or t
  misc_feature (665)..(665): n is a, c, g, or t
  misc_feature (667)..(670): n is a, c, g, or t
  misc_feature (678)..(678): n is a, c, g, or t
  misc_feature (681)..(681): n is a, c, g, or t
  misc_feature (684)..(684): n is a, c, g, or t
  misc_feature (686)..(686): n is a, c, g, or t
  misc_feature (689)..(689): n is a, c, g, or t
  misc_feature (702)..(702): n is a, c, g, or t
  misc_feature (708)..(708): n is a, c, g, or t
  misc_feature (711)..(712): n is a, c, g, or t
  misc_feature (714)..(714): n is a, c, g, or t
  misc_feature (716)..(716): n is a, c, g, or t
  misc_feature (721)..(721): n is a, c, g, or t
  misc_feature (723)..(723): n is a, c, g, or t
  misc_feature (727)..(727): n is a, c, g, or t
  misc_feature (734)..(735): n is a, c, g, or t
  misc_feature (737)..(737): n is a, c, g, or t
  misc_feature (741)..(742): n is a, c, g, or t
  misc_feature (745)..(745): n is a, c, g, or t
  misc_feature (747)..(748): n is a, c, g, or t
  misc_feature (751)..(752): n is a, c, g, or t
  misc_feature (764)..(764): n is a, c, g, or t
  misc_feature (766)..(766): n is a, c, g, or t
  misc_feature (773)..(773): n is a, c, g, or t
  misc_feature (779)..(779): n is a, c, g, or t
  misc_feature (781)..(781): n is a, c, g, or t
  misc_feature (784)..(784): n is a, c, g, or t
  misc_feature (788)..(789): n is a, c, g, or t
  misc_feature (793)..(795): n is a, c, g, or t
  misc_feature (797)..(798): n is a, c, g, or t
  misc_feature (808)..(809): n is a, c, g, or t
  misc_feature (813)..(813): n is a, c, g, or t
  misc_feature (816)..(816): n is a, c, g, or t
  misc_feature (820)..(820): n is a, c, g, or t
  Peptide Sequence Number=SeqID_10201
  Probeset Number=SeqID_18475
tctataaccaaaaagagaaagagtcctgaagtttctgtaggagctccttctggtggtaggaaaggtatgaatattatccctcacgctgctaattacttgacatttcaaacaccatctgaaatgcaaacgccattgaacaatggtgtagctactaatgagtcgtctgatcttacatcaagtgtggcaaagtgtatgttatgacaaataaggcacgtattcttcgagcaacacaactngtnctangacaccacaacagaangnatttccnaacagtgatanatgaagtnactcctacanactngcacaattgttactatacganagaatcncatgcnnngtccnctnnaacanattggtactnatacagtggcgaangagccatncggtttntngtanatncaccatgtnannacttatncntactatgncnatntnnannnnnatnatntacnntggagngtntcnnctacgatganacngcatactacgcanggaattgcngtncntgnccactgantgnntntntatnnacacgnngntnatnnggngnatgaacnttatcnnnatntnnnncgnactttgancntntacncgtnngnactgtgcgtngatggncacnnncatncntatntatntnngnatatntnngnacangcacgnncntntnnnnagagagtnacnctncntanacacacagcacancgcatntanntntnacgcnantatntatatgnnanatanngcntnnacnncatgcacgcatncntacactntatgtnanatncgannacannncnngttgatatannatanatncgcngcg

SEQ ID NO: 4073 - DNA, 569 bp, Zea mays
  Peptide Sequence Number=SeqID_10202
  Probeset Number=SeqID_18476
tttgacccgacccctgttgccaaggggacctggggggaggccagggagtgcattttcgtcgagcccgagggccccaagggggttttttggttccccaaaaagttttaaccccccccgctcccaaagctgagaggccgctcccctaggaatgggagcaggaccccggaggaggagccggttctcgccccaaagtttccgtcaacctatttaatcgttagtggtcagttttttagacgggaaaagagatcctttgggcccaaagacgaaggctttctgcagtgccctcgctaaagctgccctcaagtccaagtaggcaaatttgtccccttagtgtgtcccctgttgttttttttagtcgtcccctgctgtaggctttccggcggcggtcgtttgtgtggttggcatccgtggccatgcctgtgggggggtggccgccctttttgtgtgggtctgtcgtcgcgttggggtcgtcttttcgtgctccccgtgggttgttgtaaaacaaaaaaatgttttttggtgtttttggcggaaaaacagattgtcccaacgccaacctttttttgggt

SEQ ID NO: 4074 - DNA, 271 bp, Zea mays
  misc_feature (96)..(96): n is a, c, g, or t
  misc_feature (104)..(104): n is a, c, g, or t
  Peptide Sequence Number=SeqID_10203
  Probeset Number=SeqID_18477
acactaccactttcatcgtcaaccggtacaattccaatttttttttcaataaatgtctggcagggcatcaggccaaaaagggcctacaacccctcntattctcntacactctgggcgaatccagcaacacacctgcacagcgacgtgcagcatttctgagtgagaatctatggacggagctggagtttcttttattcaaaacacagggggtagcaattgctctctgggtgtgtggtataatttactctaggcatgagtaagcaatcgactt

SEQ ID NO: 4075 - DNA, 744 bp, Zea mays
  misc_feature (1)..(46): n is a, c, g, or t
  misc_feature (711)..(744): n is a, c, g, or t
  Probeset Number=SeqID_18478
nnnnnnnnnnnnnnnnnnnnnnnnnnnnnnnnnnnnnnnnnnnnnnctctcacccttgcacagccaccaaccgctcccgcggacgcggcaaggcagggccaggcctctgcgcacgacagccggccggctacagccgctagccttggccatggcggcggccagccatgccccgagctgccctccatgtacggtgacccccgccccttgcagtcctggccgctcgctcggtcgttcgccgcgccgatcgcccaggaaggtccgcgctgctctcgttgtcgccgaggctagtggccagatcgcgattcgtttccgagcttcgaggaatcgacggtcaagcattagcgaccaagtgatctggatcttcgagttctacaaagttgaagaccttgagcatctgtttggtgaaggttgcctttggtgcaatctatgctcaggtaaagaagaaggcgtcgaggcgaatctccaggagttccaggacttcgacgagttcgaggattaggctagcgacctcccccagtcaactgcctgtgttgggttgtttacgttggctacgtttcgattctgtgtactttgattcatattatgtaaatgactctagtttgtagtattattacttactctttattgttattcgaagcattgtgctatgatgagtcatttatgtaatcgttgtgtacgtgaatttctgatcctggcaagtatatggttcgnnnnnnnnnnnnnnnnnnnnnnnnnnnnnnnnnn

SEQ ID NO: 4076 - DNA, 915 bp, Zea mays
  misc_feature (1)..(227): n is a, c, g, or t
  misc_feature (828)..(915): n is a, c, g, or t
  Peptide Sequence Number=SeqID_10204
  Probeset Number=SeqID_18479
nnnnnnnnnnnnnnnnnnnnnnnnnnnnnnnnnnnnnnnnnnnnnnnnnnnnnnnnnnnnnnnnnnnnnnnnnnnnnnnnnnnnnnnnnnnnnnnnnnnnnnnnnnnnnnnnnnnnnnnnnnnnnnnnnnnnnnnnnnnnnnnnnnnnnnnnnnnnnnnnnnnnnnnnnnnnnnnnnnnnnnnnnnnnnnnnnnnnnnnnnnnnnnnnnnnnnnnnnnnnnnnnnnnaaggagaaggaggagacaggcgcttgacatgggcaagtacgtggagctgctcggacatgggcgtgcgcatccgccgcgcgctcccactcccactgcccgcagaccgcgcgcctctacataccacccgcccgccggcgggccggcggccgcgcgggacggccgcaagggcgactccgccaccgccgcacgccgccgccgccgtgatgctgaagcagcaggcgcacaggttcgacgcctccgagatcatcctccacaccgtcgtctaggccggctggcctgggagtgggatgctcgacgccagccgtcgcccgatggcggcggcgatctatcgatttttatcgccactcattgccgcgcgagccagagtgtgttgcgctgagatgtgatgtaatgtgatgcgcacctcccgttcttattttatcttttctaccatgagttcaaaatcgaatgcatttcggtccgtcgaaccatcgttctgtttctgttttgcccgcgttccataccttctcggaggtgaagagtcgaagccgagcgtgtgtgcctcctgccgtcttttgatctggctacgagttaaaaggcttgttcatcgtaatctcaggannnnnnnnnnnnnnnnnnnnnnnnnnnnnnnnnnnnnnnnnnnnnnnnnnnnnnnnnnnnnnnnnnnnnnnnnnnnnnnnnnnnnnnn

SEQ ID NO: 4077 - DNA, 613 bp, Zea mays
  misc_feature (521)..(521): n is a, c, g, or t
  misc_feature (585)..(585): n is a, c, g, or t
  Probeset Number=SeqID_18480
tcgagtcagctacgtaggcccccccccccaacacgagacagactaagacatccttgacactgctgcctcgatgctacgctggactgtcaaactgtcaaaggtccaaatcgctggatcacgaacccagcatgacaccggctaacgcacccagtcgctgggccctgtcctgcgcttggtgtcgcttcccagcatctggccacaagcgaatccaaaaccattggacatgagcattgaaggagggttacagtgagcagaacttcacccccgaatgcaaccaccacagcgatctgtcagcgtgaggtaaatcgcactaaggaccgtcgagtctctgtttcattccacttacgagcgccgtcctgcgcttgcaagggaatgcttgtcgagcagctccgatgttggtgaatcgcctctcagtaaattcttcagcttcaggtaccttatttccgggtatgtgtatgaaatgatttccggaatgttatgactaacaacattgttgttggtcttcgattcgcctacatggnggctattccaaaccttaccccatcccatcgcaaggtgtttgtccagccgcacaccatacacggngtgaccaactccaaagaacggacgcatt

SEQ ID NO: 4078 - DNA, 1063 bp, Zea mays
  misc_feature (1)..(1): n is a, c, g, or t
  misc_feature (995)..(1063): n is a, c, g, or t
  Peptide Sequence Number=SeqID_10205
  Probeset Number=SeqID_18481
ncggccgggaagcgactgtcgcgaggcaaggccatcgtccgccatgacgctctccctctccacctctttcctccccatccccgccgccgtcaaagccatcgccagttctgcacatcccatcctctcctccctccgcatggccgcctccgccgccgttctcttcgccgccacttccccggcactcgcgtgcaccccctccgctcccccgtccccgctcactcctctgacagtcacggtgtcccacgacgacgccatcccagacgcctcccgactcttcgagaagctgataatcgagactgcctgcctcgcgcgcgtcggccgcgcggacgaggcgcgctcgcgcctggccacagccggatgtggagagagctacgcccgcctcctagccgctcaggttctgttcgtggacgggaagttggacgaggcgatcgcagcattcgaggagcttgcgcgggaggaccccgccgactatcgccctctgttctgccagggcgtgctgtacctcgcccttggaagggaggcggaatcagagtccatgctcgagcgatgccgcgaggtcggcggcgacgcgctaatcatagatccgtcagtgatgataacgccgaacgtggagacggaattcgatggggagaagccggagccggcgaaggtttgacctgtaactctgcagcggatgatctcagaataaggtaacactggcattttggtaaccatagacgaataagaatgagggaaatctccaaacatgttccggtgatacagtccagctagaggaaattttgacatggaaagttaattatccttacaatacttatatcagcccaatctttagatgattcactccctggtcagcgatgtttacctggtcggctatgtagcagcgcctggtccacgcacggtgctgcgtccacggaagcctacggtcggcgtctggtccacggaagccacgggcggtgtctggtccacgcgcggtgctgcgcttggtcggtgatgtnnnnnnnnnnnnnnnnnnnnnnnnnnnnnnnnnnnnnnnnnnnnnnnnnnnnnnnnnnnnnnnnnnnnn

SEQ ID NO: 4079 - DNA, 477 bp, Zea mays
  Peptide Sequence Number=SeqID_10206
  Probeset Number=SeqID_18482
atgaaaccggatactcgagagtcgccggagtgtccttcccttcttctatcagctctgcttctccctttagaaattagggtttttgaggaagacgagtattcacttcttttcaccgtgaagcgatggcttctttgttcaaggagcaagcaaagctctcagcttatcgagatagaagattttcaggaacacaagaggagtttgatgaagcgttaagggcatctacaacggtttacattggcaatgtgtctttttacactactgaagaacagctttacgagcttttctctagagctggagaaatcaaaaagatcatcatgggtttggataagaacactaaaacaccttgtggcttttgtttcgtcctgttctactctagagaggatactgaagatgcagtcaagtatataagtgggactattctcgatgaccggcctattcgtgtggattttgattggggattccaagaaggaagacaat

SEQ ID NO: 4080 - DNA, 484 bp, Zea mays
  Peptide Sequence Number=SeqID_10207
  Probeset Number=SeqID_18483
ctcgaggccggccgggactaagtgccgctgctaattacaaaaaggcagctcaccacgcccccggccccgctccctcctgcagtcccgctccccaccccgccaccaccgacgctgggatgaaggccgtgccagccgacagcgccgcgcccccggtgccgatgccgatgccgatgccggcgaccaagatcaccattcccgtttccgcggtgggcggcgcggaggcggcgctcctcgggaaggggcggtacaaggtctgggccttggccgccatcgcgctcctcgcgctctggtccatgtccgccgcctccgtctcactccgctggtcctcctcgggtgacctcgcctccgtctacggggacctggacgtcccgctcgccgacgacctcgattcccttgagatggaggagagggagaaattattgttacaaatgtgccacccgcacacacaacaccatcgatgatgtccgcgatgcatctatctcta

SEQ ID NO: 4081 - DNA, 882 bp, Zea mays
  misc_feature (601)..(882): n is a, c, g, or t
  Peptide Sequence Number=SeqID_10208
  Probeset Number=SeqID_18484
ctcctctccacccgacagcttggccggcgacgagcaccaccaggacaccgggtggtttctcccccttggtatttcctccctgctgtccgaagacgtgcgcccgtgattcgtagatttgactattttatgagttcacaagccacccagcatgaagtttttagaatacacccccttcgacagtataaatttgttcctcgagcagctcgaccttggtgattgtacaatcagagggaaccttgaggccttctcatgcaagcacactgcgacagaccgccgcctttcaataagcctagaacatgagattcttgactaccttggcaagtcctctgatagcgacccgtcttcaccagcggagcacttggcctccagatcatgccggaaaacattgatatatctaggtctcactcttggccacatatatccagatgatgatttcagtgctggtcgggctcactgatcttcccacccacgacgtgaaatgtttcaagcacatgccagactcctacttatctgatgcctctaggtgatgggtcagccacaaatgaaggcagatctcttctggacagtatgactaaagcaattgatgaggttatctcaattnnnnnnnnnnnnnnnnnnnnnnnnnnnnnnnnnnnnnnnnnnnnnnnnnnnnnnnnnnnnnnnnnnnnnnnnnnnnnnnnnnnnnnnnnnnnnnnnnnnnnnnnnnnnnnnnnnnnnnnnnnnnnnnnnnnnnnnnnnnnnnnnnnnnnnnnnnnnnnnnnnnnnnnnnnnnnnnnnnnnnnnnnnnnnnnnnnnnnnnnnnnnnnnnnnnnnnnnnnnnnnnnnnnnnnnnnnnnnnnnnnnnnnnnnnnnnnnnnnnnnnnnnnnnnnnnnnnnnnnnnn

SEQ ID NO: 4082 - DNA, 609 bp, Zea mays
  Peptide Sequence Number=SeqID_10209
  Probeset Number=SeqID_18485
atctcgatggcaattctctggtactgtctccgtctcctctccttccgcattctcgccgatatcaggaagcaggatgcaccagcagcggacgctccttctatggccgctcgcccattttctcccgcatccgcgatcttcatcgagggtatcttcatcgcgcagccctccctcggtgatatcttacgatctcagcgcatgtattctgcagactgacatagcgcacactgccgcctaccatactgcacaccaatctgcgccgcccgctggagctcctctctgcacataaatggcttgctattagatgaaggattggaagagcgtagccgttaatatgattccaagaaactctcgcgcctagggcatgatagctgtactctccgtaccgctgatctcatctacgcttaacggcctcatggcctgcctttgctccctgcatatgaaagatgatcggttgctactagcttgacgttgccatacgacgcatctctggacatatcgctacgacatacgatactgctcttgcatcgtggattctcatcgttggtgcaattatttttaatgagagtgttaacggtcactacaggaatgtatcctgtatgacgtgctgat

SEQ ID NO: 4083 - DNA, 635 bp, Zea mays
  misc_feature (608)..(609): n is a, c, g, or t
  misc_feature (628)..(628): n is a, c, g, or t
  misc_feature (633)..(634): n is a, c, g, or t
  Probeset Number=SeqID_18486
ggaagactaaaaccctagttttgtttctttcaatcgggagtaacagagtgattgagggggcgaaaatgagtggagcgaaagggaagaagaagggggcaagcttcgtgatcgattgcgcgaagccggtggaagataagattatggatattgcttctcttgagaagtttcttcaggagaggattaaggttggtggcaaggctggtgcccttggtgattctgttaccgttacccgtgaaaagagcaagatcactgtcacctccgacagcaacttctctaaacggtatttgaaatacttaaccaagaagtacttgaaaaagcacaatgtgagggattggcttcgggtgattgcctccaacagggaccggaatatctatgagttgagatacttcaacattgctgagaatgagggtgaagaggaagactgaagatctatttctctgtcttgaggcattatccattaagtgtatttgttgtcgagtctcttttatctatgttgtttatccgacttttactggttcttcaaatattccctgtttttaatttggaaccaacgttataccctcgggaagttttataatttatagtcattattgcagaggttgccgtcnnaaaacaaatcttataaaantcctnnc

SEQ ID NO: 4084 - DNA, 786 bp, Zea mays
  Peptide Sequence Number=SeqID_10210
  Probeset Number=SeqID_18487
gggcgattgggttcatcgaggccggccgggtcttccgctttgcgtcatctccggcaccattgacttcatcttcggcaactcggcggcggtgttccagaactgcctcatcgtcacgcggcgggccatggacaaccagtagaactcggtgaccgcgcacggacgaacggaccccaacatgaaatcggggctcgctatccataactgccgtctggtgcccgaccagaagctcttccccgaccgcttcaagatcccctcgtacctgggccgaccctgtaacgagttctcgtgccgtcatctcatggagagcaccatcgccgactacatcacggccgagggctacatgccctgcaacggcgacttcggcatcaggacgcgtcttccaccccgagtacaacaaccgcggggcccggcgccggcaccagcaagagggtcaactggcccggcttccacgtcatcggacggaaggaggccgaaccgtttaccgccgggccgtttattgacggcgccatgtggctcaagtacaccggcgcgccgcacaaacttggtttcaagttttaaaggccgcatggcatggcatacatcacatcatatatagtgaggtggcaaacacgtttgggggggggggcacacatgtttgtgtgtatgtacaatccctgagacttgcaaacaaaggggtcggaaaacaggagggctgacatttgtaccttcaccatttgcattcctttggctgtttttacgcgcgcccaaaaaaaaaaaaaaaacaagaaaactataaaaaaaaatacc

SEQ ID NO: 4085 - DNA, 469 bp, Zea mays
  Peptide Sequence Number=SeqID_10211
  Probeset Number=SeqID_18488
aacaatgtgaagctcgagttgcctgcttgagcatgcttcgttttgccagaaagcgtgcaagctacgtgactcaagttttctagaatttagctgcttatatggtcatggaaagacttggttatgacgtgaacaggtgcagctgatgccaaacccttgatcttgtctgcgaaaatcgcgactcgcacggccacgaccatacgaacccaaagctaacagatgctgctgggcagaagtgggggcgaccctttgagaacctctatactttcgatatggaaaatcatatacagctcagttagtctgtctaacattcgagttcacttgctccaatacgaaaaatgcgatccaatgttcgtgcgatttctgtgtaaaactgttatacttttaactgtcctcaactatccatttttttatatataatgtcttggtgttaaaaaaaaaaaagggcagaagatataaaggaaccaaaaat

SEQ ID NO: 4086 - DNA, 2253 bp, Zea mays
  misc_feature (2222)..(2253): n is a, c, g, or t
  Probeset Number=SeqID_18489
gccggccgggttgggattgccctagtcggcggcgccgaccagctgccgccgcgtccagcaagacaaccggccgttaggtccaaaatagttccccatggcgtccatatcgtcgcttccctttgcgccgctgcgcggagccgccgagtggagcccgtcgtcgacggcgccggccgtctccggcgccgtcgtgctcagcgcgaggtctcggcggggctcgggctcgggctcgggctcgggctcgggctcgggctcggtggtgcgctgcgtcgccacggcgagtgatgtcccacctactgttggagaaacaaagttgaacttccttaagtcatacaaacgcccaatcccaagcatttacagtacggtcttacaagaacttctggtacagcaacacctgatgagatacaaaagaacctatcagtatgatgctgtgtttgctcttggattcgtcactgtctatgatcagctcatggaagggtaccccagcaacgaggacagggattccatcttcaaggcatatataacagcattaaatgaagatcctaatcaatacagagctgatgcactaaagatggaagagtgggcacgttcccagaatggcagttccttagttgatttttcttctagagatggtgaaattgaatccattctgaaagatatatcagaaagggccaagggtaagggaaacttcagctacagccgattctttgcagttggcttgttccgtttgcttgagcttgcaaatgcaacagaaccaacagtactagacaagctttgcgctgcgctaaatatcaataaaagaagtgtggatagggaccttgatgtttaccgcaacatactctcaaagctggttcaagccaaggaacttctcaaggaatacgtggatagggaaaagaagaagagagaagaaagatcagaaaccccaaagccaaatgaagctgtcacaaaatttgatggaaatctttattccataaggcattagatcaaccctttgcagaggagagtttcccagtataacagaattacgtgttgagaaactaccaaatgatctcctttcaccacagacatcttttgctgctcgtcttgtggtgtagcattcttgcggtacaaaaggatccagatcattcatactattggacagatatttgtattttctcatgagtcttcaaatcaaatgtatttattttctgtcagtctgaaagtatatgaagcggtgtgtagggttaatgttactcataagcagagaaatatagctttctcttttgtactttgtggagatactttgcgagcctgtgttcacttactgtggagaaaaaaaaaaaaaaaaaaaaaaaaaaaaaaaaaaaaaaaaaaaaacccggacccacaaacacaagtcgtcgtaggcagcgagggtctctcctctcccacgcatcgcgccaaggaagagagagagatcgccgctccccgtctcggcgtcgggggcgggtgccctccctcctcgagcgagatctgtctggtcacagatctatctgacaaaatggtgaagatctgctgcatcggggctggctatgtcggtggcccaaccatggccgtcattgccctcaagtgcccagacattgaggtcgtcgtcgtcgacatctccaagccccgcattgaggcctggaacagtgacaccctgccgatctacgagcctggtctcgatgatgttgtgaagcagtgcaggggcaggactcgcttcggcggttctgatgttgctgtggactctgtagtctggcagtggaagagactagagagcacctatttctcttctgtccttttgcaaggcagtgctgggggattctttgcctagacccactgacacaagcttctgagaaattgtttccttgttcaaggagcagctacaatctgaattttttatggtggcaacaattcttatgagttgggaaatttgaacagtaaggagtaaaacaatctttgaacaactgcagatgagtatccaagattacagaatgttcttcaacaaggagaccttaatggtgccatggagtgaagccttgcttaagttctttgtttgatcgatggatctaaagtgtttgttttgttctttctttgctcattttctttgttttctaagcttgttcttccccttgctgtcgtatatagtctgtaactctttccttgtttcttgtactctacagattgaacgtatgtatcagtttactttcattgatagccttttcaannnnnnnnnnnnnnnnnnnnnnnnnnnnnnnn

SEQ ID NO: 4087 - DNA, 1979 bp, Zea mays
  misc_feature (1978)..(1979): n is a, c, g, or t
  Peptide Sequence Number=SeqID_10212
  Probeset Number=SeqID_18490
atagaaagatagtcacctgcctatctatctagcgagagagagagaggaaagctagctagctagcatggagtgcggcagcaagaaggcagcaggcggtgtgttggcgctgctgcttctccagctggtgttagctccgacgacggcgacggcccgcctcctgcaggcggatacctccaccgtggttggcctggacatcatcgcgagggagtttggccatccagtgagaggcatcctctgtggtgaaacctgtgtcttcctaccatgctatacggcagccatgggttgccaatgcattggccaaatctgcatgatgtgatatctggactagcgctatttgtaatttgtgttgggagaaacacaaggacggtacggtggtgttcaacttattgcatgtgtatggtgatctaataagtaaagtatataaaaaggatatgttggatgtgtaccaaaaaaaaataaaacagaaaaagccaagaaagcaagcagagagccgagccgacagtccaacaagtggaggggagaactcgtcgcgtcgcctccgcccccgcccccgcctccgcctccggtggttagttcctctctcctcgtcatctcaccgcccgccccacagaaatctgccccgtgctttgccaccggtgactgcagtctgcagaagcagctagccatggcggcggcggccttcgatgcctacaccgacaagaacgccatcttccgccgcctcaaggccaagcccgagaacaagatgtgcttcgactgcaacgccaagaaccccacctgggcctccgtcacctacggcatcttcctctgcctcgactgctcggccgtccaccgcagccttggggtccacatcaccttcgtcaggtcaacgaacctcgactcatggactccagatcagctgaaaatgatggcgttcggaggcaacaaccgggcacatgctttcttcaagcagcatggatggaccgatggtggcaaggttgaggcgaaatacacatcaagagctgctgaactgtacaggcagatgctcaacaaggaggtcgctaagagtgccattaccgataatgccctgccgtcctcacctgtcactgtgtctgaggcttccaagccatctgatgacttccctgaattcaagctctcagacgcaccagcaccgccggcggagaatctgaatgggaagcatgaacccaagtcccccaaatctgctccacgttcaccaaaagctgctactcatcccacctttgccacttccgtgaagaagcccattggcgcaaagaaggttggaggcaagactggagggcttggtgttcgtaaactcacaacaaagccaaatgaaagcctgtatgagcagaaaccagaagagccaaaacctgctatacctgccttgactgctccaactgcaaaaggtggtccatccttgcattcacgttttgaatacgtggagaacgagccatcagcagcagttttgctatcctacctgcaccgcatcaccgacagttcttgcacagctacagctctgtagagggatagtagaggattcttatcatgcgttttgtattctgacctttgcttgttgtgagacccagtccacatgaagatgttttttttatttgttattgatactttcacgacatgaagcatacaattatatgcatcaaggttgtttgagaaagttcagcatgagaaagctgaccaaatgttgcgccagcgaaaaaaaaaaaaaaaaaagcggccaagcttactggcgtgtttagttcgtttcatggtcgggaggttggatggaatggaaaccacaatcaaggctgtagtagtgtgtagtaacgaggtacggagtatcgaggtagatacatcagatggtgtaagggagtacccagttgttagttcatggcttcaagcttagcctcccttcaatttgttcgatgatgtattacttcacaataaacattattatttagatgtatgaggtgagcacacttggtctttnn

SEQ ID NO: 4088 - DNA, 394 bp, Zea mays
  misc_feature (2)..(2): n is a, c, g, or t
  misc_feature (30)..(30): n is a, c, g, or t
  Peptide Sequence Number=SeqID_10213
  Probeset Number=SeqID_18491
tncttgacgctgtccaagaaacagagacanagatgatagaaatgtcagcacttaatcatcttatgtcaacacatgttctacaacaagcgcaacaaattcagtatttatatgatcaggctgttgaagctacaaataatgtggagcctgggaaaggccatcttaacccttggaaagcgctgcgccaagtactacgaggccggtgcccgctttgccaagtggcgcgctgttctcaagattggccccaatgagccatcacagctttgcatcgatctgtacgctcgtcgtcttgctcgccatgccaacaacaaataaaaaaatgatctgctgccaattgttgagcctgattgcctggttgatggccctcatgacattgatcgctgcgcttacgtcactg

SEQ ID NO: 4089 - DNA, 658 bp, Zea mays
  Peptide Sequence Number=SeqID_10214
  Probeset Number=SeqID_18492
cttagagcagttccctggaagttggatcttgtagttttctcagagcaggggaagaagtgtcaggatggatgggcttgtgtggtggcccctttgtgtcttgacaaagtgggaacgacaggtcattggtcaatgtgtctcaaccagtggctgccccctggtgtgcagtgtatcatttaactgagattggcagttcagtatcctgaagcgcggcagttcagtcttgttcgatcttggtgaccctggcagggaagcctgggcgggcagttcagtccgctgtggcacaaaaccgcggaaatagcccgccgcaccaagtaggcccccgcttgccggaagctgtcagctccggcaccggctctggcgccagccgctctgacacgggcggggtaagagggggatcgggttagagtgtgacagcttttttgttcccgtgggcttggaagcctccccggctaccgcactgcaccacgggtgggactgtggcctgtgggagaggaggagaggagaggaaagggaaggcaaaggcatgtacttgtatagtactacgaacgtggcgggcgggcgcagtcaagccgttgactgggcgagcgagcgggcccggtccccccacccagacccgccggccgaaggggccgggacgcgtcaccgcggggtaccgcgg

SEQ ID NO: 4090 - DNA, 356 bp, Zea mays
  Peptide Sequence Number=SeqID_10225
  Probeset Number=SeqID_18493
cgatgggtactcgagccggcaccaccaccatctcaccgtgctcaggcgtcgtctacaacgccgcccgcactacccccagtgcatagcacactactcgcagaaacaccgatggtccctgccattgcccagcagcagccgcaggtgcagccgatcggtgtcggtggtcgaaaggtggtgtacgaggtttcctgatgaatgtgcgtgattcactacagcacgacgaaataccggaggaccggtgcgctcgagccctgctgctgatggtcgcgctgaccttcctcttcgtcttcaccgacgtctacgccgtgatggacctgccctgcgagtccaacctgtgcgtgtacctccccgaaatg

SEQ ID NO: 4091 - DNA, 1541 bp, Zea mays
  misc_feature (1)..(94): n is a, c, g, or t
  misc_feature (1392)..(1541): n is a, c, g, or t
  Probeset Number=SeqID_18494
nnnnnnnnnnnnnnnnnnnnnnnnnnnnnnnnnnnnnnnnnnnnnnnnnnnnnnnnnnnnnnnnnnnnnnnnnnnnnnnnnnnnnnnnnnnnnntgggatcatctcgaaaaccatctcaaagaagggatgcttgaagtgtacaactctttgagcgaggaaggcaaaaaggagttcaacaaggcttatagcgcatcgttttacccgtgcatggatatactctacgaatgctatgaagatgtggcctctggaagtgaaatccggagcgtggtgttggctgggcggaggttttatgagaaagagggcctcccagcttttccgatgggcaacatcgaccaaactcgcatgtggaaggttggtgaaaaggtgcgctcaacccgtccggaaggtgatcttggcccgctccatgccttcactgctggagtgtacattgccctgatgatggctcagattgaggtactgagaaaggggcactcctactctgagaacaacgagagcgtgagagtcggtcgacacgctagtgagtcggtggactcactgaacccgttcatgcacgcccgtggggtcgccttcatggtggacaactgctccacaacggctcgcctaggatccaggaagtgggcgcctcgcttcgagtacatcctgacgcagcaggcctttgtggcggtggacaaggacgccccaatcaattaggacctcatcagcaactttttgtcggacccagtccacggtgccatcgaggtttgcgctgagctgaggccccccgttgatatttttgtgcctgccaaccccgactttgtgcgcccggagctccggcagttttcttagatttaggcagtgagcggagagggagagggaaaaaaagaggatttcgtgtcccgagttagaacagagtgctgtatgttttgtgcccctgtttgtaagtcaagttggaactgtgaacctatgtttgcttctatcagaggacccggagaaagcctgggcatctgtttccggaataaaatgggtccttcggaataaaaaaaaaaaaaaaaaaaaaaaaaaaaaaaaaaaaaaaaaaaaaaaaaaaaaaaaaaaaaaaaaaaaaaaaaaaaagacccccccccccgggaacgccagcctagaaataagctcatcaactccaaatgggaaaactcgacaccaggaaggggctgatcgttgcccttgctctccgggggctcgttggaagggccgcctccagaaaaagcgggggttggggttgccaaaaaccaccgtttcatcaaccgcctccgttctatatgccgcctccgttttatctgccgccgaagaagaagccgaagccatggaaataccccactcaaccaccgaagttaagcccgggccagaagttcgaatcctgcggggtcggaagnnnnnnnnnnnnnnnnnnnnnnnnnnnnnnnnnnnnnnnnnnnnnnnnnnnnnnnnnnnnnnnnnnnnnnnnnnnnnnnnnnnnnnnnnnnnnnnnnnnnnnnnnnnnnnnnnnnnnnnnnnnnnnnnnnnnnnnnnnnnnnnnnnnnnn

SEQ ID NO: 4092 - DNA, 471 bp, Zea mays
  Peptide Sequence Number=SeqID_10226
  Probeset Number=SeqID_18495
ctttcccgctgcagccgtcatcgtctctgagagaacaacaaggactcaagttttttttcggaagttcatttaagacacaacatgtcgggtgatgaggctgctgctcccgttgttgttcctcccgttgctgagccagcggcaatcccagaggacatggacttgttgactgcattggagctgactcttaggaaagctcgtgctcatggtggtgttgttcgtggtctccacgagagcgctaagcttattgagaagcgtgttgctcagctctgtgtcttggctgaagactgcaaccagcccgattacgtcaagcttgttaaggctctctgcgctgatcacaacatcaacttgcttactgttccaagtgccaagaccctcggtgaatgggctggtctctgcaagattgactctgagggtaatgcaaggaaggttgttggctgctcatgccttgtagtcaaggactatggcgaggat

SEQ ID NO: 4093 - DNA, 2531 bp, Zea mays
  misc_feature (1)..(43): n is a, c, g, or t
  Peptide Sequence Number=SeqID_10227
  Probeset Number=SeqID_18496
nnnnnnnnnnnnnnnnnnnnnnnnnnnnnnnnnnnnnnnnnnngtccggatgccaggagggcgcctgggcagggaggaatcaagggcgtgcgcccgccaccggtgctcaagccgccgccttcgatggccctaccagctgtctgcggcgtgggatccacgtgggatatcttgcggtcgttggcgcctgatgagaaagatgacgcccccgctagcagatctggccgtcgttttggacaccaggatgcagtggagaaggatgacgacgagcgtgcggcggttctgttaatgttggatgatcttaggctggaggagtcgtccgagagctttactggtacttcttcgctatcaacgaccaacgatgacgacacctcaagcaccaccacagaatccatgttctatatttcaccgaacgggaggtttaggaggaggatcaagtcatggagccgaggggtgctcctgggtagtggctcgtttgggacagtctatgagggcatcagcgatgagggtgtcttctttgctgtcaaagaagtgaacttatttgataaagggagcaatgcgaagcagtgtatctttcagcttgagcaggaaattgcacttctgagccagtttgagcatgagaatatagtgcagtactatgggacagacaaagaagattcgaaactttacatcttccttgaattagtgacccaaggatcccttgcatcactatatcataagtatcgcctgcgtgatactcaagtctctgcatatacaagacccacgcgtccgcggacgcgtgggctccatgaaagaaatattgttcacagagacattaaatgcgcaaatattctggtgcatgcaaatggatctgtgaagcttgcagattttggactcgctaaggagattaccaaattcaatgaacttaaatcatgcaaaggaactgtttattggatggcaccggaggttgttgatccgcagcagacatatggacctgcagctgatatatggagtcttggttgcactgtcctggagatgttgacacgccagataccctatcctgaccttgaatgggcacaagctctatacaggatcggtaagggggaatcaccagcaattccaaacactctttcgagggatgctcgcgattttataagccggtgtgtaaaaccgaatccggaagacagaccgtcagcatccaaactgttggagcatccattcgtaaacaagtccataagatcagtacggtctatgaggacgacaccttcacgctcgaattcgtctacgcgtggcatcaattaatgggccgtccgtcatcatctattgggcagcggcagaatgatattggtccgcgcaaatcatgcggagctggccgagagggagtttgttttgactggagctagtattgtcaacgctcaacagcattgtcgtcaacctcttattggtgtttcattagttgattctttggcatacgcccgcgaggaacatgtcctcgttgagccgccggctaatgtatgttcttctgcctggatagagaatagtgggtgtgcatttgagcgcatgggttgtagagtgagaacgggctgtgtaaatagcttgtcctgatgccaaggatatgttattagttgtcacgagaaaaaagaaagaaaggaaaaaaggttcaaagctttggaactgtcaaaaacaaaaaaaaaaaaaaaaaaaaaaaaaaaaaaaaaaaaaaaaaaaaaaaaaaaaaaaaaaaaaaaaaaaaaaaaaaaaaaaaaaaaaaaaaaaaaaaaaaaaaaaaaaaaaaggggggggcccgttttaggggacccaattttccttccccgggccttgcaaggtaatactttttttttggggcccccaaattaaatttcaggggccgggttttaaaaacggggggcggggaaaaccccgggggtccccaaattaaatcccttggaaaaaaatccccttttccccagtggggtaaaaaccaaaagggccccccccaatcccctttccaaaaatttgcccaccctaatggggaaagggacccccccctgaacgggcccttaaaccccgggggggggggggtttccccccagggggcccgttacttttgccaggccctaagcccccgctcttttggttttttccctttcttttttccccagtttcgcgggtttcccccgaaaagtttaaaagggggggcccctttaagggtcccaattaagggttttagggcccctggccccaaaaaaatttgtttggggggggggtccacgaaggggcccatccccctgaaaaagggtttttccccctttggccgtgggggcccaggttttaaaaaggggcctttggtccaaaagggaaacaaccctaacccttttcggggttttttttttgatttaaaagggaatttgcccatttccgccctttgggtaaaaaaaggggctgtttaaacaaaattttaccgcgatttttaacaaaatttaacccctctcattttaaggggccctttttggggaataagggcccggaaccccctattggttttattttaaaaa

SEQ ID NO: 4094 - DNA, 734 bp, Zea mays
  Peptide Sequence Number=SeqID_10228
  Probeset Number=SeqID_18497
cctcgaggccggcctagagaacatatttcagagacgctgtcgtacctgccgccgctgtccgatggcgacctgctgaagtacggagtactacctgctgcgcaacgtggtgcataacctgcctctcgagttccaaaaggaccgcttgtgtaccccggggaactccacctccccgagctactacgacggccgctactggaccatgtggaagctgaccatgagcggctgcaacgacgccacccaggtgtacaaggagctgcaggaggacatcaaatcctacccggacgccttccaccgcgtgatcggcttctacaacatcaagcagacgcagtgcgacagcttcatcgcctacgagcccgcggttttggactaaaacgcccccgccggccgccccccgcccagatactagctagctacctcctgcaagatctagaagctagacacatgcaccgcctctgacgatcggatttgctgccagacaccgtaccctttgctcgcttggtctcttcttaccattgacctaatacacactcacttccccggccctgctacctgtgctatccagatctctctgctggatgagatgtatccattgttgcgagcatgaccatgcattggatacctctatacctgctacaaaactactgcaacggctatatatacttggcaggaggaacatgcgaatgcaagctccagctatcggatacatgtaatatggatacaagctatataaatcc

SEQ ID NO: 4095 - DNA, 750 bp, Zea mays
  misc_feature (1)..(3): n is a, c, g, or t
  misc_feature (750)..(750): n is a, c, g, or t
  Peptide Sequence Number=SeqID_10229
  Probeset Number=SeqID_18498
nnngcccagcaccatttcacctatcaccacctatagcaataccacgagtccacgatccatggaatagactatactacaccgctcggccggtgacgacgacggcgacagccgacagactatccccaactacgctctgtaccagcgccttatccgccgcctggggtttgttctggcgcggtggtagttgaaaaggcggaagggattagagcaaggagagggatcggcgatgagcttcgcgaatctggagagcggggtcatcgagcttcgacaacgtcaggcagacgcagagcgtcagcttcatcgcctacaggcccccctgttttttttatagaccgtggctagatcgaccaatggccatgtctctgcctgttgatcggatcaccttcttgcattggttcctctctctctctccctccttttttttccctttatctcatcatttcttttctcctgcatgcaatggttccttttgcttccaacaattctcctgctgatgtatccagcatggcatcatccatctacaattacgtacgtagtgcaacgactgtcgattcgttgggtgaggaacatatatgtgaatgcaagctccggctaccatacatgtgtaatgtgtaatagatatatatacaaaactgccgaggcgccgacaatactttataactggtccttttatatatcgtcatctgtctatcataacttgttcagctcacatctacagaaaacatgtgttccattgttattagatgaacn

SEQ ID NO: 4096 - DNA, 1669 bp, Zea mays
  misc_feature (1)..(9): n is a, c, g, or t
  misc_feature (1669)..(1669): n is a, c, g, or t
  Probeset Number=SeqID_18499
nnnnnnnnncgaggcaggaagagagacgacggcggccatggcgacctccttcaggggacgaccaccaagtgcactgcctgcgacaagacggtgtaccttgtggacaagctcaccgccgacaaccgcatctaccacaaggcctgcttccgctgccaccactgcaagggcaccctcaagccaactacaactccttcgagggagtgctctactgcaggcctcacttcgaccagctgttcaagaggacagggagcttggacaagagcttcgaagaatgctactaaagtctcaagcgcctttgctggcaccagagagaaatgtgttggatgcagcaagacagtctatccaactgagagggtcactgttaacaacactatgtaccacaagagctgcttcaagtgctgccatggagggtgcaccatcagcccttctaactacattgcgcacgaggggaagctgtactgcaaaaacttacacaaggcacaatatggtttgacggtgaatgaatacacaatttcggaggacaaagagcaagtcccaatatatattgcattccccatctctaacaagcataccttcaccaggaagttatggtctgttgaagctaccttcaccaggaagtcgtctagcccatgctcatctccttgatccatctcccattggcttccccctcatcccaaccgccccagcctgaaattctcggattggaatctgttccagggcggcggcagaacagcgtccccctctagcagtctcgccacagatcctaggcattgtagaggtggggaagaagaagactagaagaagagggccatggcgacctccttccagggaaccaccaccaagtgcaccgcctgcgacaagacggtgtacctcgtcgacaagctcaccgccgacaaccgcgtctaccacaaggcctgcttccgctgccaccactgcaagggcacactcaagctcgccaattacaactccttcgagggagtgctctactgcaggcctcacttcgaccagctcttcaagaggaccgggagcttggacaagagcttccaaggaaccccaaaggttgtcaagccagaaagaaacgttgggaatgagaatgctactaaagtctcgagcgccttcgctggcaccagggagaagtgtgttggatgcagcaagacagtctatccaattgagagggttactgtgaacaacactatgtaccacaagagctgcttcaagtgctgccatggaggatgcaccatcagcccttctaactacatcgcgcacgagggtaagctctactgcaagcaccaccacgtccagctgatcaaggagaagggcaacttcagccagctcgagaatgaccacgagaagacatcgcaggctgggtcgctggaggacgacgaagaagaagagtattaattaatcgctgagcaaaaatacataccaccagaagaataattaatcttccttcttgcactatatatttctgtgtcatttcagtcctaccaatggagatcatgtgcgttcagagactacgatatcgttttcttgtatctgcatgtaaaccacgtctactaccctgattccaccatttgcattgatcagaaggtaatctagaccctgtttggaacttgtatggaagagaaaacatgccttccatatcagggaatcaaaatgggcccggggn

SEQ ID NO: 4097 - DNA, 933 bp, Zea mays
  misc_feature (1)..(2): n is a, c, g, or t
  misc_feature (933)..(933): n is a, c, g, or t
  Peptide Sequence Number=SeqID_10230
  Probeset Number=SeqID_18500
nnagagcagagagctagtcgctcgcgcgggcaatccaaacctttccctattcttgcaaggtctcggaaacggaaaggcccctgctccgctgcgcgtttgcgagtttgggaagaatccttgcctgccggagggggggaaacgggcgagatggggcgagggcgcagcgagataaagaggatcgacaaccccacgcagcgccagtccaccttctacaagcgcagggacggcctcttcaagaaggcccgggagctcgccgtcctctgcgacgccgacctcctcctcctcctcttctccgcctccggcaagctctaccagtacctcgcgcccaccgtcccctctgtcaaggagttcgtcgagaggtacgaggcttcgacgcacaccaaagtttggtccgacatccgccaggagaggcgccgcgagctggagaaggtggccaagatgtgcgacctcttggagaaggaactgaggttcatgacggtggacgacggggagcggtacacggtgccgtcgctggcggcgctggagcacaacctggaggcggccatgcacagggtgcgctccgagaaggaccgcaagatcggcggcgagatgagctacctccagaacattatcagaggaagccacgaggagcgctacgggttgtgcgacaagctcgctcatgctcagactcgtaagcacacgattttgtgagctacagacgctcagaacgccccgagactgcacttaataagtatacatttcttgcaccataaaacgtagcgtcgtgtgagcaacttaaattacttgcgtacatttctttggctatatataagaacatttcttcatttgcttgcaccatacaaaacaaccgaagagatggttcatagcaggcaaaagaatcttcctgcgggcctgcctatggctttgcccgctagcagataaacaacctatctn

SEQ ID NO: 4098 - DNA, 701 bp, Zea mays
  misc_feature (3)..(5): n is a, c, g, or t
  misc_feature (7)..(7): n is a, c, g, or t
  misc_feature (9)..(16): n is a, c, g, or t
  misc_feature (19)..(21): n is a, c, g, or t
  misc_feature (613)..(613): n is a, c, g, or t
  misc_feature (618)..(619): n is a, c, g, or t
  misc_feature (640)..(640): n is a, c, g, or t
  misc_feature (647)..(648): n is a, c, g, or t
  misc_feature (654)..(655): n is a, c, g, or t
  misc_feature (658)..(658): n is a, c, g, or t
  misc_feature (665)..(666): n is a, c, g, or t
  misc_feature (670)..(670): n is a, c, g, or t
  misc_feature (672)..(672): n is a, c, g, or t
  misc_feature (675)..(675): n is a, c, g, or t
  misc_feature (681)..(681): n is a, c, g, or t
  misc_feature (683)..(684): n is a, c, g, or t
  misc_feature (686)..(686): n is a, c, g, or t
  misc_feature (688)..(689): n is a, c, g, or t
  misc_feature (691)..(693): n is a, c, g, or t
  misc_feature (695)..(695): n is a, c, g, or t
  misc_feature (697)..(699): n is a, c, g, or t
  misc_feature (701)..(701): n is a, c, g, or t
  Peptide Sequence Number=SeqID_10231
  Probeset Number=SeqID_18501
agnnnangnnnnnnnnttnnncattgggtaccgggccccccctcgagaacaccatgcaccgttcggtgctgatggcgcagggcgacgagatcggtcccgatgcgatcctcaccccggacggtgaccgcctcgatctcgccaagacggtgccggccgtggcgcacgccaccatggccgccgagcaggtgacgcgggcattggtgggccgcaccgtcgccgacgtcgaacgcgacctgatcctggagacgctgaagcactgcctcggcaaccggacccatgccgccaacatcctcggcatctcgatccgcacgctgcgcaacaagctgaacgaatacgccgacggcggcatcccgattacgcctgcgggcacgccgggtgagtatccgcggatgccgatgatcggggcgtaaggctccagccgagatcgagaggatgcagatgcccgggcccagccccgggcatttttgttttgtgccctctggcgacagtctcgtagcccgcatgacgggaccgcgttacgtgactaggccgtgacgatgcgaggccctataccgctcgcgagaccacgcgaggaaccatatgtctgaagctcaatacggattggctggcgtcnacggnngcgatgatcgatctgttccgngatgtcnnaacatnnatncgggtcnntgananggnggcgtnanncngnngnnncngnnnan

SEQ ID NO: 4099 - DNA, 386 bp, Zea mays
  Peptide Sequence Number=SeqID_10232
  Probeset Number=SeqID_18502
gggcgggcactatttccaccttcccttttgccttttgcgacgccccacaagaatcgttatttgatgcgtttacacgcctcgcggccggcggtggccgccacgcatgccgccagacaagcaggcgccgatggacgcgcggcaggacggggtaggcgcgggcaggtcatccggatggaacgggaggccgtcatccccatcctcaagcccaagctcgtcatgcgcctcgcgtatctacactagagcatgaagctgatcgcaacgagttcctgaagctgtgcaagaacgtggactacaccatccgggcctggtacctcctccagttcgaagacctcatggcaagccttcgatttgtctttgttcttttacttctgtttgattgctcaagg

SEQ ID NO: 4100 - DNA, 577 bp, Zea mays
  misc_feature (2)..(2): n is a, c, g, or t
  Peptide Sequence Number=SeqID_10233
  Probeset Number=SeqID_18503
tngaactgtttatgtttatgcgatgcatctataaattaaattctgaagtaaccctttgcttgtatttctatttcttgttgcaatttttaatgatggttaaccaagagcacagaattcgtggagattttgttaatgggtttcttttcttgaacattgtttcttgaacgacttagtgatcattgctggacagtgtttacgaagtattgagatatgagctactatgcaggcggattttctcaatgccgttcttatttaactgcattgtgaacagtctgtttcccattgatggtttcctattaccggtggctttatgtttgtctgcggtgtctgttatttacttccccttttggtttcttacatggtaattcttgtacagacattttcaaggcatacaaaccagtctggcggatatggtccacaaggttaccgacctcagggtcatggtgccgcttctcagttggggccacgctctcagaatcatggctatggatacccacctagaggtatgcctccacctcaaaactacaacgcaccctacggtggctacccaccgcagagaccgtcaagaggtggcatg

SEQ ID NO: 4101 - DNA, 569 bp, Zea mays
  Peptide Sequence Number=SeqID_10234
  Probeset Number=SeqID_18504
tgctgcgccggctggtaccgccgcggcggaaccggcgcgacccacgcggcctccggaggcagcgaggactcgcggcgaagacgcctacgctacctccgcggcccccgcgcccgcccggcgatctcctgcaatccgcggctgaggcgccggcgatgccggctcccatgcccgacgcccaatacctgcgccaggtcgacagggcgcgccgccacctccgcgccctcatctccaacaagggatgcgccccgatcatgctccgcctcccatggcatgatgctggaacttatgacctgaagacaaaaactggtggtgcaggatggttcgatcacatatgaagaagagtacactcatggtctcgaatgctggtttaaagactgctatcgatctccttgagcctatcaaagcaaagaatccaaagataacatatgcacacctgtatcggcttgctggagtgtgtgtatttctagcgactgtgcgaccaactgtcgaacttattcctgtgagacgggatccgtcgatgagcccccgggaaagatgtctgccaggcgctaagaaaggtgcagcacact

SEQ ID NO: 4102 - DNA, 758 bp, Zea mays
  misc_feature (737)..(737): n is a, c, g, or t
  Peptide Sequence Number=SeqID_10235
  Probeset Number=SeqID_18505
ccggccgggaacctggtcacgggctcagggccgcgcccgaacttcacacgaccggaccgatgcgcatcggcgtcgaacacctctgccctctgtaaggagacccaaccccaccgcgcgcatccatgcccccaagcgacggcggtgcggcgggctccctcgccgacacgccgcgggcggagcgaggctcaccgcggagcaagcctctggcccgggagaagcatgtctccgcacgaggcgcggcgacgcgatcggcagattgcaacggcgaagaggaggttattgggctgctccatatggctgattatggaagttaatggtgggtgagggcaagaaaagaagtataactaacactcgtgacgatcccggtatacagaaacagagctattagcgctagtgatggaaacagtctcatgactcgtgaaaggtagcttctacctccctcatctattatatgatttcctggaagactgctagcaggcggcaagcttcccagatcctgttcacattgccgtatcctttcttgatcggcgctggccttgtcgatttacgggaggaacgcggacattgagctatattatagttggaatcttcatgctgaatcctcttacttaatccaacctgctgctatcttgccgaaggagagcctctcatctagcggcatgacaaatgatcgcaagacgttcttgtggctggcgccactgtgtgtcccaggttcacggtgcttttatggtttgtgncaacagtttgggttgtagttg

SEQ ID NO: 4103 - DNA, 1307 bp, Zea mays
  misc_feature (1)..(213): n is a, c, g, or t
  Probeset Number=SeqID_18506
nnnnnnnnnnnnnnnnnnnnnnnnnnnnnnnnnnnnnnnnnnnnnnnnnnnnnnnnnnnnnnnnnnnnnnnnnnnnnnnnnnnnnnnnnnnnnnnnnnnnnnnnnnnnnnnnnnnnnnnnnnnnnnnnnnnnnnnnnnnnnnnnnnnnnnnnnnnnnnnnnnnnnnnnnnnnnnnnnnnnnnnnnnnnnnnnnnnnnnnnnnnnnnnnnnnnngattctgagcggtgaccaagagcttgaagttctggctgaagcatcaggcttcgttggtgagggcacagaacaacccaagggaatatcgcagaattgatattaaatcattctgaactgaagctggcaggttcctgaaccaataatctggatgcagtctttagatagcaatatcccaaatgttcactagcacagttgcatccgaaggttgcttaccctacttacaactaaccactataatttgtagcgactgtacatgctctacgagaagagagaacaaaccccaagacagcgtgttgtataaccatttgtagatctagtttgtactgtaaatgtgtaatcctacgaaaacggtcttgttcattcgcttgtatacgatgtattgatgtttaatgatataaaaaaactctggtgggtccttatacccgcttatgtgaaaaaaaaaaaaaaaaaagaaaaaaaaaaaaaaaaaaaaaaaaaaaaaaaaaaaaaaaaaaaattataaaaaaaaaaggaatgaatctgtacatagtgtactcgtggcccctggaacttgtttccgtgatagtaatttgcgtgagtacagtgttttcatattgcaatataatttatagtttggtgtattctggtatatatctgttaaccgtttaaaattgtaaaccttattaatgacaataatatatataattcgtttggtagatggtaaaacttgggatcatttttattttataattaatatttattattattagaattgccctattaacataattaattgggatgtttttatataatttatgattttataaattcgtctgaataaggggtttttgtttttggtctagaggaggtttttgattttactttttattaggattataagtaaaatttcattttaatttttaaccataataatattctataatatgttctatatgagttatataactagttttcaaattacctgataatttctgtttttttaagattattatgtaaatagaattgttttctagtatttatatattatccatatatatcatatctctagaaaatttattgatatctatttcattattaatgagtatttattacca

SEQ ID NO: 4104 - DNA, 693 bp, Zea mays
  misc_feature (615)..(615): n is a, c, g, or t
  misc_feature (617)..(617): n is a, c, g, or t
  misc_feature (621)..(622): n is a, c, g, or t
  misc_feature (624)..(624): n is a, c, g, or t
  misc_feature (627)..(627): n is a, c, g, or t
  misc_feature (633)..(634): n is a, c, g, or t
  misc_feature (639)..(639): n is a, c, g, or t
  misc_feature (645)..(647): n is a, c, g, or t
  misc_feature (649)..(650): n is a, c, g, or t
  misc_feature (652)..(652): n is a, c, g, or t
  misc_feature (654)..(654): n is a, c, g, or t
  misc_feature (657)..(657): n is a, c, g, or t
  misc_feature (662)..(662): n is a, c, g, or t
  misc_feature (665)..(665): n is a, c, g, or t
  misc_feature (668)..(669): n is a, c, g, or t
  misc_feature (671)..(674): n is a, c, g, or t
  misc_feature (677)..(678): n is a, c, g, or t
  misc_feature (681)..(681): n is a, c, g, or t
  misc_feature (685)..(686): n is a, c, g, or t
  Peptide Sequence Number=SeqID_10236
  Probeset Number=SeqID_18507
aaagctggagctccccgcggtggcggccgctctagaactagtggatcccccgggctgcagggagagagagagagagagctcactagtcccccccccccccccccccctgagattagggtttagggtctcacctgcgtagtcggagcacctaagtcgcctgagagcaccaccgcgaggaggaacaccaagaggatgtcagaatggggattaatcgattagggttcgggatgcgagtaagggaagaggatgagcgaagagatgaggaggagaagagaatcgagagtatagatgtccaaataagccgttgccggtagccgtcggtgggaggcggctgaggagagatttcgtcggccgctaggagcccaggagctggagccaggatgggataaggcttaaggtttcaagcggtgaggaatgagcgagtgcggggatgcgtggagtcgggggtggtgcggcattattatgtagcaggggaactaggccaacgtcgtgtcatgcctccctaatttctatgttggactaggccaaggatggtgtgccgtccttagagcccaagcacggcacgaccactgtgtcaggttttgccccccaccccgacccccccttctctaatcncnatgnnantanctgtgnntttgntttttnnnannantnttnttccnctntannannnnctnnttntttnnattcttc

SEQ ID NO: 4105 - DNA, 252 bp, Zea mays
  Probeset Number=SeqID_18508
tgcagtccttagttcctcttgtgaagaggccagagcaccacagctctgagaaatgggatgccttgctgtaaagaaaccacatggacggagatggtcaggttgacgcgatgctcgacaagacgatctgtgcactgtcaaaagtgttcataggatcatcagggtccaccttcacgcaggacatcttccggctggggatcagtgtcgcgctgtgacgagtacctctgccagggtgagctgccagcagagccagat

SEQ ID NO: 4106 - DNA, 702 bp, Zea mays
  misc_feature (21)..(21): n is a, c, g, or t
  misc_feature (34)..(34): n is a, c, g, or t
  misc_feature (48)..(48): n is a, c, g, or t
  misc_feature (50)..(50): n is a, c, g, or t
  misc_feature (92)..(92): n is a, c, g, or t
  misc_feature (94)..(94): n is a, c, g, or t
  misc_feature (114)..(114): n is a, c, g, or t
  misc_feature (680)..(680): n is a, c, g, or t
  misc_feature (682)..(684): n is a, c, g, or t
  misc_feature (687)..(692): n is a, c, g, or t
  misc_feature (696)..(699): n is a, c, g, or t
  Peptide Sequence Number=SeqID_10237
  Probeset Number=SeqID_18509
attccatgtcaggtcggcggncaaagtttcccgnctcgcgcacgattngncagcccttggatcaaatggcggcggattccatccaaacaccncnggcaaggcaccgcggtgctncgaacttcggcgggctcactgcgaatgatgtgttttcggaagttctgggcctgccgacgatctgggtcccgcactcctatcccggctgttcccagcatgcgcccaatgagcacatcctgctgccattgaccgaagaggccttgacggtgatggccgggctgttctgggatctcggcgaattacccaggccgcttgcctgagcccacaagcctgagccggcgtccagccgaaagtcacattctaatccgggccgagatgtgcttgcatccggccgcatcatcctgaaaggggagaaaaagtgaaacatttccgtcacatcggcatcgcgctcgtcgcgacctttgccgtcagccaggccggcgccgaggaactgaccggcacgctgaaaaacatcaaggacaccggcgccatcacgctcggtttccgcgattcctcgatcccgttctcctatctcgacgacaaccagaagcccgtcgggttcgcgatggacatctgctacaagatcgtcgacgccgtgaagaaggagcttaagctcgacaagctcgagggggggcccggtacccaangnnnaannnnnncctnnnncct

SEQ ID NO: 4107 - DNA, 499 bp, Zea mays
  Peptide Sequence Number=SeqID_10238
  Probeset Number=SeqID_18510
aagcctcttgatgagcgggcgcttccacgttcacttcaggaatcttcggtctttgatatcagaaagggatttgaggacattttggatgcagcatatactgatgcccttaatcgttaagagatgttccaccgcagcatgctttctggcgttaaagccaagcttctgtagagaagagtacgacaaatggtccaccaatgcattctttcactcagcagggaggacaaacccttgatataagttgtttgcattatgacacttgtagccgttctgcaagtgggggcagtatcacctttggtctccctataattgcaaaaaaaaatggaaggtcaagcccagtgtcgtatctgtttcttcaaacgtagtgagtcgctcgatcctggcatcaagatcatgacctgtccgacctttgcccccagccagcgtgcctcgcactgacatgtacgcataaatgctgcttatgaacttctttatttgataaatgcatcctagataaattgaa

SEQ ID NO: 4108 - DNA, 468 bp, Zea mays
  Peptide Sequence Number=SeqID_10239
  Probeset Number=SeqID_18511
attcggctcgaggtgacattgccgactgttgctcgccccagctagacgccgtgtacggggaggagctggtccgtgtggaccgcaccgtggctggcgcccttggcccccgctcgcctgagtccccggagactctgtgcgtcaccaccaggagggtgatttggctcagacgaagcggagaagggcaagggctacgcggtggacttcctcgccatctcgcttcacgctgtgtcgcgcgacctcgaggcgtacccctcgacctgtatctacactcagattgaggcagccgttagtacagaagaggaggctggggaatcaaatcctgaagcaaatgaactagagctatctagagtatctgaaatgaggctcatactagcggaccccggtcaactggatgcacttgttgatgtcctcttctcaacaagcacatctggagcagtggtatccgcagtgtgccgaagcgtgtccgtg

SEQ ID NO: 4109 - DNA, 587 bp, Zea mays
  misc_feature (9)..(9): n is a, c, g, or t
  misc_feature (13)..(13): n is a, c, g, or t
  misc_feature (30)..(30): n is a, c, g, or t
  misc_feature (32)..(32): n is a, c, g, or t
  misc_feature (38)..(38): n is a, c, g, or t
  misc_feature (41)..(41): n is a, c, g, or t
  Peptide Sequence Number=SeqID_10240
  Probeset Number=SeqID_18512
aaaaaaaanaacnggggtttttttttaaanancccccnggnggggggggggggggcctggacacggctttctggaaactagagatataaacgggattcttaaaaaccagattgatagggtctcaatctcaacacatataaattagagaagattgagagagtttaaattcctagcaaatcaaaatccttccgattcccttccaattcataccgtcgtgcaaggtctaaaagagctaaggctgtccgcagtgaacgacttcaaatgcctactctaaaggtatagagtacgtatagagtgactgaacagctacagtgaagaacttcaaatcgcaccctacggtagagttcacgttctctcaccccagatgtagtgcagtacggagatcaactctatcttgcgtgtgcatgcgtggattggagggaggaaagagagagataggggtagcagttaaaaataataataataaatatggtagttggtatagggtagatatttagagtaaacatgactgcagagtattgttggatagagtagaaaacctcgctgaccaggatgaaatgggggggggggggggactagtgagctcc

SEQ ID NO: 4110 - DNA, 595 bp, Zea mays
  misc_feature (10)..(11): n is a, c, g, or t
  misc_feature (27)..(29): n is a, c, g, or t
  misc_feature (34)..(39): n is a, c, g, or t
  Probeset Number=SeqID_18513
aatgaatcgnngtacatttcaatttgnnnaggannnnnnccgacaaatccaagtggttattaacgaaataaacatctgatcatattcctatatgtaattatgtattacaaattacaataaaaaaagaaggaggatttgaaatgcgagatttaaaaaacatatctctccgtggcaccagtggtaagtactttatggttcggggctttagcaggtctcttgatagagatcaatcgttttttcccggatgcattgatattcccctttttttcattctaattattggcacgggaagggatgaaaaagattagagatccaatcaaatatcagtgattaatccctcccttctttatttctttttttagaattagaatacgttagaaaaaataaaaagagaaagaataaagtggatttggcctcagtgcaactcggaatctggcccaagcttcaatggagttgaattaacaattcaattccatttctattaataatatagtgagactagaaatggaaatggctaaggcaggggcaccagaatatcatacaagatacttaaatgaaaactgaaatactgtactgctgcgattcgaaatatagt

SEQ ID NO: 4111 - DNA, 424 bp, Zea mays
  Peptide Sequence Number=SeqID_10241
  Probeset Number=SeqID_18514
ccagtccctcctaccttctgtctgaaacccgccccccgcccgcgccctcccgtccctcctcccctcccgcgacccctccgcctcccccccctccggctcctgctctggtgaggaggcgtggcgagagactgcgactgcgcgatggaggcgtcgtcgtcggcgttggcgctcgtggccgccgtgctcctcctctcctccccgctcgctgcgtcagatttctgcgtgtgccgttcggaccagccgccggcgctgctccggccggccgtcggcggcgcggccggcccccagcgccgccccgtccgcacccccagccggccgcccgccgcgcgcccctcccccggcgccgccgccgcgcccgccccctcgccctcgccgccccctgctcctgggccgccaacagctactaccagaacaacaaggccag

SEQ ID NO: 4112 - DNA, 748 bp, Zea mays
  misc_feature (694)..(748): n is a, c, g, or t
  Probeset Number=SeqID_18515
gatccgcaatgcggtgtagagttccctcttcatctgctacggatgagattgttccgaagtagaatacggatccgggacggagggtgatcttgctatggaaggtgacggccattgagctagcttggatcgtcgacataccccctacctggcgcgccagctctttcaatattgttgaacttcctggtgatcataccagcaccctcgaaaaccgaaagtggtggtgtctagcagtgtgtgcgaacttctggaatgcggagtctgcttgagtgccatgtatactcctattcatcagtgctttaatggtcatacgttgtgttccagatgcaaaccaagggttcatcattgtccaacttgtagttgtaggcatgaattgggcaacataaggtgccttgctctcgaaaaggtggccacatctcttgaactttcatgctagtaccagtgctttgggtgcccagacctcatgcatttatccttactacaacaagctgaagcatgagtcacaatgccaatataggcttaatagttgtccatattctgaatctgagtgcatagttgttggtggcattccaggtaaatcacttgaaagatgaccacaaagttgacatgcacaacgacagtaccttcaaccatcgctatgtaaagccaaaccctcatgaagttgagaatgccacttggatgcttacggtacttcacnnnnnnnnnnnnnnnnnnnnnnnnnnnnnnnnnnnnnnnnnnnnnnnnnnnnnnn

SEQ ID NO: 4113 - DNA, 640 bp, Zea mays
  Peptide Sequence Number=SeqID_10242
  Probeset Number=SeqID_18516
acggggtgcgctcgttcaacaaccgcgggttgtttacgggggaccggcaaggccccctgcaaatgcctcaaaagcattacgggccggcttggcgggggggtcagcatggccaaacccgccaacattccccggcaagtggggggtttccgttggggtgcccatcagcccccccgttggttgccccaagatcaactgtttgatggaaccatagtggaggtagctccctcgttggatggcagggtacgtggccatcaacagcatccagttgtttttgtaacaaaaatgtcctaactacgtgtgtgtcatgcgtcagactggcccataataaaaaagtagttcatgccccccctagtgatccctttgtttagggtccccccgttcaaagttgttgttgtcttcgtgtccctctacgtgacatctgttagcccgttcgctaacaaaacagccccccaatgtccttgggtttgctttgctggctctctgttttcgtcttgtgttgcttttaatttggcccaggttttttaattataataaaaagaaaacttttttgtcccataaaaaaaaaaaaaaaaaaaaaaaaaaaaaaaagaaaaaaaaaaaaaaagaaaaaaaaaaagaacaccgcgatgttaccactgct

SEQ ID NO: 4114 - DNA, 821 bp, Zea mays
  misc_feature (1)..(220): n is a, c, g, or t
  misc_feature (821)..(821): n is a, c, g, or t
  Probeset Number=SeqID_18517
nnnnnnnnnnnnnnnnnnnnnnnnnnnnnnnnnnnnnnnnnnnnnnnnnnnnnnnnnnnnnnnnnnnnnnnnnnnnnnnnnnnnnnnnnnnnnnnnnnnnnnnnnnnnnnnnnnnnnnnnnnnnnnnnnnnnnnnnnnnnnnnnnnnnnnnnnnnnnnnnnnnnnnnnnnnnnnnnnnnnnnnnnnnnnnnnnnnnnnnnnnnnnnnnnnnnnnnnnnnnccggccgtacaatatatatagctgcaggtttcgcttgtgactactgctgactactactgagtacgtactgacaatggcgtgcttgcagaggcgagagggcgttctgcagcgaggagtgccgctgccgccatatcctggcagaggaggacgatgacgacactacctcggtcggggtcgtggcagcggcagcggcagcggactgctccacccagctccgccatcaggcccttgctgccagcttcacgttctgaggtggtggccggccgagcgggcgggcgggtagaccaccgatcgttgactggtacggtgggcctgccaccggcggtttcaagcaacgatgtccatcaccttgagtcagatagcttgtccaaacacaccaagggatgggtgtcacggactcatcatgcacggctgatataatcagattgggcttcaatttcaacgtttcaaaataatgggttaagtttcttgtttttttgttggaggtgattttttttttgcaaagtgtcttcttatacagtatattattctgtcgaaactacctttttgttttcagtgctctatgattatctcttgttaagtaagttggatagtaagtttn

SEQ ID NO: 4115 - DNA, 213 bp, Zea mays
  misc_feature (2)..(2): n is a, c, g, or t
  misc_feature (73)..(73): n is a, c, g, or t
  misc_feature (80)..(80): n is a, c, g, or t
  misc_feature (86)..(86): n is a, c, g, or t
  Peptide Sequence Number=SeqID_10243
  Probeset Number=SeqID_18518
anaaccctagctcgtgtggcggctgggcagcttactagcagacagtcatacggtggtgggtgacggccaacangagcttncgtcgnccccagcaaccttcctcgtcacccatcaggccatcatgtcggcgttgcgctacatcgccggttcgccaccatcacaggcacctggatggcttctggaagtggtagtgtttgtgcaagcacggacaca

SEQ ID NO: 4116 - DNA, 667 bp, Zea mays
  misc_feature (601)..(667): n is a, c, g, or t
  Probeset Number=SeqID_18519
aaagctggagctccccgcggtggcggccgctctagaactagtggatcccccgggctgcagggagagagagagagagagctcactagtcccccccccccccgggggagtttggtctcggaatcggaggctgccgcggcggcctcgacaagttcatgttgcgacatgtaaacgcctgcaccagcggagcttcgtcggggaccagcctccatcccggaggggtcttgcgcagcggccattgcagcggccgatagacgtcaaggacggtgagcagctgtttcctaacgtaaggtggaggaacctcaagaagaagcacgaacactcggcgaacaggtcaatgccgctgaggtatgagtaaaagaggagggtggtaagtacgtcgggaagggggcgaggttgcatgcaatgcctttatagcagggaccccagtgcgaagaagatatggatccttcgcttatccgcttagacctcttttcccaaggaggctggagcttcgtcgagctgctaaccccgcatggggttatctggggccccgcatgactctacccttgctctaagcttaatgttgcatgtcgcttctgaacctgactcaactgtgagcgtnnnnnnnnnnnnnnnnnnnnnnnnnnnnnnnnnnnnnnnnnnnnnnnnnnnnnnnnnnnnnnnnnnn

SEQ ID NO: 4117 - DNA, 568 bp, Zea mays
  Peptide Sequence Number=SeqID_10244
  Probeset Number=SeqID_18520
ttttttttttttttttgggtcggatcaacatcatgcaggccattaaatttatatgagaataatgcacatcataatgatttaaactgagccatactgcaaaaataaaagaggtgatccttgacattattcccagcaccccacttctgtacccagaatagcaccaagctgaaggaaaccatggtggtagcatgagcaaactgaaatcccaccaccttgcaatagcgtcatggaatgctctgaaggagggccatggcactggtcgcagtacagcactgatgtcctgtcgtggttgaagcagccatggtggttttagtgcccaactgaaatataagtttgcacaacttatacaactcaaaacaaaatttggccagggaataggacgactcgtaccactcgccagcaaaatctctagtgacatgggtggtgccgatggttgccaatcagcacacttcattggatactcccacaaaatgacctcattaaaagacaacttttctagattggaatttacagcagtacctttagcctggccacctatcagtactttacttacagcagaccccaccac

SEQ ID NO: 4118 - DNA, 696 bp, Zea mays
  misc_feature (2)..(2): n is a, c, g, or t
  misc_feature (513)..(513): n is a, c, g, or t
  Probeset Number=SeqID_18521
cnattgggtaccgggccccccctcgagagatccttccctcgttctccaaaagatcgcatgggagttctcactgaatctccacgaagagttgcctgaaagcgccgccacacagatgctcacacgcagagccgctgaccagcagctcgatttaactgatgcggcgaaggtggagagccttgccatcaacctactcatcgagggcggcgaaatagacacatttggaatgcttattgcccggagcaagcttcgctctgtcagcatcctttgcgaatatgtgtggttggctcaccagcttcaatgtggagagggccgaagggtgcccagaggcatgaatgaggtctgcaaggccatcgcttttggctgtgaaatgtcggcgcaagaattgatcgatatgcacaacaaaaatttgatgagagaggcgcattggactctctgtgatatgacgaaatatgacaagattgccatcttcaagaaccagactggagaggtaacctctcggacgttctttactgnatcctctccagcacctatggccctgcacatccaacccccctctctgtgacactacactcttactgccttaccttcccctggaagaaatgcttattggcctctttctcctacgtcgtcttattatacctccccccccttacccggggctggccccattttccgcctccaatggtcactcatcaa

SEQ ID NO: 4119 - DNA, 658 bp, Zea mays
  Peptide Sequence Number=SeqID_10245
  Probeset Number=SeqID_18522
agcaaaaagccattggagttcaccccagagaaccctatcatggataagctccgcaagcgtgccgaggttgacaagaatgacaagtcagtcaaggttctcgtgatgctgctgttcaagactgctttcttgacctcgggtttaagcttggatgaccccaacactttgggcaacgggatcccccgcatgttcaaactcggtttgagcatcaataaggacaagcttgttgaggcaaaggttaaaatgcctcagtttgaggacaacgttggtgaaagcaaaatggaggaggtcgattaagtgtcgcatcgcatgcttcccgtttattttatcccaagttaagctccctgtgaaagtttaattttcactattgttcgaggttttgggcaggttatgggttgtcctgcgggccaggcaaaaagttgggtttatttgttaggttccccctttttaacagttggtggttattattggtaagggtaaaaatgtagtccatgttttgcccattgggttgtgtgagattgggacagacagatcagggtcccccccctttttcttttgggggggcccatagtttgggaaggggtaaaaaaaaaagggttaggtttttaggcatgttgtagcaaacgggctaccccagaaaatgaaccgggtttctttcccc

SEQ ID NO: 4120 - DNA, 902 bp, Zea mays
  misc_feature (338)..(338): n is a, c, g, or t
  misc_feature (902)..(902): n is a, c, g, or t
  Peptide Sequence Number=SeqID_10246
  Probeset Number=SeqID_18523
ctatagaccacagccagtcagccacatcactagctatctgtgcagaggcaatggcgtccaaggttgagctggtggtggaggtcaagtccccggctgacaagctgtgggcggcgctgcgtgactccacggagctgttccccaagatcttccccgagcagtacaagagcatcgagaccgtcgaggtaaaaggacagcatggtgagggtcagcgtgctcaatgatgctctcaagtccatgtacaatgctgaaaagatagggaaacgtcaggtcatgatcaggccgtcatccaaggtgatcatcaagttcctgacggtcatgcagcgccatggctacattgncgagttcgagtacgtggatgaccacagagctgggaagatcgtggtggagctgaatggaagactgaataaatgtggtgttattagcccacgttttgatgtaggtgttaaggagatcgagggatggacggcgaggcttcttccatctcgccagtttggctacatcgtcctaacaacttctgctggaattatggcccatgaggaggccccccgtaaaaatgttggtggcaaggttttaggtttcttttattgaaaaggtgttttttttgagcgacacatgcttccaagaacttgtttgatcttttgaggtttgttaagactgggggtttgagcctttgtggtttgttaaaagtgggatgtgtcatgtatttcagaaattgaaatttttatgagatgtccctgcgagatccctgtttgtttcgattttcaaatattggttttgatttatgcgatacaaacaggtccttagtccaaaaaaaaaaaaaaaaaaaaaaaaaaaaaaaaaaaaaaagcaaaaaaaaaaaaaaaaaaaaaaaaaaaaaagtactctgcgttgttaccactgcn

SEQ ID NO: 4121 - DNA, 409 bp, Zea mays
  Peptide Sequence Number=SeqID_10247
  Probeset Number=SeqID_18524
agtcttgtcttttgagcggcgccatctaagaaatttgccgagtgttccaatcgcaatcttagagacaatgtcgacggtcggagaacttgcttgcagctacgctgttatgatccttgaggacgagggcatttccatcacgtctgacaagattgcgactttggtcaaagccgctggtgtcgagatcgagccgtactggccaatgctattcgccaagatggccgagaagcgtaacgtcactgacctcatcatgactgtcggtgctggtggcggtggaggtggtgcacctgttgctgctgctgcccccgctgctggtggaggagccgcagctgctgctcccgccaaggaagagaagaaggacgagccagcagaagagagcgatggagatcttggattcggcttgttcgactag

SEQ ID NO: 4122 - DNA, 853 bp, Zea mays
  misc_feature (1)..(225): n is a, c, g, or t
  misc_feature (826)..(853): n is a, c, g, or t
  Peptide Sequence Number=SeqID_10248
  Probeset Number=SeqID_18525
nnnnnnnnnnnnnnnnnnnnnnnnnnnnnnnnnnnnnnnnnnnnnnnnnnnnnnnnnnnnnnnnnnnnnnnnnnnnnnnnnnnnnnnnnnnnnnnnnnnnnnnnnnnnnnnnnnnnnnnnnnnnnnnnnnnnnnnnnnnnnnnnnnnnnnnnnnnnnnnnnnnnnnnnnnnnnnnnnnnnnnnnnnnnnnnnnnnnnnnnnnnnnnnnnnnnnnnnnnnnnnnnnccgaatcctccgcaggacggcggccgcgggctcggcggggctggcggctctagtgccgctaccccccgcggctgcggccgcgcggcctagctcctgcatcgccgtcgactcctcgtgcatggagctcgctgcggcaaggacaggggcttagacctttatgcacaggagaagtgcgcctgaagaaacgcaggttacattatgaattacaaacaagggcttgtaataatgtgattgctcaaaacttatattcaatctgaagttcacttagttatcagctgatgtacaacaggcacttgttgatcttgggatatgctgaacgaggatccttgtacttcttacaaaaaaacacatcaatttgaagagaagtgaggacactgagttaaaacgaagtcatttttttgttgcagatatttgtaacatgtactactttgatcgttgctctatgcatttgcccatggcttcataacggagcatgccaatttgttccttgtaacttgcattggttcttattttcagtttgatcatgatcatgacaatgaaaacaaaacttgatttacattaaaacacactttttttctatcaaaaaaaaaaaaaaaaaagnnnnnnnnnnnnnnnnnnnnnnnnnnnn

SEQ ID NO: 4123 - DNA, 233 bp, Zea mays
  Probeset Number=SeqID_18526
ctgcaggtatccatcatattgccgaccaaatatatggccaaacgataatcttcctgagcttgagatagcatttaaagatcttgggaagctgatgatggaagttggtttgatgttggctcatcattgtgatcgctatggtatgacccgtgtcgtggtgacacccaccgatctacaaatcgatgttggtgtgtgtcgtagtcatctgtttacccttgccacaaaccgacctgcag

SEQ ID NO: 4124 - DNA, 593 bp, Zea mays
  Peptide Sequence Number=SeqID_10249
  Probeset Number=SeqID_18527
gctggagccccccgcggtggcggccgctctagcaactagtggatcccccgggctgcagggagagagagagctcactagtcccccccccccccccagttctgttggtgccatgagaatgagttaatatttgttgtcattgcagtatgtgatccgtaatttaggctttgatattaccatctgtcattcaatgatgtctgaaatgttctatagttacagtgcataaaatgctagcccttttttagcataaaaatgcatctgatgctggagctacataaaattgcacttgcatattgtactgttttattgtttgttttcttcactaatattttttatttcctgaaggatggttttcatggaaggaaattcaccccatcgagaagcaaatgttggctacattttttgatgggaaatcagagagacggacacccgagatatatttgggaatcagaaatttaatcatgaacaagtttcactgtaatcccgaagtgcatctggagtccaaagatttgtgtgagttgtcagttggggagatggatgctcgtctagtaatcttggagttcttggcctactggggtttagttaatttccaccct

SEQ ID NO: 4125 - DNA, 261 bp, Zea mays
  Peptide Sequence Number=SeqID_10250
  Probeset Number=SeqID_18528
caatgtcctctacgaccgacaaggcatcggcaggagaatgcgcgggcgctttttctgatgagggtacttgaagggctgatggacaggggttttttttttttttttttgagatctgagattcctttaatcagaagcacgtgcgtcccacagtgtgctcttcaagccccaaaaaaaaaaaaaaaaaagcttatcgataccgtcgacctcgagggggggcccggtacccaattcgccctatagtgagtcgtattacgcgggctc

SEQ ID NO: 4126 - DNA, 507 bp, Zea mays
  Probeset Number=SeqID_18529
atgaaatgctgaagttttgtgcatcaaacaaaatatatccacaagatcaaggtcatcgaatactggacactagcagccaggctctctagaggcctgtaaatcgcgatgtgaaataccgctttgtaattgcagacataatctattacctttgctgcgtccagccactgaacgagacatatacatctgtatgttacttttcttgcacatagcatcttgttcaagtacgacaccgtgcacggccaatggaagcacagcgacatcaccctcaaagactccaagacgcttctcttcggccagacgccggtcaccgtctatgccatcaggaaccccgaggagatcccgtagggtgaggctggtgctgactatgtccaaaagtccaccggtgtcttcactgcctaggacatggctactgcacatctgaagggaggtgccaagaatgttggtatatctgccttaagcaaagatgcacccatgttagtagttcgagtcaatgaggacatttacacc

SEQ ID NO: 4127 - DNA, 201 bp, Zea mays
  Peptide Sequence Number=SeqID_10251
  Probeset Number=SeqID_18530
atgaaaagggagcaggaggagaccatcaccgtcccagacactgaggctactgagattggagagaccatgttgcagtatgggcttgaacctcaggagtatggccctgtcatcgacggtaggggaaaccctcaagcttggctacacttcttgttcaggtttgagctaggattggagaaaccagatcctaaaagggctctgcag

SEQ ID NO: 4128 - DNA, 1160 bp, Zea mays
  misc_feature (1)..(372): n is a, c, g, or t
  misc_feature (973)..(1160): n is a, c, g, or t
  Peptide Sequence Number=SeqID_10252
  Probeset Number=SeqID_18531
nnnnnnnnnnnnnnnnnnnnnnnnnnnnnnnnnnnnnnnnnnnnnnnnnnnnnnnnnnnnnnnnnnnnnnnnnnnnnnnnnnnnnnnnnnnnnnnnnnnnnnnnnnnnnnnnnnnnnnnnnnnnnnnnnnnnnnnnnnnnnnnnnnnnnnnnnnnnnnnnnnnnnnnnnnnnnnnnnnnnnnnnnnnnnnnnnnnnnnnnnnnnnnnnnnnnnnnnnnnnnnnnnnnnnnnnnnnnnnnnnnnnnnnnnnnnnnnnnnnnnnnnnnnnnnnnnnnnnnnnnnnnnnnnnnnnnnnnnnnnnnnnnnnnnnnnnnnnnnnnnnnnnnnnnnnnnnnnnnnnnnnnnnnnnnnnnnnnnnnnnnnnnnnnnnnncggcgaggacccgctgctgctgtggctgtccggcggccctggctgctccggcctctccggcctcgcctacgagatagggcccttccattttgatgctcgagggtacaggggcgggtttcctacccttctctaccgacccgagacgtggaccaaggtgagcaacatcatatttatggattctccggtggggactgggttctcgtacgccacgtcggatgaggggctcaagtccagtgacactcaggctgtcaggcagctagccatttttctcagaaagtggcttgaagagcatcccgggttcctgccgaacccgctctacatcgctggagattcatacggcggcatgatcattcctgctcttgcattagaaattgacagaagcatagaactcggtgaaaagatattttctggtctcaaggggtacattgctggcaacccgttgactggcggacagtttgatacagacagccaaattccatactttcatgccatgggacttgtatccgatgaactttacaagaatgctagggagaactgtggtggaaagtatagtgctccactgaatgctgtatgtgcagaggctgtccaagctatcaacaannnnnnnnnnnnnnnnnnnnnnnnnnnnnnnnnnnnnnnnnnnnnnnnnnnnnnnnnnnnnnnnnnnnnnnnnnnnnnnnnnnnnnnnnnnnnnnnnnnnnnnnnnnnnnnnnnnnnnnnnnnnnnnnnnnnnnnnnnnnnnnnnnnnnnnnnnnnnnnnnnnnnnnnnnnnnnnnnnnnnnnnnnnn

SEQ ID NO: 4129 - DNA, 250 bp, Zea mays
  Peptide Sequence Number=SeqID_10253
  Probeset Number=SeqID_18532
atcgagtgacgaggacaccccttaattatttatacacaacttgcatttgttctagacccttttttttatgctgcatctatgtcgttccatattcaacagaaagtcccaatattatttccgttgtatatggtaattaccattgatatcatgcatagacaaagtgtggtatttaagcaaatagcatttgtagtattgattggttctctttgttgtccctccatatacggtattacggcgtaactcctgctta

SEQ ID NO: 4130 - DNA, 505 bp, Zea mays
  Probeset Number=SeqID_18533
aaaagccccctccctgaagaaaaagagcccccccgcgcagcccccggtggtcctgggggtggccccgaaaaaaaagcccgcccccgattttgtcaagcccccggcgaagtccggaaagcccccccacccttggggctggggtaccacctcaaagtgccccccctgcaattgttgatcacatcgatcgccgcccatggatatgattatttcctatcaaccttggggtggtggttgaccaataataagcgaggccgagctggctcccaaacataggtattgtgtggtgtgtgtgaaaaaaaaaaaaaaccagagttcttcagtttgctatctctctctctgcatgtttggggccagtctttgtgctcatgtacgtgtgtccacatgcatgttggttgacccgattgggtctgctgtacccatatattaattggcccccggtgatatgatttgatcctatatatatatatataccctaaaaaaaaaaaaaaaaaacccacccccccac

SEQ ID NO: 4131 - DNA, 793 bp, Zea mays
  misc_feature (1)..(193): n is a, c, g, or t
  Peptide Sequence Number=SeqID_10254
  Probeset Number=SeqID_18534
nnnnnnnnnnnnnnnnnnnnnnnnnnnnnnnnnnnnnnnnnnnnnnnnnnnnnnnnnnnnnnnnnnnnnnnnnnnnnnnnnnnnnnnnnnnnnnnnnnnnnnnnnnnnnnnnnnnnnnnnnnnnnnnnnnnnnnnnnnnnnnnnnnnnnnnnnnnnnnnnnnnnnnnnnnnnnnnnnnnnnnnnnnnnnnnnntcgtagtactgactgccggtaagggcaatgtggtgaggctggtacccccgctcatcgtctcggaaaaggagctggagcatgccccgtatgtcataagggactgtctaccggcgcaccacgtcgttgctggtgcctaatgtataaggtggtccaataggtccggatatgaaatgtgattccaaattttggacgcgaataaatttcatgtcgggccaatgttgttgtgttcattgaaacaaactttttttttttttttggatcgtataattattacatgccaaaaaaaaaaaaaaaagggcggcccccgctttgtagaaccgcttccaaattttggaatcgaataatttcatgtcgggccaataatgttgttgtgttcattgaaacaaactctttttttggaatcgaataattattacatgtcaaaaaaaaaaaaacaaatttaaaaagtgggacaaaacacgcggcaaccgggggatccttttgcccgtgccgttcgttaatcccctccgccccccccttatacacatactactttaaatttaccttggccccgctccccccttggggtttattccggccccttggtgccccctttttgtt

SEQ ID NO: 4132 - DNA, 625 bp, Zea mays
  misc_feature (47)..(48): n is a, c, g, or t
  misc_feature (78)..(78): n is a, c, g, or t
  misc_feature (96)..(96): n is a, c, g, or t
  misc_feature (103)..(104): n is a, c, g, or t
  misc_feature (125)..(125): n is a, c, g, or t
  misc_feature (135)..(135): n is a, c, g, or t
  misc_feature (143)..(144): n is a, c, g, or t
  misc_feature (152)..(153): n is a, c, g, or t
  misc_feature (161)..(162): n is a, c, g, or t
  misc_feature (208)..(209): n is a, c, g, or t
  misc_feature (220)..(221): n is a, c, g, or t
  misc_feature (258)..(259): n is a, c, g, or t
  misc_feature (285)..(285): n is a, c, g, or t
  misc_feature (312)..(313): n is a, c, g, or t
  misc_feature (332)..(332): n is a, c, g, or t
  misc_feature (366)..(366): n is a, c, g, or t
  misc_feature (406)..(407): n is a, c, g, or t
  misc_feature (443)..(444): n is a, c, g, or t
  misc_feature (467)..(468): n is a, c, g, or t
  misc_feature (489)..(490): n is a, c, g, or t
  misc_feature (502)..(503): n is a, c, g, or t
  misc_feature (539)..(540): n is a, c, g, or t
  Peptide Sequence Number=SeqID_10255
  Probeset Number=SeqID_18535
cccggggcgaccacacgacgtgcggtgacaagcctgagtcaccacanntacacggtgtgcattagcacatcctgatgntcacactttagtggtatngctagcnntagtagaggggttgttaatanacgcaccatnaacgatanncgatgagnngccactcnncttgtttcgcattgctccatgattttcgtggtttgcgccggtgtgnngcgcatggcgnnccggggatgtgcgggatgagcgcctccgcggacaggnngtggcgctgaggccttggcgccatgncgtctcggcccgccgacgatcccgcanngtcgacgccgaccagcagnctgcttgcttccgccgtgcacccgccttcgggcnagagcccccatgctgccttttgtgcgccgtcgtttgctgnntccggcaccgcccagggcttgctgggaatcatagcnncggaggtcgccaaattaccatcnncccaagcgctttgcaacatgnngccgatcgcccnncgtcggctacccaagtgcggagattaccacgctgcnncctgactacatcgtcagcaagcccggccgtgtgcagtgttatgacggggctgatgaacgagccacgcaaggcgttgtgttggaaa

SEQ ID NO: 4133 - DNA, 1272 bp, Zea mays
  misc_feature (1)..(8): n is a, c, g, or t
  misc_feature (1160)..(1272): n is a, c, g, or t
  Probeset Number=SeqID_18536
nnnnnnnntggctctctgcttctgcacctgcgtgtgctagcgcgagcgcgtgcgtcccttccccggcacgagcggcgcacaccgtcacatccgcgctccgttcgccttccagaaaatttaaaccccagcggagccggccacggccagtcagccgccacacggtctccgacgcgctgcccgctcgcctgccaaacccccaccccctcggcggcgatgctgacacgtcgccgtagcaaccacccgggctgctccttccccctcccgttcctcgtctgcggcctgctcctcgctgcggccgtcgcattttccccagctgcggccgccgaagcagctgacggcggcgctgggcacgagggccgcgcggggaaaccggaggtagaggccgaggcggaggcttgccgtggcggaagccggcggcgaggtggtggctcagggcaatgccacggaggccaaggagggcagccttgccgacatgatcgaccgcgcgctggagaaggagttcccggagtccgagggcgagcagggcggtggagagaccgaccctggcagcttcaacaacacggtagctgagaagcagggagttcttgaaactgtagctagaagagtaacaaagaagaatgaaaccaaagataacaagtcatttccttttaaggaggttttcttggatcgaactgagcaagaggatgttcccacgttgatagatcggaaggataatgtttttatcatctcaaacccaaagtcaaaataccctgtgctgcagctggaccttaggttgatatcagatcttgttgttgttatcgtatccgctacatgtggtggaattgcctttgcttgccttgggcaaccggtgattacaggttatctacttgcatctataattgggccttagctttgtcaatgaaatggtgcaagttgaaatagcttggtgtgatatttctcttttgggcacgtgctcgggtgccgtttttgagagcagtgtgtctaggatgattggtggagtgagtggctgtcgaccccaaatgagggtctcgtgtaacataagaatgtatgatggttaattgattggatcagcatgataggatctaggcgtgatcgttatgccattgtatcctttcagcaaaactgtgtatcctcgcagcacgaaagtgtgtacaatagtnnnnnnnnnnnnnnnnnnnnnnnnnnnnnnnnnnnnnnnnnnnnnnnnnnnnnnnnnnnnnnnnnnnnnnnnnnnnnnnnnnnnnnnnnnnnnnnnnnnnnnnnnnnnnnnnn

SEQ ID NO: 4134 - DNA, 624 bp, Zea mays
  misc_feature (601)..(624): n is a, c, g, or t
  Peptide Sequence Number=SeqID_10256
  Probeset Number=SeqID_18537
tgttaaatatactttgcagcttcagctatgaaaaaaacctacaatctgaggcttaaaccctccagccctcgcgccgccgcaccctgcaccaaccagcgccctgccgccgccgccgccggagaaggagaggaagcagccgcagccatgggtcgcgtccgcaccaagaccgtgaagaagacctcccgccaggtcatcgagaagtactattctcggatgaccctcgacttccacaccaacaagaaggtgctagaggaggtctccatcctccagtcgaagcgcctccgcaacaaggtggccggcttcaccacccatctgatgcgccgcatccagcgcggccccgtgcgcggcatctccctcaagctgcaggaggaggagcgtgagcgccgcatggacttcgtgccggagaagtcggcgctcgaggtcgacgagatccgcgtcgacaaggagaccatggacatgctggcgttcctcggcatggccgacctccctggggtcgagcgcgcccccgaggtcacctcctccgccgccccctaccgtcagccgttcattctaaaccccgcgttggcaaccgcgcctaggttcctccgcatcgtcatcgtannnnnnnnnnnnnnnnnnnnnnnn

SEQ ID NO: 4135 - DNA, 776 bp, Zea mays
  Peptide Sequence Number=SeqID_10257
  Probeset Number=SeqID_18538
gggtacctcgaggccggccgggaaccctgtttcttttctcgtgttgacttccggtccctcattgagctaatctgttgcaccgcccgttgccatggtggaaggagacatgtcacatcaagattgtggccattgtccatgtcgactccggcaagtccaccaccaccggccagctcatctacaagcttggaggcatcgacaagcgtgtcatcgagaggtgcgagaaggaggcagggcgagatgaacaagaggtccttctagtacgactgggtgctctacaagctcgaggacgagcgcgagaggtgcatcagcattgacattgccctgtggaagcttgagaccaaccagcactactgcactgtgattgacgctcctgggcaccgtgacttcatcgagaacatgatcaccgtgacctcccaggctgattgtgtggcgctcatcatcgactccaccactggtggctttgaggccggtatcttcaaggacggtcagacccgtgagcacgcactccttggtttcactcttggtgagaggcagatgatctgctgctgcaacaagatggaggccaccaccgccaaggactcaaaggctcggtatgacgagatcgtgaaggaagtgtgttcctacctgaagaaggtgtggtaccagccggacaagatccccttcgtgcccatctctgggtttcgagggtgacaatatgatcgagaggtcgacgaacctggactggtacaagggtcccaccccttctcgaggcgctggaccagatcaacgagtccaag

SEQ ID NO: 4136 - DNA, 993 bp, Zea mays
  misc_feature (1)..(131): n is a, c, g, or t
  misc_feature (822)..(993): n is a, c, g, or t
  Peptide Sequence Number=SeqID_10258
  Probeset Number=SeqID_18539
nnnnnnnnnnnnnnnnnnnnnnnnnnnnnnnnnnnnnnnnnnnnnnnnnnnnnnnnnnnnnnnnnnnnnnnnnnnnnnnnnnnnnnnnnnnnnnnnnnnnnnnnnnnnnnnnnnnnnnnnnnnnnnnnnnnatcgtcctcattattattctcactggtcgatctgctaacacaaacagcagcagctcctcctcactagctagccttctctatttttgctactgcaagtgtccaagtctgcgacgacgtccgagatgtcgacggtgagccgtgcatcccttgaccagaagcttgccctcgccaagcgctgctcccgagaggcgactcttgccggagctaaggcggcagcagtggcgactatcgcctccgcgattcccaccctcgcgagcgtgcggatgctgccgtgggccaaggccaacatcaaccccaccggccaggcgctcatcgtctccacggtggccgggatggcctacttcatcgccgccgacaagaagatcctgtcgctggcgaggcgccactcgttcgaggaagctccggagcacctcaagaacacctccttccagggcaccggacgcccccacccggctttcttcaggccatgatgagatcagatatatataagacacatccgtcgacctcatcagtcatagagccggccagccagtcagtcagtcagcacaaacgcaccagagatgatgccatccatgtctgcatgcatgcatgcatatataaaaaataaactgctaggctgatgagtcatcgcgatcgcgtgctattattcatcctcgatgcatgtactagtgaattgtgctatttaaatatnnnnnnnnnnnnnnnnnnnnnnnnnnnnnnnnnnnnnnnnnnnnnnnnnnnnnnnnnnnnnnnnnnnnnnnnnnnnnnnnnnnnnnnnnnnnnnnnnnnnnnnnnnnnnnnnnnnnnnnnnnnnnnnnnnnnnnnnnnnnnnnnnnnnnnnnnnnnnnnnnnnnnnnnnnnn

SEQ ID NO: 4137 - DNA, 612 bp, Zea mays
  Peptide Sequence Number=SeqID_10259
  Probeset Number=SeqID_18540
cactggttggttagataaaaaaactcgacctgcggggggtaagaccgccctcacggtattatattaagaagaagacctcctcacgcagttcgagaaaaccctcgaacccctgccccacccatacacagcgtcaccgtgtcccatgtgagaacgaccttgaccagggccgtgtcttagacctttgctttggcgtgggacagactagaggattttttaaccacagcctgaaaattcgctcacacggggagtcaaatccaagacctgaagagtgctactcagaccacctaaccaactcggctagaggtcctttcgcagtttcgctggttggctaggtcaaagagttgataatttaatagcccaccccaacttgcttgggactaaattgttgatctagaaatttaaagatttaactagtgtagcttttgatctatttttatgatgggtatgaagttcccataacgccaccactaaatttcctagtctcatcccaggatctgcttggaaaaaaggaataattctttcttgtcaacaactccctgatataagcaattttatcattaaatatctgttgccttgattattatttggactagccagcggccgacagcaacg

SEQ ID NO: 4138 - DNA, 600 bp, Zea mays
  Peptide Sequence Number=SeqID_10260
  Probeset Number=SeqID_18541
cgtgcctgagggggtcaatgttgccgacgacccggtgcatatcatgttcgcctataccaacagcggtgctgactgctgagaatatgctgatgtccaatccaagggttctggtagtggccgagaaggccgcagaggtggccatagtggttagtggaggagcacttcggggttggagaagaaggtggttgctattgggccaatccagtggcagagattatcatcgacgagggcgcaagagtggttcattcatacgtgcaacatcaatcatttgctgcagcacatactaaatggacagtcgccaagcaggtatgcacaacaaactgatgcaggccaagaaaccaagtgtcttatcctatcaccaaaggcacttgttaatgtcaaaccaaaccttcagattattgcagatgatgtgaagtgtactcatggtgctgccatcagtggtgagcttgatccgaatgagctctttctacttccaggcaagaggcatcaacacggaaactgcaacagatgccctgttatacttctttggagcccatgtgataaaagcgcataccgtttaagcccataagtgagaaagcgttagcacagttcaaagagttg

SEQ ID NO: 4139 - DNA, 440 bp, Zea mays
  Peptide Sequence Number=SeqID_10261
  Probeset Number=SeqID_18542
tgtctgcaggaattcggtctcgctcccacccacgaggcccacgccgccaccgccaccaccaccagcctctcccctcgccacgcgttccctccccgtgcatgaaaccctaaacctataccccacccccctccccgagccatcccctccccccgcggcgatggccaaggcgctgctctcctcctccctcctccccgcgctgccccgcgctgccggtggcagccggagcgctgccgcgaggccgctgctgctcccgccgctccggctgcggcgcggccggcgcgccgcctccgcgtgcgcgccgagggcgggcctgctgtcgggctcgactccgtcggcgggccccacctttaagccgcgcttgagcgcgcccaggcggggctatacacactcgctgacgcccgggtcgccgccgcgggcgcgggggccgacgcatgccaagc

SEQ ID NO: 4140 - DNA, 614 bp, Zea mays
  Probeset Number=SeqID_18543
atagtattctatcgcgcgaccctagacgaccatattgtcgccaagaagtccacagaagaagcctccccccaaaaaggctgagagcagcagcagtgcctctgaaaaggactccgagtccgaagaggaggttaagaaggtgcagccaaggaaggcgcctgctcccaccattgctacacaagagtctagcgatgatgacaccagcgatgaaacctctgaatctgacgaggaacctgcaaagaacgctgatgctaaagccttggctgcagttgcgaaaactggctcgaagacggtcaagcaacacagcggcagcgatgaggccagctctgaagatgagtcggttgacgacagcgctgctgaacctgcaaagaaggctgctgctaaacccttgggcgccgttgctaaaactgggtttgacgaagggcaagcgacgaaagcagcagcgatgggagcagcctctgatgatgagtcagacgatgatgtgaaccccgctgccccactaacgaaatcctctgcggctgtcgccccaacgaaaaggggacattcttctgagagtgactctgatgacgactcagatgaggaagtgcctccaaagtcaaaggctccagcagcaacta

SEQ ID NO: 4141 - DNA, 458 bp, Zea mays
  Peptide Sequence Number=SeqID_10262
  Probeset Number=SeqID_18544
actgacctcaaccttaaagcctctagccatggcggattcttcctcctccactcttctctcccatcctttactctccactatccactcctccaaaaskggctgcttctctagtttttctctcctcaccggacgcactaacctccccttctctttctccagcctctccctctctctcaacaccaaaccccaccttaagaagtcttcatgcgtctcctccgttgcacagacttcggattgggctcagcaagacggggaggaaagcggagacgtgagcgcttcggtcgccgtcgaggagagcgagcctgaagcgtccctctcggaagaggaaggtggaggtggcgatttcccggagccaccggaggaagctaagctcttcgtcggaaacttggcgtacgacgttgacagccaggccttggctatgctcttcgagcaagctggtactgttgaaatcgccgagg

SEQ ID NO: 4142 - DNA, 644 bp, Zea mays
  Peptide Sequence Number=SeqID_10263
  Probeset Number=SeqID_18545
gccgaataacgtagcacaaaatgagaaccattaactcaaatcaatgtgtcaaaattccacggggcattgtagcctctgttaagtcacgtatcgtgaccatcaaaggcccgcgtggtgtattgaagcgcaacttcaaacacttggcattggtaatccaaatggtttcaccacgtacactgaaggtcgaaaaatggtttggaaccaaaaaagaattggctgccgttcgaaccgtgtgctcacacatccaaaatatgattaaaggtgttacatatggattccaatacaaaatgcgtgctgtatatgcgcatttccccatcaactgcgttacatccgaaaacaacacagtcattgaaatccgtaatttcttgggtgaaaaatacattcgacgcgttcaaatggcaccaggcgtcaccgttgttaactcaacaaaacaaaaggatgaactgatcattgaaggcaatgatatcgaggctgtttcgggttcggctgcgctcatccaacattcaacaaccgtcaagaataaagatattcgtaaatttttggacggtttgtacgtgtccgaaaaaacaactgttgttcaaacggaataaattttaagttgattccaaataaaccagaatgtacattggacacagagaaaaaaa

SEQ ID NO: 4143 - DNA, 692 bp, Zea mays
  misc_feature (1)..(29): n is a, c, g, or t
  misc_feature (630)..(692): n is a, c, g, or t
  Peptide Sequence Number=SeqID_10264
  Probeset Number=SeqID_18546
nnnnnnnnnnnnnnnnnnnnnnnnnnnnnctatggtgttaatgccatggatgcttgtgtgtattggtggtttgctattctcacgtgtggtttccttgtggtgttgttctgaggtctacttaacacttttgtcgtggttgtatggtgttgggattcactaggaggtctacttaacacttttgtcgtggttgtatggtgttgggattcactaggaatgcgatcgtagcgggtcgggctcttcatcaccaagaggaacacaaacagagctcaagtttttttattttgctctgcattatctactgcttctccatttgataagtaaccgatcaattttttgaatatttcgaggagtatttcgagcacatcggaggtgtaggagttggtgaacacccatgatctggagatgttgcagttggaagggtccgggaagatttatgcacagggagatgattatcacgagtacttcaagcgctcatttgaggaagacatcgctgcgcaagtgcctcaaggagtggaatgcaattgatcgaaacatgatatatttgacatattcatgatggatttttgtatttgatgtgtcgctttttcatctatcaatgtaattcttggacataacattgcgcacagtacnnnnnnnnnnnnnnnnnnnnnnnnnnnnnnnnnnnnnnnnnnnnnnnnnnnnnnnnnnnnnnn

SEQ ID NO: 4144 - DNA, 964 bp, Zea mays
  misc_feature (1)..(207): n is a, c, g, or t
  misc_feature (808)..(964): n is a, c, g, or t
  Probeset Number=SeqID_18547
nnnnnnnnnnnnnnnnnnnnnnnnnnnnnnnnnnnnnnnnnnnnnnnnnnnnnnnnnnnnnnnnnnnnnnnnnnnnnnnnnnnnnnnnnnnnnnnnnnnnnnnnnnnnnnnnnnnnnnnnnnnnnnnnnnnnnnnnnnnnnnnnnnnnnnnnnnnnnnnnnnnnnnnnnnnnnnnnnnnnnnnnnnnnnnnnnnnnnnnnnnnnnnnctttgcgagggtagttgttaagttccctaggcgtcatgatagtcaacacttcatcctacaggatatctgttcgagctgcgacttctaagaaggtatgagtggtgagaagggcgaggctttggaccacggcgtttgggcgccgttgtcctagggttagggttgctggctggaaggggtgcggtatgaacagtacccacggtgaacagtagaggcaggaaagggggaaaattatgaactggtcttttgcgctttctttgctggagaggaacattagagcgatttccacactgatgggatgctattatgtgatttcatacgattcagaagcagtacaataactccccctcagagctgtcatactgctgcccctgcccctccagcgatgaatgctgatgcttgcagcatccattctaaggctttccaagattgactcaccaactatggcagtgagatcagcacgagccagttctacctatacatgctgaaccagtgcacgacgggtggtgcgtctgcctaagctgcctctggcgttattcatggattgtctttccgcgatgctatcttattaataacataccgtgaaacttttgtcttcacagannnnnnnnnnnnnnnnnnnnnnnnnnnnnnnnnnnnnnnnnnnnnnnnnnnnnnnnnnnnnnnnnnnnnnnnnnnnnnnnnnnnnnnnnnnnnnnnnnnnnnnnnnnnnnnnnnnnnnnnnnnnnnnnnnnnnnnnnnnnnnnnnnnnnnnnnnnnn

SEQ ID NO: 4145 - DNA, 473 bp, Zea mays
  Peptide Sequence Number=SeqID_10265
  Probeset Number=SeqID_18548
cagctgactgggggaggtcgctagcctaatcctcaaactcgtcgacgtcctggaactcctggagacctgcctcgacgccttctcctttacctgagcatagattgcaccaaaggcaaccttcaccaaacagatgctcagggtcttcaaccttgtagaactcgaagagctatatcacttggtcgccaacgcttgatcttcgattccttgaggcttggagatggatcgcattcttgggcggcgagacaaactcagcgtcgacgacgagggcggagtgcgaacgactgcacggttggacgacgcagtcagatggcgtgtgcgcggcggaggcaacacatgggatcgactcctgtgggttggcactctagcggatggcggggccctaggcgtgctcctgcgattggcgagcagctggagcgaggcgtggtcaattttggggagtgggagaggtgaagacgtgcatggagatgagggtc

SEQ ID NO: 4146 - DNA, 699 bp, Zea mays
  misc_feature (2)..(6): n is a, c, g, or t
  misc_feature (8)..(19): n is a, c, g, or t
  misc_feature (24)..(24): n is a, c, g, or t
  misc_feature (549)..(549): n is a, c, g, or t
  misc_feature (575)..(575): n is a, c, g, or t
  misc_feature (603)..(605): n is a, c, g, or t
  misc_feature (612)..(612): n is a, c, g, or t
  misc_feature (615)..(615): n is a, c, g, or t
  misc_feature (620)..(620): n is a, c, g, or t
  misc_feature (622)..(622): n is a, c, g, or t
  misc_feature (628)..(629): n is a, c, g, or t
  misc_feature (636)..(636): n is a, c, g, or t
  misc_feature (640)..(640): n is a, c, g, or t
  misc_feature (651)..(651): n is a, c, g, or t
  misc_feature (659)..(660): n is a, c, g, or t
  misc_feature (664)..(664): n is a, c, g, or t
  misc_feature (666)..(667): n is a, c, g, or t
  misc_feature (670)..(670): n is a, c, g, or t
  misc_feature (672)..(672): n is a, c, g, or t
  misc_feature (674)..(675): n is a, c, g, or t
  misc_feature (679)..(680): n is a, c, g, or t
  misc_feature (682)..(682): n is a, c, g, or t
  misc_feature (684)..(684): n is a, c, g, or t
  misc_feature (691)..(691): n is a, c, g, or t
  misc_feature (694)..(694): n is a, c, g, or t
  misc_feature (698)..(698): n is a, c, g, or t
  Probeset Number=SeqID_18549
gnnnnngnnnnnnnnnnnnccatngggtaccgggccccccctcgagagtacgcgctcgcagtcccgctacggcctgagccaggtgaccgtcatcttcaaggacggcacggatatctatttcgcacgccaactggtcaacgaacgaattcaacaggtcaaggaccagcttcccacaggcgtcgaaaccgggatggggccgatctcgaccggtcttggagagatctatctgttcacggtggaagccaagcccggcgcgcgcaaggccgggggcggagagtataccccgagcgacctgaggaccatccaggactggatcatcaaaccgcaattgcgcaacgtgccgggcgtcatcgaagtcaacaccatcggtggtttcgaacggcagttccaggtgctgccggatccggcgcagttgatggcctacaagctcaactttcgtgacgtaatgacggcgctggccgcgaacaacgccaacgtcggcgccggctacatcgaacgcaacggcgagcagtacctggtccggacgcccggtcaagtggctaacgtcangaaatcaaggagatcgtatcgggtcnatacggtgtgccatccaatctccacgtnnnggaagtnccnaaggnangatctnngacggcncggnaccttaacggnaggaaacnngctngnnccncntnntgtnntngnaaaacanccncccng

SEQ ID NO: 4147 - DNA, 524 bp, Zea mays
  Peptide Sequence Number=SeqID_10266
  Probeset Number=SeqID_18550
ttccccaccggcccaccctcactcccttccactccacaccgcgccggcaccagacggcagacgctgagctcctctgccaatctccgaacccgagaaaaccgtgagaatcccaagtgcccggccaacaactccgacctccgtgcaggcaatgccggtccaggatccctcctccttgccctccgctgcaggcggcggcgcgcgggccaagcgcacgtcgtcggcgccgatccggtcggctgactacgcgcacagccccacgcaccactgcgtcgcgctgcgggacgccacggggctgcagaccatcctcgcaggcctcccgccgctcgcgcacccgtcactcgtccttaccgcctccgacgccgcccgggaggcccgtctcgcgctctccgtcgccgccgcgctcgaccgccgcgacgtcccgggcggggacaccgcgctgcacctcgcggtccggcttcggctgccctccttggcttccgcactcgccgccgcgggggcggaccccacgctgcagaaccacgccg

SEQ ID NO: 4148 - DNA, 454 bp, Zea mays
  Peptide Sequence Number=SeqID_10267
  Probeset Number=SeqID_18551
tttttctctcacgcgcagctttcttcttcctctgttcctggcgcaggaaacttcctccctccctgtgctgttcacggcgagcagccagcagggagctcagctcctccacttcttcccctcggccagccatggcgctcggcacccttgtagcagggacaacgcccttcctccctccctttttctgtccatggcgagcaggagttttttttccctcccatggccgacgacttccatctccatcagccgccatggccgagctccctgggagcacgccggcgcccctccctgcgagctctctgctccatctcctttcccaaccatggcgcccctgatctcctcctggccgcgacctcctctgctccctgcgctcgacgcccctgcagcagggcgctccttcttcctcggcgtgctgaagctttccccatggcagcaagctcaagtttctcccatggcg

SEQ ID NO: 4149 - DNA, 709 bp, Zea mays
  Probeset Number=SeqID_18552
taccaggtggaaggtccgctcaggaggggagctcttccccatcctatacgctggccttgtggcatccggggtagcgtttgctttgcagatttggtgcatcgccaggggaggcccgcttttccccgccgttttccagccagtgcagaccgtggccgtccccgtcatggcttcccccatcctcggggaccagctttacccgggagggatcattggagctgtgctgatcgtcatcggcctttacttcgtgctgtggggcaaaagcccccaaaaaaagggccccaggaaccttttgcaggatcagctggcccagggagcaaacgttacccggcccctgctcggcggaaaagcttcggcgaaaaataaaaaaacagccccggccatgctggggtgatgatcgtttagtcgtctgtcaattggagcccagggtagtcctgttgcatttgggcccgtatgagtcgtgtgatttcccctgttccaatttggcaaccaaaaacaagtgtgcatgggttcccggtgtggaccagtgtgtacccatgctgctgtgagtctgtactctgttgctgtaatgttctgggcaagcgtaggtaaggtgtataactataaaatcccttcctcccaaaaaaaaaaaaaaaaaaaaaaaaaaaaaaaaaaaaaaaaaaaaaaaaaaaaaaaaaaaaaaaaaatccgaggggagggcccggtacccccg

SEQ ID NO: 4150 - DNA, 292 bp, Zea mays
  Peptide Sequence Number=SeqID_10268
  Probeset Number=SeqID_18553
gggaaaataaaagaaaatgggaagagggagagtggagttgaagaggatagagaacaagatcaataggcaagtgacgtttgcaaagagaaggaatggccttttgaagaaagcatacgagctttccgttctatgtgatgcagaggttgctctcatcatcttctctagtagaggaaaacagtacgagttttgcagtagttcgagcatgcttcggacactagacaggtaccagaagtgcaattacggagctccagagcccaatgtgccttcaagagaggccttagcagaacttaat

SEQ ID NO: 4151 - DNA, 846 bp, Zea mays
  misc_feature (1)..(246): n is a, c, g, or t
  Peptide Sequence Number=SeqID_10269
  Probeset Number=SeqID_18554
nnnnnnnnnnnnnnnnnnnnnnnnnnnnnnnnnnnnnnnnnnnnnnnnnnnnnnnnnnnnnnnnnnnnnnnnnnnnnnnnnnnnnnnnnnnnnnnnnnnnnnnnnnnnnnnnnnnnnnnnnnnnnnnnnnnnnnnnnnnnnnnnnnnnnnnnnnnnnnnnnnnnnnnnnnnnnnnnnnnnnnnnnnnnnnnnnnnnnnnnnnnnnnnnnnnnnnnnnnnnnnnnnnnnnnnnnnnnnnnnnnnnnntaacaatattaaacatgaaagattccaactataatatagctcaatgtcgacgttcctcacgtaaatctacaaggacagtgcggaataagagaggataaggcattgtgaacatgatctttgaagcttgccgcctatatagcagtcttccagaaaaccatataattgatgagggaggtagaagctacctttcacgacttcatgagatctggttttcattaactagtggctaatagactcttgtttctttataccctttatcgttaacagtgttagttttacttcttttcctgcactcaaccaccattaactctcatagtcggccatatggaacagcacaacgttgcactctaccgcgtgcgaagccatgcctcctgcggagacatgcttctcacggaccagaggcttgctccgcggtgagcctcgctccgcccgcggcgtgcggcgagggagcccgacgcaccgccgtcgcggggggtaggggtgggtgcgctgggggtgggtctccttacagagggcagaggtgttcgatgccgatgcgaattggtccggtcgtgtgaagttcgggcgcggccctgagcccgtgaccaggttcccggccgg

SEQ ID NO: 4152 - DNA, 458 bp, Zea mays
  Probeset Number=SeqID_18555
aatcctaaaccaaacaacagattctcataatcatcacctctttaaggaaggaagaaagatcaaagcttctataagtttttgaaaaagataacaagatgggtctcgtcagcttcttgattatggttgttctcgcagtaatgacatcacgtgtgaatggatacggtggcggttgggtaaacgcacacgccacattctacggcggtggtgatgcctccggcacaatgggaggtgcttgtgggtacggaaacctttatagccaagggtatggaaccaacacggcggcgctgagcacggctctgttcaacaacggattaagctgcggtgcttgcttcgagatacggtgccagaacgatggaaaatggtgtctccctggctcaatcgtcgtcacagcgactaacttttgcccgccgaacaacgctttaccgaacaacgcaggaggttggtgtaaccctcctcag

SEQ ID NO: 4153 - DNA, 837 bp, Zea mays
  Peptide Sequence Number=SeqID_10270
  Probeset Number=SeqID_18556
aaatccgcaccaccgctccgacgaacggaaccaacaaatccccaagccaatctcgtctccgatcgactccagctccccttcctccggtcctccccgccgccccaagatgcagatctttgtcaagaccctcactggcaagaccatcacccttgaggtcgagtcgtctgataccatcgacaatgtcaaggctaagatccaggacaaggagggcatccccccggaccagcagcgcctcatctttgctggcaagcagctggaggacggcaggacccttgctgactacaacatccagaaggagtccaccctccaccttgtcctccgtcttcgtggaggcatgcagatctttgtgaagaccctcactggcaagaccattacgcttgaggtggagtcatccgacaccatcgacaatgtgaaggcaaagatccaggacaaggagggcatccccccggaccagcagcgcctcatctttgctggcaagcagctggaggacggcaggacccttgctgactacaacatccagaaggagtccaccctccaccttgtcctccgtcttcgtggaggcatgcagatctttgtcaagaccctcactggcaagaccattacgcttgaggtggagtcatccgacaccatcgacaatgtgaaggcaaagatcccaggacaaggagggcattcccccggaccagcagcgtctcatcttcgctggcaagcagctggaggacggcaggacccttgctgactacaacatccagaaggagtccaccctccaccttgtgctgcgtcttcgaggaagcatgcagatctttgtgaagaccctcactggcaagacattacacttga

SEQ ID NO: 4154 - DNA, 695 bp, Zea mays
  misc_feature (4)..(17): n is a, c, g, or t
  misc_feature (19)..(19): n is a, c, g, or t
  misc_feature (21)..(27): n is a, c, g, or t
  misc_feature (29)..(43): n is a, c, g, or t
  misc_feature (45)..(45): n is a, c, g, or t
  misc_feature (48)..(50): n is a, c, g, or t
  misc_feature (53)..(55): n is a, c, g, or t
  misc_feature (57)..(57): n is a, c, g, or t
  misc_feature (59)..(64): n is a, c, g, or t
  misc_feature (66)..(66): n is a, c, g, or t
  misc_feature (68)..(69): n is a, c, g, or t
  misc_feature (74)..(75): n is a, c, g, or t
  misc_feature (77)..(79): n is a, c, g, or t
  misc_feature (82)..(82): n is a, c, g, or t
  misc_feature (84)..(84): n is a, c, g, or t
  misc_feature (86)..(86): n is a, c, g, or t
  misc_feature (88)..(88): n is a, c, g, or t
  misc_feature (93)..(95): n is a, c, g, or t
  misc_feature (98)..(98): n is a, c, g, or t
  misc_feature (102)..(102): n is a, c, g, or t
  misc_feature (107)..(107): n is a, c, g, or t
  misc_feature (111)..(112): n is a, c, g, or t
  misc_feature (114)..(114): n is a, c, g, or t
  misc_feature (121)..(121): n is a, c, g, or t
  misc_feature (133)..(133): n is a, c, g, or t
  misc_feature (137)..(137): n is a, c, g, or t
  misc_feature (141)..(141): n is a, c, g, or t
  misc_feature (149)..(149): n is a, c, g, or t
  misc_feature (676)..(687): n is a, c, g, or t
  misc_feature (689)..(689): n is a, c, g, or t
  misc_feature (691)..(693): n is a, c, g, or t
  Peptide Sequence Number=SeqID_10271
  Probeset Number=SeqID_18557
aagnnnnnnnnnnnnnncntnnnnnnnannnnnnnnnnnnnnncnttnnnagnnngngnnnnnntnannttttnncnnngcntntngncaacnnnaanatcngatcncatnnanaaggtgntgaagacctctngctntggncaagaagncagcaagatcatcacgctctccggcggcatgaagcgccgcgtgatgatcgcgaaagcgctctcgcacgagccccagatcctcttcctcgacgagccgaccgccggcgtcgacgttgagttgcgcaagggcatgtgggaggtggtgcggacgcttcagcagtccggcgtcaccattatcctcacgacgcactacatcgaggaagccgaggagatggccgaccgcatcggcgtcatcaacaagggcgagatcgtgctggtcgaggacaaggcgaccttgatgcagaagctcggcaagaagcggctgacgctgcatttgcagggcaaggtcacctcgctcccggagagcctcagccaataccagctcgacctctgcgacagcggcgcgacgctggtctacgattacgacaccaagggcgaacgcaccggcatcaccagcctgctcagcgacctccgcaacgccggcatccgcttcaacgatctcgacacgacccaatcgtcgctcgagggggggcccggtacccaatcgnnnnnnnnnnnncntnnnct

SEQ ID NO: 4155 - DNA, 563 bp, Zea mays
  Peptide Sequence Number=SeqID_10272
  Probeset Number=SeqID_18558
gccggccggccggggaacagttccacgccgccactccccccaacccgaccacgctgcgcctccgcttgacccccagccgagggaggaatgggtaagggtacgggcagcttcggcaagcgccggaacaagacgcacacgctctgcatccgctgcggccgccgcagcttccacctccagaagagtacctgctcctcctgcggttaccccgccgcccgcatccgcaagtataactggagtgtgaaggccatcaggcgcaagacaaccggtaccggaaggatgaggtacatgcgccacgtgcctcgccgtttcaagagcaacttcagagaagggactgaggctgctcccaagaagagtgctgccgctgccaactaagtctggatgttgctatcaagaatctgataagctagaacattggaacattttgcttgagttgtacttctgaactatttagactgtctccagcaacatcccctaaatttcgtcctctaaaggaatattccttgtcctttacaaaacactctaaaagatttcatcctctagaaaaaaaaaaaaaaaggccccta

SEQ ID NO: 4156 - DNA, 442 bp, Zea mays
  Peptide Sequence Number=SeqID_10273
  Probeset Number=SeqID_18559
cccccctaaggatgttttttgccccccccctgtttagacttttttggccccaattaaggaagggttttaaaaacgggaaggatctttttttgcctgtcccctctcccatggggggggaccaattttgcccccttaagaattttggccccaagtaacttccttggctttggagggggacccctcctttttttcccctttaatcggaaaaaaagtgtttcccccaaggtttttttccgagcccttcccctggctttaggtggctttttttaaagcgtcccaggggtttttgggtgtgggccccccccgccttacccttatctgggggtcccttctggcccccggttttttaggctttccggtgcccccccccttctaggtttaattacccataagttggtttggcccggcttaattgccccccaggccttaatttttttggttt

SEQ ID NO: 4157 - DNA, 275 bp, Zea mays
  Probeset Number=SeqID_18560
cggacgcatgcgcggacgcatgctcgtactcctgggccccaccacgctttattggcgacggcgttgccatcacgccgggtgagactacccgatcgatcgcccagctcgcctgcctgtgatcgacccggtcgctgcctccgatcctcttgctgcccagcaccctgcctacttcagccagctagccaggttgagaccgactagctcgatctagctgctgacgcgtggccatggagggcgaggacgaccgcccggagtggatgatggaagtgggcggc

SEQ ID NO: 4158 - DNA, 467 bp, Zea mays
  Peptide Sequence Number=SeqID_10274
  Probeset Number=SeqID_18561
cgcgtgggcggacgcgtgggcgggcgcgtgtttttcaaaaccctacccgcctgtcatgctgaaacttgactggttgaccgtctttccagctggggggtcatcccccggaggcccggcccccgccccgcctccagtactacatcaacgagtagggggacaaggtctacaccaccaagaaggagtcacctcttggggtgccgacgcagtctgctcacccagctcgcttctcaccagatgacaagtactctcgccagcgatacctgttgaagaagagatttggacttctgccaacgaaaccgcgacaaataaaaaagaccacagaatccaggaccgaagtactgaagcttcaagtcaactgtccaacctgcgatgttctttttgtgtcaatgcttgttggttggaatgtactatcttcgttctcgaatatttgtggtccacttgttcaattttgaactactcatttgtcc

SEQ ID NO: 4159 - DNA, 1690 bp, Zea mays
  misc_feature (1)..(10): n is a, c, g, or t
  Peptide Sequence Number=SeqID_10275
  Probeset Number=SeqID_18562
nnnnnnnnnncaggtcgcaacaaccccgacgagcaaacccacccatttgccaccaaccccgacgagcggcgatgaccggcacggtgtccaagctggcggcgccccgtccctccgcactgccgccctcgccttcgccccctccccgcgccgggtccgcgtctccgtcgccgggcgagccaggagccccatcattgcgatggcttcggccaaggaaggaaatggtgcaccgaccaagaggactgcgcttcatgatctttacgagctccagggcctgtccccgtggtacgacaacctatgccgccctgtcacagacttgctgcccattatcgccagcggcgtccgtggagtcaccagcaacccaacgattttccaaaaggccatttcatcgtccagcgcatatgatgatcagttcaagcagctcatttcggctggaaaggacgcggagagcgcttactgggaactcgttataaaggatatccaagatgcgtgcaaactttttgagcccatctacgatgagactgatggggctgatgggtatgtctccgtagaggtgtctcctaggttggcaaatgacactcaaggaactgttgaagcggcaaagtggttacacaaagtggtcaaccgccccaatgtctacataaagatcccagctactgcagaatgtgttccttccatccaggaagttatcgctaatggcattagcgtcaacgtcacgcttattttctcaattgcgagatatgaggctgtgattgatgcttacctcgatgggctagaggcttctggcttgagtgacttatcccgagttactagcgttgcatccttctttgtcagccgagtggacacccttattgacaaaatgcttgacaagattggaacacctgaggcccttgccttgagaggaaaggctgcagtagcgcaggccaaactagcaaatcggctctaccagaagaaattctctggcccaaggtgggaggcgttggccaagaaaggtgccaagaaacaaaggttgttgtgggcatccaccggtgtcaagaacccagcttatcctgacactctttatgtggacagtctcatcggacctgacacggtcaacacgatgcccgaccaagctttgcaagcattcatagaccacggcaccgtttcaaggacagttgatgcgaatgtgtctgaggcggaaggtgtatacagcgccttggagaagcttggcatcgactgggaagaggttggaaagcagcttgagctggaaggcgtggactccttcaagaagagctttgacagcctactcgtgagcctgcaggagaagggcaacagcctcaagatggcgagtgtgtaaagctgagaagattgtgtacctgcgagtgaacgattttactaaataaaatgctagcttgctggctctcctcttagtttttacgctgtaccttttgctctcagtttcctgaatcggctttgtatcccaggcttgccagaacgtcattgtgtagccactgttcatggcttgtaactgctatggggtatccgataaataattttgagcgagttatttcagtctgtatacgccgtgtttgtttttatggaattgtcatctgggaatgtacattttattttaccacaacattatatgtggctcatgaacctctgatgaggcctgtttgccctgactcttgaaatcgatgtttccatggtttgc

SEQ ID NO: 4160 - DNA, 1223 bp, Zea mays
  misc_feature (1133)..(1223): n is a, c, g, or t
  Peptide Sequence Number=SeqID_10276
  Probeset Number=SeqID_18563
gccggccgggtcgcgattgttttaaaattaaaatggcttgcccctgtaagaaagacgtttgccaatgctctggaactaaggactgtaactgtggtgaaaagtgctcttgtgaaagctgtggaaacaaacaaaagaatgcttgtgcttgtggagaatctagcaaagaatgcggttgtggtgacaagtgcagctgttagtcttgattaactagctttatatcctttctgacaaatatcaatctctaaaaaaattttttaataaagactcttgttcagtttgaaaaaaaaaaaaaaaaaaaaaaaaaaaaaaaaaaaaaaaaaaaaaaaaaaacgcgcgaccccaggccccaggacctcctgggcgcgccaacacttcccacgtccccgtggtcagcaccaccgaaagccccgggaaaccctaggcaccaggaccaggacggcgcgccgcgcagccatggcgacgacccggaccaagaagaacaaggccacgagcaggccgccgcgccgcgctgcccacctcggacggaggcgcccccggatccaccgccacggacgtccagcaagcggcgcggatcgctccgagaaacaataatgacaaggttcaggcaggaacggggactggatccaaggatgaaaagtccgatgaaaaggtccgcaaagaacaaggaaagagccgacgagtacatccagaaaagaaaaggcaagacgacaagtatcgcgtagggcacaactttgtgcgccagtatatttagaacttagcaaaagttgccgaaccggactctcgattgattcaagaacgaaaataatgcgtacaaaccataatgaaagttaagagattaattctggtaaaaatacaatcgctcaggagcaaccaaaaaaagtgttttctgtgctgaggcactttgatgttccaaggaagttgacacggatcatgtccggtatgtcttttgacgattgagtatatggcattgagaggaatttcctgtccccctatcatcctgatatctttgtccttctcattagaaaaggcaaaactctcacaccaattctagaggttctaaaaaagggtgctagtttcaggccccaagattcttctaaaactcaaagaattgagattagactgaagggcacagnnnnnnnnnnnnnnnnnnnnnnnnnnnnnnnnnnnnnnnnnnnnnnnnnnnnnnnnnnnnnnnnnnnnnnnnnnnnnnnnnnnnnnnnnnn

SEQ ID NO: 4161 - DNA, 773 bp, Zea mays
  misc_feature (2)..(4): n is a, c, g, or t
  misc_feature (6)..(6): n is a, c, g, or t
  misc_feature (562)..(562): n is a, c, g, or t
  misc_feature (624)..(624): n is a, c, g, or t
  misc_feature (630)..(630): n is a, c, g, or t
  misc_feature (638)..(638): n is a, c, g, or t
  misc_feature (652)..(653): n is a, c, g, or t
  misc_feature (661)..(662): n is a, c, g, or t
  misc_feature (673)..(673): n is a, c, g, or t
  misc_feature (686)..(686): n is a, c, g, or t
  misc_feature (705)..(705): n is a, c, g, or t
  misc_feature (733)..(733): n is a, c, g, or t
  misc_feature (736)..(736): n is a, c, g, or t
  misc_feature (743)..(743): n is a, c, g, or t
  misc_feature (760)..(760): n is a, c, g, or t
  misc_feature (769)..(769): n is a, c, g, or t
  misc_feature (772)..(772): n is a, c, g, or t
  Probeset Number=SeqID_18564
tnnncnttgggtaccgggcccccctcgagggacgcacgatccatcgcttcatccagtcgttcaagaccttcgcggcaagctcggccttcaacaccacgcagatattccggcagcgctacaagttcgaggatttgctcgccgcgttcctgcgcacgctgacgcgccatgccggcgaagggttcgatttgggcgccccgaccatcatggtcggccgcccggtgaaatttgccggcggcaatcccaatgacgagctcgcgatgcagcgctaccgggccgcgttcgagcggctcggcgccggccatgcgcgctatgtctacgagccggtcggcgcggcgttctccttcgcgcgcagcctcgatcacgatgcgaccgtgctggtcgccgatttcggcggcggcaccagcgacttctccgtgatgcgcttctcgcgccagggcggcgtgctgcgcgccgagccgctgggccattccggcatcggcatcgccggcgacacgttcgactaccgcatcgtcgaccacatcgtgtcgccgcggtcggaagggcaccaactaccgtcgttcgnaaggtgctgcaatcccaatactattattcaacctcgcccctgcacactcgcgatatgcgggnaacggnatttggcnattgacagtgggcnnccggatcnnccgggcgttanaattatacattgngaacacaattggtttgctnaacggccgtttcaaaaaggcgctttaanccnacgttantcctttcccaaaggttnttgggcccngtng

SEQ ID NO: 4162 - DNA, 434 bp, Zea mays
  Peptide Sequence Number=SeqID_10277
  Probeset Number=SeqID_18565
accctaagccccttcagccgccgccaccagggcggttcgcccctgccgccagtagctagagcgccaagccgctaccgaggtctcgcgccgccgccggggtctcgtgccgggccgccgcggcctcgcgtcgccgcctaagcagcgcccgcgccacgcattggagctcgtgcgcgagaagtcgtcaccgcctgatgccggccgtctgcgtcgggagcccacaccacgccttggagctcgtgcgcgaggagctgccaccgcttgaagccggacgtgcgcgaggcgccgtgggtcgagcccatgccgacgtgcgcgcccgcccacggccgtgggggccgcgccaaggggctcgccgatgtggccgcgggctgcgccgagcgcccgtttccgcaccgagggggggggcgaccacacccacgcagcggcgctctgtccgt

SEQ ID NO: 4163 - DNA, 544 bp, Zea mays
  Probeset Number=SeqID_18566
gagtgaaaaaaaagccaaaaaaggggggcagcattcaggggccaaaagcgctggcgtttgagggacctaaccggcagtttattgaggccccgaaaacgaacaactgggacaacgtttggggaaactgagatcatgcctatgggtgcaacgagtttaatcatataaaaaaagtgcaagggctattacctatgggagtttgcctccctttttattcctcaaaaaaaagatttcggccagataccccctttggtggcaacttaggggaagctgttaaaaaaaaactgctgggcctctcttgctttttgcaactttgcttttatggacctgcgagggccatggcccatgacagtggtaggtttttctttaatcccaactgtaaggtttggttaaaaacggtttcccagtgcccttatatatatggaactgcttgctgctgttgtgaaatcagtgtggggatcgaatgtttgtatatctccatctgggtaaaaagtgtcccccttccaaaaaaacaaaaaaaaaaaaaaaaaaaaaaaaaaaaaaatat

SEQ ID NO: 4164 - DNA, 484 bp, Zea mays
  misc_feature (464)..(464): n is a, c, g, or t
  misc_feature (467)..(468): n is a, c, g, or t
  misc_feature (475)..(476): n is a, c, g, or t
  misc_feature (481)..(481): n is a, c, g, or t
  Peptide Sequence Number=SeqID_10278
  Probeset Number=SeqID_18567
aacgcagccgccctcgaggcgacgatctcgccgccggttatccaacctccctgtacacatcaacccgcggaaaacagcatcctccggcacgagaagcgactcgccaccagcagagcagctctccagctatcacgaggtgtcgagatccattagatgattagatccggcgctatagacggactgaggaaaagagaagggcaaattagtcagccgtatgaagtttaaaagctacgcgcgctgtcagaagcctattagatgaaaacgaatccaatccggcgagtggtgcacggtggcaataccaatctggcgacgaccagctgcgggatacaaggaggcgaagtcgcgtgacgagatgatcataatcataaactagctgaatgcccgtgcgttgctacggagtgaacatctttctcttggagttctagcatcgcacaacaatcttatctctcttggcctcttgtccnccnntcccccnnttttnttc

SEQ ID NO: 4165 - DNA, 440 bp, Zea mays
  Probeset Number=SeqID_18568
gggatcaagattacaagaaagtaataaagattttggatttgggggtattggtttctttttaggatcaagattacaagaaaatggttaagatttgggttttgggtattgatttcttttgaggatcaagatttcaaaaacgttatcaagatttggtatttgggtattggtttcttcttagcatcaagattacaagaaaatgattaagatttgggttttgggtattggtttctttaaggatcaagatggcaatagagattacaagaaagtgatcaagatttgagatttgtttattggtttctttttaggatcaagattacaagaaagtgataaagatattggatttgggtattggtttctttttaggatcaagaatacaagaaaatgatcaagatatgggttttgagtattgatttcttttaaggatcaagatttcaataacg

SEQ ID NO: 4166 - DNA, 581 bp, Zea mays
  Peptide Sequence Number=SeqID_10279
  Probeset Number=SeqID_18569
atgcatctcatgaggtacgataattaatcaagtaagacgaagaaaaagagttaagtcgacaccaagcgcgagctaatccgcaggatgatgccgatgaacgaactggaagatagataatctgaacgagtgccaagccaatggatgctcgtcaagtggtcgcctaacaaacactaacctagtgttacccaggttatagttttgtgctgctgttgatggtgttaagtgccggtgggctcggccttcttatataagtataccccatctttatcttcttattgaggatggtcatttgagctagcatatatttcaaacttataattttgtaaccactccgatcatgtacattgtaaaacttgatgtaacatgtaaaatttggtaataagatttccgctgtaaaattgttggtgtgtgatttgtgtttacttaatcccgcggttctggttgtaagtggtttatccgatgtccttggggcaatcgaacggatcctgttaagttatctggtgcacatgcatggtcgtctgaggtctttgggacaaggacaggtgcatgcgggcccgataccttgggaggttctgccacaa

SEQ ID NO: 4167 - DNA, 704 bp, Zea mays
  misc_feature (601)..(704): n is a, c, g, or t
  Probeset Number=SeqID_18570
gtattcccttgtgatgagaaagtcccatgtcaataatgtgacttcttttgttgatgatcgtgctactttttaaaacatgtgcactgttttgcttattatcaaaatcctgctgagaatgctacgtcgaatactgtaggatacaggactctcttttacaatttgagtttttggcaggcgacaaacagatgggtctacgactacttccgcagttttctcctaaacacatttgctctgatgttgtttgtcaccataactggcgctgaaccgcgctggtggcaaggctggaaacaagggtgctgaagctgctcttacttccgtaagttacccttccagtcggaaatcctgatttcaaacaaacatagatgcattagcatgtgagaagcccaagttcccctgcagattgagatggcctctctgttccggcatcacttaggctgacactttgcatattctggtttctatacacgaggcaagacatcatttcttcctatcaagagtttcggctaatagagcttttctgccgtggttagtataatttattttcaattctgttggttcggtgctgatttgttgctttctttctatgagatttgaaaagctnnnnnnnnnnnnnnnnnnnnnnnnnnnnnnnnnnnnnnnnnnnnnnnnnnnnnnnnnnnnnnnnnnnnnnnnnnnnnnnnnnnnnnnnnnnnnnnnnnnnnnnn

SEQ ID NO: 4168 - DNA, 686 bp, Zea mays
  Peptide Sequence Number=SeqID_10280
  Probeset Number=SeqID_18571
cgcttatccgggtgcggacggggctggaggggcggttccaggagcccgggctcaagggcccgctgtgggaggaggtgagcgcgcgcatggcggtggcggtctacggtcgcagcgccgagcgctgcaaggagaagtgggagaacatcaacaagtacttgcgcaaggccaaggacaacatccagaagcgaccggcgcacgctttccgacgtgccgtttacttgcccgaggcaaagccgacgcaaaaatgggccaggcaaatcctgccaaacccggactgtgggacggggggatccaagtgggccaacccaggccggaagatggacaggcaaaccgcctctctctgttgggcccttatgccaacaacgctcccgtgaacgggggggggggcggtgactcccccaaaaaagggagcggtcccgccccaaatagtagtaatacagccccagaacccgaggggctggaggatgaaccctcgaacaaaccccaaaaagccagcggcgccggggacccaaaaggccaaaaggccaccagcgccggggacccggcaagcgaagcttgatctgtttgccagtcgttgttgtgcctgtcaccctgcgcttttgcccgttttgtggcccgatgggtataacctgttgaattttgatgccccgaattttgcttggttttgccaccctgttgtgggtttt

SEQ ID NO: 4169 - DNA, 245 bp, Zea mays
  Peptide Sequence Number=SeqID_10281
  Probeset Number=SeqID_18572
ctctagtgtcgacctgcaggggcaaggcttgtcttgttcctgtgtttccttttctttttttaaccatgtggcttcattattattgtgaaatgcagctatgggatgccagctctggtcaaggattcacacagtttacagagcaccggaaaaggacttggtctgtgagtttttcagatgtcgaccctactaagttggcaagtggtagtgatgattgttgcgtgaaattatggagtattaatcaggca

SEQ ID NO: 4170 - DNA, 605 bp, Zea mays
  misc_feature (601)..(605): n is a, c, g, or t
  Peptide Sequence Number=SeqID_10282
  Probeset Number=SeqID_18573
gctccggccaaccccagaacgaccagtcaggaaacgcgatgtccagcgtggcctcactgccgcagtaccggaacaacggaggaggaggaggctggggctgggttcaaaggtgctggcgcaaacatcctccgcgctgtagctggtgctggtgtccttgctgggtacgacaagctccaggtggttgtcttcggcaagaagtacgggtctggtggtggctaaggatgtataatgatgatgacgacgaacaacaaacatgatgttttaggtgcctcctttaagtaaacatacgtacggaccctcgacaccattttaagttcgctctcgcagaggctggtgagtttgtagcgtggctgtgaccgcacctctttttatgtcagagattggaaataagtgacgttagaaattgctgtcttgctgcatcagttttttatactccgttttttgttttgcgcgtgcaaagggttgctcgaatgtatctatgtaggtttcggaatcccagcttactatgttttatgaaggtgtatgttctgtgacctttggcagcataacttcatcttttttgcgctacatgtttttaaggataatctggtattattatgtnnnnn

SEQ ID NO: 4171 - DNA, 962 bp, Zea mays
  Peptide Sequence Number=SeqID_10283
  Probeset Number=SeqID_18574
ctcgaggccggccggaagtcttcttcacagtgccgaccgcagtatgcatagattatacttctccgcgcgcagcacatgacattgacatacctccgcctcggcctctctgaactccaagagcccgtatcccccacaccgctatcctgctactagacacaatccatacaaattccaaatgacaagaaacaaaaccaaatatgacctagcacaatgcgcatgcacacctgacagaccaggcgtctctctacagaattactcgatgaacgagcagactcaaaaacccaagccctcggaagaccttactctcctgctcgaccacccatctgtctcatgttcttccgtcaactccagctcttccaatgacggggtaccccagatcatcgaggtcagcaaacagaccagccgagatatgaccatcatggaaaataattcatttaccccccacacacaagatcatgtagagccgctccatgatcaggaaatgcagaggcttagtggcatacaaatacgatctaaatgcgaacattctcatgaggctgatttgaacatctcgacgcagcaaatgaagctaatgccaaagcctgcggagacaacgtatgtggatgaacaaactgcaagagcttcacacaccctatcagagagcaacgcgacagctagctgtccagtgactgtacctgaaggaactcatcctgatcaaacaagtgatcaagtgggcaatcaatgcaagcatgaacccatgcatccatccaatgggttctgctgacccaaaatttggtagtagcgccacaccacagactttccctcataattatgcggcctttgctccaatgatgcagtgcaactgttaccaacattccttccgggagttgctcctctcatgcgagaggaccgcggcggacatcacctccgagtaccttttccccttcgtcgtaccgagccgaccttgggcaatttattcactt

SEQ ID NO: 4172 - DNA, 230 bp, Zea mays
  Peptide Sequence Number=SeqID_10284
  Probeset Number=SeqID_18575
gcgagtacaagcttttttttttttttttttttttccttgtacgactatcctttgctttatcagtttataaaaccctaaacccatattgcgcggaaccacagcggcatgcaaccatatcgggtcagattgctgcgaatgagagctggaaaaaacggccagaatggctctgctgctccgatcgtgtcagttggccagactcaaatccataggccatgaattagcagacgagg

SEQ ID NO: 4173 - DNA, 751 bp, Zea mays
  Probeset Number=SeqID_18576
ccggccgggctggcgttgagcccgatgacctgatgctcactgcttgtttggctgcttcccgcaagaagaagggtattgatgccatcgacaagggtttcctcaaggatctcaagttctacccccgcgccaagggtgttctgtccaagtacaaggttctcgacttccacccctttgaccccgactccaagaaggtccaggatgttgtcgagtcccctcaaggcgagcgtatcatctgtgtcaagggtgccccactttttgtttctcaagaccgtcgaggaggaccaccccatccctgaggaagtcgattctggcgtacaaaatctgtgtggctgagtttagctacccgtggctgtccgatctcttggtgttgctcgcaagcgaggtgagggtgcttgggagattctcggaatcatgccctgctctgacccccctcgtcacgacactgcccgaactatcaacgaagccaagcgccttggtctctccatcatagatgcttactggtgacgctgtcggtattgcccgtgagacttctcgtcagctcggcctcggtaccaacgtttacaacgctgagcgccttggccttggcggtggtggtgacatgcccggttctgaggtttacgatttccttgaggctgccgatgctttcgctgaggctttcccccagcacaactacaacctccttgagattctccagcagcgcggttaccttgttgccatgacttgccgatggtgtcaacgatgatccgtctct

SEQ ID NO: 4174 - DNA, 316 bp, Zea mays
  Peptide Sequence Number=SeqID_10285
  Probeset Number=SeqID_18577
tttgttctgaatgtgttctgtttgtttcttgcgtttctgtttatgggccttttttttttttttttttgagcctgtcagacaacctgtaggccaccccagccaggcaagcctgagcaaggaacgatcctctacagcaaccagagcaagcagtagagctgaactcctggccgttaatcacgctctggcccacaggtcatgactcatcaaccaggcttaagtgcttgcctccttattaatcaaggatgcaacggtacgatcctatagaacagatcctgttcaagtaaggacgtcccggccggcctcgaggtacccaatg

SEQ ID NO: 4175 - DNA, 854 bp, Zea mays
  misc_feature (1)..(252): n is a, c, g, or t
  misc_feature (853)..(854): n is a, c, g, or t
  Probeset Number=SeqID_18578
nnnnnnnnnnnnnnnnnnnnnnnnnnnnnnnnnnnnnnnnnnnnnnnnnnnnnnnnnnnnnnnnnnnnnnnnnnnnnnnnnnnnnnnnnnnnnnnnnnnnnnnnnnnnnnnnnnnnnnnnnnnnnnnnnnnnnnnnnnnnnnnnnnnnnnnnnnnnnnnnnnnnnnnnnnnnnnnnnnnnnnnnnnnnnnnnnnnnnnnnnnnnnnnnnnnnnnnnnnnnnnnnnnnnnnnnnnnnnnnnnnnnnnnnnnnnttcacacaggcacagttagccaggtgaggcccttgagtttcctttatctggacccgtccgcccacgcgtccgcgcacgcgtgggccccttcttctcgagctgtagtcctagtccactacaaaggtgttggagtcctggtattcttgctggtgtgcatcctctctttcagccaccaagtttgttgtctagtgcatcgcgtgtcatggtgaccacgcccactcgagctcaccctcaccatggccagcattcgtcggaggttgtctcggtcatgtggtgccagttccctactcctcgtagaactcccagcaggaatgaagattcaagctgaagtggtgactgaagagaaatctactccggtgattgaagaggaatctagacctcttcactgcaacaaaggtgatgaggagtattctagttcctgtggctggagggcgcatccagttctggaggaggactagctaggtttatgtatgcgctttggagggttcttaccttcctgctattgtaataagttatgcactttgagtatctcaagacttgtaatatttataatttttttatgttgtaaaacttgagttttggaaatataaagtatgtttgnn

SEQ ID NO: 4176 - DNA, 651 bp, Zea mays
  misc_feature (601)..(651): n is a, c, g, or t
  Peptide Sequence Number=SeqID_10286
  Probeset Number=SeqID_18579
ccggaggaggcgattcggaacgccctcgagggcattaacggcaaagagctggacggccgcaacatccccgtcaaagagggccagttccccggcggccgtggaggcggcggcggcggctacggtggtggccgtggaggcggcggttacggcggtggcgggccccgtgatggcggcgggggttacggcggtggcggcggcggttacggtggcggcggtggctacggtggtggtggtggcgggtacggcggtggcaaccgtgggggggggttcggcaactcccccgggaactggaggaacttaacggtggggcccgcccggccaagttatcctgtttgcccccgtgatgttttccctagtcccaaggggttatcttcgttcgtcccgtttggtgttgcccccctgggttttttattgcaaggtccctctgtgtcagttgttaatgctgggtttatccccgggtccagcagacccatgcctcaaccagcccgggttgtgggtcgatggaagctgttacccccgtcaggcttttttttaagttaatcctaagggaaaaatggtggtttttggtgctgccaaaaaaaaaaaaaaaaaaaaaaaaaannnnnnnnnnnnnnnnnnnnnnnnnnnnnnnnnnnnnnnnnnnnnnnnnnn

SEQ ID NO: 4177 - DNA, 526 bp, Zea mays
  Probeset Number=SeqID_18580
gtttcgcccctcagttggttgcctcgtcagtaacacccgcggtccactagctcgagcatgcatctaatagtgcacaacgtttattatggcgaattctccaagacgctgagctgagccagcagaccggaacagatgggccgcgacggcaagggcgccggggcggggctggttgaatcgcttcagcccctttagggcgccctgcaaccggaagcccaaacctttactcgttccttcagggcatttctgaaagcccaagtccgaacctttattcggcggcaactagtacgtacgtacacatcttaacaaaccgacgtgtacaaggacactttggcaagtccacaaccaagtatactagcaaggacttactggactggactggggacacacacacaacagcaatggcggggaggctggggccgagcccgaagaaggggatggggcaccggggggagaagcccaaggggccgtcgagcgacccgggctccgacctcgacctggggcaggtgggggccgggcctgagccccc

SEQ ID NO: 4178 - DNA, 623 bp, Zea mays
  misc_feature (1)..(15): n is a, c, g, or t
  misc_feature (616)..(623): n is a, c, g, or t
  Peptide Sequence Number=SeqID_10287
  Probeset Number=SeqID_18581
nnnnnnnnnnnnnnncctggtgttctagccaaatcttgcagtggtgtgagggattcatgtgtattgcaagccaaagctcctctcccgctgccactaagttggcactgtccagagctgtgtgcgctgtcttcctgtgtttgtgatgaccacagccaccaaattcaccacaccatagctagaacattctagggagttgctggcccgtatgaagcttgttccgtaatcatctcagaacgcgaagaagaagtggaagtcactgaagagaagacaccaccaccctcggattctcgggcaggaaactgcttctactttgatatttgtggatccgagcctgactcacctgtgaacgaagtcaagccccggtgaggaagcgacaaatttttgttgcttttgctccaaggtggtatcaaatgaagaaaaacaagagtgaagatgcgggaggacgtggtcctccatataggatctttttgttttaaagctatcgggaggagtttttgcctcccttgatatgtgtaataatactactcagcactcgtttatagctctggtctgtaataagtaacttaatcttactttctaaataaatgtaagttatgtaaaaaaaaaaaaaaaaaannnnnnnn

SEQ ID NO: 4179 - DNA, 567 bp, Zea mays
  Probeset Number=SeqID_18582
gcgtccggaaaagtcaggttatgcacaggccttcatccaaggtgatcacaaagttcatcccggtcatgcagccccatggaggctatgtggtgagttgtagtacctggcctcccacaaacatgggagtattgtggtgcatctggcagccatactggccgtggttggagtttttccgttataagggcatacccagtcaattgccaagctttggcaagctcatggacgattattccatctccccaagataccctggcatgctttgtgttccatatggaaaaataggtgagtgtcacctcatgacgtcccatttaccggaaccagggcgggggtatatgacaccacccaaatagcaattccgttctgaatcctgccctgtcagcaaagctatgtggtctaggaagtatcccaagagcccgaatttcccagggtattgcaatggcgtgctatgagtctagcaatcccagatggatggcatagtccagttcatgagtagttcaacgaacgcgtggagggcgcccgctatacaggatccgagcttaacgggcgcgtgcacgtcttacgtcatag

SEQ ID NO: 4180 - DNA, 2681 bp, Zea mays
  misc_feature (1)..(242): n is a, c, g, or t
  misc_feature (2270)..(2272): n is a, c, g, or t
  misc_feature (2275)..(2276): n is a, c, g, or t
  misc_feature (2656)..(2681): n is a, c, g, or t
  Peptide Sequence Number=SeqID_10288
  Probeset Number=SeqID_18583
nnnnnnnnnnnnnnnnnnnnnnnnnnnnnnnnnnnnnnnnnnnnnnnnnnnnnnnnnnnnnnnnnnnnnnnnnnnnnnnnnnnnnnnnnnnnnnnnnnnnnnnnnnnnnnnnnnnnnnnnnnnnnnnnnnnnnnnnnnnnnnnnnnnnnnnnnnnnnnnnnnnnnnnnnnnnnnnnnnnnnnnnnnnnnnnnnnnnnnnnnnnnnnnnnnnnnnnnnnnnnnnnnnnnnnnnnnnnnnnnnntgggattccccaaagcaactgtccgatcccatcgcgatggcaccgccgccgcaggagccaatccaccgccactgacgtaacccgatccatggaagcactaggatcttccgattacccccctcctcctcccaccttcctccgctccacccgccatatcctcgcctccctcgtcggcgcaaaccacacctccgcccgcttctgctcccgctagcaccaccaccagcaccggaccccttcccttcgcttcgcctccctcaccaggggtgacgggggcatggacccctcctccccgccgcggcgctgctccctcctcctccgcctgctcctcctcgccgtcgccgccctcgcgctccgtctcctctacggcgccttcctctccgtctccgccgggcccgcaggctggccgctctaccgccccgccgccaccgccacaaccaccacgcggaggaggacccacgtcgtccaggccgacgtcccgtcgccggaggtctggcgcacccgccactggcgcagggccgtcgactaccacgcggccatcctcgcgccgcacatcgccgccggcgccctcgcgcccgcgtcccgcgccgtctgcctgggcggcccgcaggaggcgctcgcgatgcgggagctcggcgtcgccaaagccgtcgccgtcggcaggaggcgtgcgccaccgctcgtcgtcgcggggggcgaccggagactgccgttcgactcgccgtccgccgacttcgtcttcgcggggcgcgccctcgacgccgccaagcgcccggccgacctcgccgccgaggccgcgcggatcctcaagcccgacggccatctcgtcgtgctcacgtccagcgccgccgacgcctacagcctccgctcgatccaggcgctcctaccgacgctccgcctcgtccaatctcgcgagatcgacgcccaggacgacggcgactcctccacactcagggaacttgtcttccagaagaatccccatcctacgggcacgggcgcgggcaattcatcagtgaacaactgctcggttggggatcacaggcgccagctcctcgcgcacgccgagccactcatccaggaggagccgctcaagccgtggatcacgctaaagagaaacatcaagaacatcaagtacctcccggcgctggccgatatcagcttcaagcgccggtacctgtatgtcgacgttggcgcgcgcagctacggctccagtatcggcagctggttccgcaagcagtaccctaagcagaaccacaccttccaggtgttcgccatcgaagctgatccggcgttccactctgagtacgcggcaaagaagggtgtcacgttgcttccttacgcagcctgggtcaagaacgagacactcagattcgagatcaatggcgatcctggaaaggaggacgaggccaaggccaatggccgtggcatggggcgcatccgtcctgctaccgggaagaagatgaacggcgaggtcaggagtgtccctgcgtttgactttgccgagtggttgaggcagaccgtgacggagcaggactacgtggtgatgaagatggatgtggaggggaccgagttcgatttgatcccgaggctgttcgacacgggcgcaatctgcttggtcgacgagcttttcctggagtgccattacaatcggtggcagaagtgctgccctggtgagcggtcgcccaagtatgagaacacctacgaggagtgcttggaccttttcagctcgctgcgggagagtggcgttctcgtgcatcagtggtggtaaaggcttcactggtaatttctccggtacagccgtttggaaatactatattgcagcgcagatagagtccaaagacaggtgacaaaaggttttgatttccacactgtattcatttttttatgctgtttagattgtgttggttaattttaaaggagtaaggtgaagtggagtgaacgaaatgtacttagggggtagttgcattcccagtaaaaaatcaatgtgccttgcaaacaattggaatgaatgaatgatacacacatgattcnnngtnnaaaaaaaaaaaaaaaaaaaaaaaaaaaaaaaaaaaaaaaaaaaaaaagaaaaaaaaaaaaaaaaaaaactcgggggggggcccggaacccaattcgccctatctgggggggggtcccgatcccctgtcccccctttaacaacgcctttactgataaaacccgggcgtttcccaacttaatggcctggaaaaacctccccctttccccatttggcggattagagaaaaggcccccttcgatcgccgttcaaaaagttaagaggcctgaccgacgacgttacatgaaggggcaatctttagggaaatgccaatagaagtcgaaaatcgggcatattcacccaaggtcttaaacgcaactccttttacccaaagacaaaccgnnnnnnnnnnnnnnnnnnnnnnnnnn

SEQ ID NO: 4181 - DNA, 661 bp, Zea mays
  misc_feature (2)..(21): n is a, c, g, or t
  misc_feature (23)..(30): n is a, c, g, or t
  misc_feature (32)..(152): n is a, c, g, or t
  misc_feature (154)..(185): n is a, c, g, or t
  misc_feature (187)..(191): n is a, c, g, or t
  misc_feature (193)..(207): n is a, c, g, or t
  misc_feature (210)..(213): n is a, c, g, or t
  misc_feature (215)..(219): n is a, c, g, or t
  misc_feature (221)..(223): n is a, c, g, or t
  misc_feature (225)..(229): n is a, c, g, or t
  misc_feature (231)..(236): n is a, c, g, or t
  misc_feature (239)..(241): n is a, c, g, or t
  misc_feature (243)..(243): n is a, c, g, or t
  misc_feature (245)..(276): n is a, c, g, or t
  misc_feature (278)..(303): n is a, c, g, or t
  misc_feature (306)..(311): n is a, c, g, or t
  misc_feature (313)..(329): n is a, c, g, or t
  misc_feature (331)..(334): n is a, c, g, or t
  misc_feature (336)..(343): n is a, c, g, or t
  misc_feature (345)..(347): n is a, c, g, or t
  misc_feature (349)..(358): n is a, c, g, or t
  misc_feature (360)..(362): n is a, c, g, or t
  misc_feature (364)..(366): n is a, c, g, or t
  misc_feature (368)..(371): n is a, c, g, or t
  misc_feature (659)..(659): n is a, c, g, or t
  Peptide Sequence Number=SeqID_10289
  Probeset Number=SeqID_18584
annnnnnnnnnnnnnnnnnnnannnnnnnnannnnnnnnnnnnnnnnnnnnnnnnnnnnnnnnnnnnnnnnnnnnnnnnnnnnnnnnnnnnnnnnnnnnnnnnnnnnnnnnnnnnnnnnnnnnnnnnnnnnnnnnnnnnnnnnnnnnnnnnncnnnnnnnnnnnnnnnnnnnnnnnnnnnnnnnnannnnnannnnnnnnnnnnnnncannnncnnnnnannnannnnnannnnnnatnnncnannnnnnnnnnnnnnnnnnnnnnnnnnnnnnnncnnnnnnnnnnnnnnnnnnnnnnnnnnaannnnnnannnnnnnnnnnnnnnnngnnnnannnnnnnnannncnnnnnnnnnncnnntnnngnnnntcgcgaacgcctgcgcctgctgttggccttggttggctccgcctccgtcgccgccgagcttgccggcatcgaatggcggcttgcacgagcgtggattcgagttgggctgcgtctcgcgatcgcctccgagcgagtcgctcgggaacgtccccggcgggcatcccgccacggtgggcggcgtcacgctcagcgtgtcgctcaaattgaagaacccgttgtgaaagaccgtcgccgtcgccgtggtgccctgaccgagatccacctcgagggggggcccggtacccaatngt

SEQ ID NO: 4182 - DNA, 770 bp, Zea mays
  misc_feature (1)..(1): n is a, c, g, or t
  misc_feature (4)..(7): n is a, c, g, or t
  misc_feature (10)..(10): n is a, c, g, or t
  misc_feature (14)..(14): n is a, c, g, or t
  misc_feature (16)..(17): n is a, c, g, or t
  misc_feature (23)..(23): n is a, c, g, or t
  misc_feature (33)..(34): n is a, c, g, or t
  misc_feature (38)..(38): n is a, c, g, or t
  misc_feature (41)..(41): n is a, c, g, or t
  misc_feature (44)..(44): n is a, c, g, or t
  misc_feature (66)..(66): n is a, c, g, or t
  misc_feature (72)..(72): n is a, c, g, or t
  misc_feature (85)..(85): n is a, c, g, or t
  misc_feature (87)..(87): n is a, c, g, or t
  misc_feature (91)..(92): n is a, c, g, or t
  misc_feature (97)..(98): n is a, c, g, or t
  misc_feature (100)..(100): n is a, c, g, or t
  misc_feature (103)..(103): n is a, c, g, or t
  misc_feature (107)..(107): n is a, c, g, or t
  misc_feature (109)..(109): n is a, c, g, or t
  misc_feature (112)..(113): n is a, c, g, or t
  misc_feature (118)..(121): n is a, c, g, or t
  misc_feature (124)..(124): n is a, c, g, or t
  misc_feature (131)..(131): n is a, c, g, or t
  misc_feature (133)..(134): n is a, c, g, or t
  misc_feature (137)..(137): n is a, c, g, or t
  misc_feature (141)..(141): n is a, c, g, or t
  misc_feature (144)..(144): n is a, c, g, or t
  misc_feature (146)..(146): n is a, c, g, or t
  misc_feature (149)..(149): n is a, c, g, or t
  misc_feature (155)..(155): n is a, c, g, or t
  misc_feature (160)..(160): n is a, c, g, or t
  misc_feature (165)..(165): n is a, c, g, or t
  misc_feature (170)..(170): n is a, c, g, or t
  misc_feature (174)..(174): n is a, c, g, or t
  misc_feature (179)..(179): n is a, c, g, or t
  misc_feature (182)..(182): n is a, c, g, or t
  misc_feature (186)..(186): n is a, c, g, or t
  misc_feature (188)..(188): n is a, c, g, or t
  misc_feature (192)..(192): n is a, c, g, or t
  misc_feature (194)..(195): n is a, c, g, or t
  misc_feature (197)..(197): n is a, c, g, or t
  misc_feature (203)..(203): n is a, c, g, or t
  misc_feature (205)..(205): n is a, c, g, or t
  misc_feature (209)..(209): n is a, c, g, or t
  misc_feature (211)..(211): n is a, c, g, or t
  misc_feature (216)..(217): n is a, c, g, or t
  misc_feature (221)..(221): n is a, c, g, or t
  misc_feature (226)..(226): n is a, c, g, or t
  misc_feature (231)..(231): n is a, c, g, or t
  misc_feature (235)..(235): n is a, c, g, or t
  misc_feature (240)..(241): n is a, c, g, or t
  misc_feature (243)..(243): n is a, c, g, or t
  misc_feature (252)..(252): n is a, c, g, or t
  misc_feature (259)..(259): n is a, c, g, or t
  misc_feature (261)..(261): n is a, c, g, or t
  misc_feature (263)..(263): n is a, c, g, or t
  misc_feature (267)..(267): n is a, c, g, or t
  misc_feature (270)..(270): n is a, c, g, or t
  misc_feature (275)..(275): n is a, c, g, or t
  misc_feature (289)..(289): n is a, c, g, or t
  misc_feature (294)..(294): n is a, c, g, or t
  misc_feature (301)..(301): n is a, c, g, or t
  misc_feature (306)..(306): n is a, c, g, or t
  misc_feature (317)..(317): n is a, c, g, or t
  misc_feature (327)..(327): n is a, c, g, or t
  misc_feature (335)..(335): n is a, c, g, or t
  misc_feature (408)..(408): n is a, c, g, or t
  misc_feature (767)..(767): n is a, c, g, or t
  misc_feature (769)..(770): n is a, c, g, or t
  Probeset Number=SeqID_18585
naannnnaanatanannatttanatatcaaatnnatanaanaancaattaaaaaaccattttctanataatnattcatataaatnancttnnatatnnanttnaatncnacnntaatnnnnaanagagatntnntcnttcncanancanaagatntaaanaatanttttnacgntaacnatnccgncntcananntnaaatantnaaantnagttnncaangcagnaagantcancgtcnntnacggagtgnctacaananantgtngcnacatngcgcaattatcgcncgtcnggcggtngtcgncaaatgccccntagaatcgcngccatgangcacttagacggcctcctgctcggcgcctcgctcgccaccctcgatgcgcccgccggctacggcgagatccgngacggcgcgctcggctggcgcgacggcgtgctgacgttcgtcggcccgcgcaccgcgctgcccggcgatccgcacgcgctggcgcgcgaggtgatcgaagccgacggctggatcacgcccggcctgatcgactgccacacccacctggtgttcgccggcgaccgcgcggcggagttcgagatgcgcctgcagggcgccagctacgaggtgatcgcgcgcgccggcggcggcatcctctcgaccgtgcgcgccacccgcgaggccgacgaggacgcgcttcttgcgcagtcgatcgcccgcgcgcggatgctggtggccgacggcgtcaccgcgctcgagggggggcccggtacccaatngnn

SEQ ID NO: 4183 - DNA, 471 bp, Zea mays
  Peptide Sequence Number=SeqID_10290
  Probeset Number=SeqID_18586
atggggtctcgcgttcgcatcgtcttcctcctcctcgccttcctcttcgcgcgcgccgccgagccgatcgccgccgccgcacccgccggcagcaggcaccttacgaaggacgagcggtggatgaaccagcgcctcgaccacttctcccccaccgaccaccggcaattcaagcagcgctacttcgagttcctcgactaccatcgggcccccggcggcccggtcttcctgcgcatctgcggcgagtccgcctgcgacggcatccccaacgattacctggccgtgagttgcaactcgcatagcactcacacacctggacacctgcttccccgtaccccgtctcgtgctgatgaaccgcctgctctcaagtactcgacagcaattcctgtgattttcctttctgctctcaagtaccatgtacatcctgatcagtgggttggcttctaccggcccctctggcttatctctagtgtc

SEQ ID NO: 4184 - DNA, 755 bp, Zea mays
  misc_feature (1)..(60): n is a, c, g, or t
  misc_feature (661)..(755): n is a, c, g, or t
  Peptide Sequence Number=SeqID_10291
  Probeset Number=SeqID_18587
nnnnnnnnnnnnnnnnnnnnnnnnnnnnnnnnnnnnnnnnnnnnnnnnnnnnnnnnnnnnttcagagctcagagcagaataaagagtcatgcaggttagatcatatgaatatgccagcccacctttttagatgagagcagagttattagatgccattagcttagcttcataggtagattctgtaggagcaggaatacatatagctctagataagcaatagggagattcctagtaattattagagatcctagcttagctatctatgagacatcaacgaaggcatgagtttagggatagtcctaggtagtgctaggatttaggtaggggaccttctatcatacagccttattttcatggtagatagccgaatacatgccaaggagtttgagatagagagagggatcctctatcttcctctaccactatcctgaatcactacatatctctttgagctctggctaccagttcatcagctatgtccataatcgaagactacctatatgtgctggcgatttagtctcttctgtctattcccacatggccacatggaaacgaaaaagatcttcatttgtgtaaataaatatctcactgcccatccatttggacacggttcggtggctcaaagaagaataatgtaatagtatagtggactctgattgannnnnnnnnnnnnnnnnnnnnnnnnnnnnnnnnnnnnnnnnnnnnnnnnnnnnnnnnnnnnnnnnnnnnnnnnnnnnnnnnnnnnnnnnnnnnnn

SEQ ID NO: 4185 - DNA, 443 bp, Zea mays
  Probeset Number=SeqID_18588
aacctatctttatgtgacattgtggttggggtggcattgtcagttgtcaactagctcttgtggtcttgtggggggcttgttcgctacgactttctgtggctttaatctgactgcggctttaatccggttgcggctacaacttctacagtattttatctctatagattgcagttgtagtactccgaacaactgcagctgctgcggttgtagagcagtcgaacaagcttgcccgctggcactaggtcagccatgacactacgagtcgttttttgggtcgtgttaggctgaaaatgacggggtcaatatgagatcatgcaaggccctatttggcaaggctctggcttcggcttccttgaaggagcagctcccataggagccagtgtatttttgtaaatcgtttggtaaaacggttccttctgaactaaaaaaaaaaaaaaaaaggc

SEQ ID NO: 4186 - DNA, 858 bp, Zea mays
  misc_feature (858)..(858): n is a, c, g, or t
  Peptide Sequence Number=SeqID_10292
  Probeset Number=SeqID_18589
aggctccaagtaatgaattattctatataggattattctcactatgtgccagcagtacggttacaaggcaagaaaaaaaggtgaagcaacaagctacaagcccgcatgccaaacatacgatcgcagaagcgtgcggtaatgcatgcttttacagaggtaaacctcatggaaagggggagaagttaggacgatttcactaatctaatgtgatccgccggatcttgcagaccagatgggtagtagggaggtcgagctggcttgcaccatcagatttgatcagatcattcacctgctcaccgatgccaaccccatccaggtcgtcgtcgacgcgatcatcaacagtggcccccgtgaggatgccacccgtattggttcggctggtgttgtgaggaggcatgccgtggatatctcacccctgaggagggtgaaccaggccatctacctcctcaccactggtgccagggagagtgctttccggaacatcaaaacaattgccgagtgccttgcagatgagctgatcaacgccgccaagggctcatccaacagttacgccatcaagaagaaggacgagattgagcgtgttgccaaggccaaccgttgaacagagcttgtatcctggtgcactctgcgctggaaacttttatgtcgctggcagtcgtatcggttcctattttaccaatgtttagagttttttgagacctatatgcggttttggttttcagtgcacaattaaaattactgagtatgagtattactgtagttgattgggaacagaaagtgcctggtttaccgaactccatttctcttgtcatttttctttattctgtagtctgtattatgtatgcgtatgagtattgn

SEQ ID NO: 4187 - DNA, 462 bp, Zea mays
  Peptide Sequence Number=SeqID_10293
  Probeset Number=SeqID_18590
acacaacatcttctttcctctgtactcaagacttcaccaaccttttagattcgatatctgcgaaattttcttcttcaatcgacgatgagcaccggcgcaggaagcggcacgaccaaaggcggtagaggaaagccaaaggccaccaagtccgtctctcgatcctcgaaggccggtcttcagttccccgtcgggagaatcgccagattcctcaaggcagggaaatacgccgagcgtgtcggcgccggagctccggtctatctctccgccgttctcgagtacctcgccgctgaggtgttggagcttgctggaaacgcggcgagggataacaagaagacgcgtatcgtgccgaggcacattcagctcgcggtgaggaacgataaggagctgagtaagcttctgggagctgtgacgattgcgaacggtggcgttttgcccaacattcattcgaaccttttgccttcc

SEQ ID NO: 4188 - DNA, 595 bp, Zea mays
  misc_feature (33)..(33): n is a, c, g, or t
  Peptide Sequence Number=SeqID_10294
  Probeset Number=SeqID_18591
gctaattaaggtttttagtctgtaaataatggnctgggtagtcgtgtgtgtgtgtgtgtgtcgtaactgtgaaagtccccgatggatgcataatatatatgtggtttttcccttaaaaaaaaaaaaaaaaaaaaaaaaaaaaaactcgagactagttctccctcctgagaccatgaccgtagagaagtttaaaaacatcatggctgttgacaagaaggttgctgatggtctgttgagactcatccttctgaaaggaccactagggtgctgtgtatttacgggggattatgaggggaatgcactcgatgaaacccttcacgcattctgcgacaactgacccatcccagttttggacttcacttctgtatgctagtactaggccatgtatatccatcagagaaaagattgcggtgtacattatcttcactgcctcattggtatatttttgtcagaaataatggtatattcgtttatgtgctggtttgagtttgtagagaaccatggctaatcaactgcggtgcggtcagttgttctctactgataataaagaagctctgtcaggtgacaaaaaaaaaaaaaagaaaaaaaaaaaata

SEQ ID NO: 4189 - DNA, 698 bp, Zea mays
  misc_feature (5)..(5): n is a, c, g, or t
  misc_feature (32)..(32): n is a, c, g, or t
  misc_feature (37)..(39): n is a, c, g, or t
  misc_feature (76)..(76): n is a, c, g, or t
  misc_feature (111)..(111): n is a, c, g, or t
  misc_feature (679)..(690): n is a, c, g, or t
  misc_feature (692)..(692): n is a, c, g, or t
  misc_feature (694)..(696): n is a, c, g, or t
  Peptide Sequence Number=SeqID_10295
  Probeset Number=SeqID_18592
ttgtncaaccccggaaacgttagttcccaaancggannngggttggcgtttccgctccgccatggcaagtcgatgnttgtctcgaaagtcgctttggcgtccgcctatccnccggagcacgccagcatgaagttgacggcggagggcgagctcttgcttcagcggtgccatcgtatcctgagcgaactcaaggccgccgagcatgagttgagcaccacactcgttatgcccaggggcaagttacgagtgagtgttccgatgatcggaaatctactcctgccacggattgcccgattcattgaattttatccaaatgtcgaagtcgagatcgatgtcaccgataggaaggtcgatctcatcgatgaaggctatgacgcggccattcggattggcgatacaatagacactcgaatcatgagcaggtcgctggggtgctttcgacaaatactggttgcttcaccgagctatgtggagcgctgtggccagcctgccaccgcacagcatctcctttcgcataccctccttctttatcgcttccccaacaccggaaaattcgagcaatggcccgtggcggactttcagaacgtcatcggctcgaccaatgtgtctaacgtcgtctgtaattcggtcgagatactcaaatatctcgccctcgagggggggcccggtacccaattgnnnnnnnnnnnncntnnnct

SEQ ID NO: 4190 - DNA, 457 bp, Zea mays
  misc_feature (8)..(8): n is a, c, g, or t
  Peptide Sequence Number=SeqID_10296
  Probeset Number=SeqID_18593
ggccgggnaccagtcgccattgccggcattgctcgcagcgctagcttcttgcgctcatcagtcgtctccgaccaagatcagcaaggacggcatggctctcgaagcagcgtacgactacctgcacgtcgccgtcgtccagtgcacgcccacacaaccaggaataaaactcgctgcctggctcctggtagccaaaggcgtcgccgcctgcacgaatggcccacttctcctggctcaccgagcttggcttcctattcctcaccttcaaatcaggcatggcgatttatcgggtcaaacgggacgcctgttccgtcgctttcggcggggatcttatctccaactagtggtcccggtccccctgctttgcgcactacgaggaggtggatccacaagctctcccaaaagagtcgcgaagatcaaggcttggtgattcgaaatccccccgacccaaccttaacta

SEQ ID NO: 4191 - DNA, 820 bp, Zea mays
  misc_feature (1)..(29): n is a, c, g, or t
  misc_feature (792)..(820): n is a, c, g, or t
  Probeset Number=SeqID_18594
nnnnnnnnnnnnnnnnnnnnnnnnnnnnngaacggcatacgtgcggttcggcagcagagcaagaagagaaccagtgtgctagtgctacagctacggcctagctacctactacggcgcagctagcagcagcggcggacatgagcgacgggcgcgaggagagcaccagcagcaggtggccagagctggccgccctgcgcgcgctggcgcgcgacgcggcggcccgggccgggagggagacggcggggtggcgcgggcgggagcgagaggaccaccgccacggccacggcaagacggccaaggtgatgcacctgctgctctggggacccaagtgaggtgaagtgaagcgctgctgctgctgcacctgcctctgcctcgtggcccgcgcgcggcgtcctcgcttccttctccgcccgtacctcgacagctatatcctagttcttgcacatgtgcgagtttacgacttcctcctggcctgtaccaaaaatattgcgctgttgctcctcgtgcttcttgcttgcaagttgcttcagccactccgcttttttttgctcgaacgatcgactgctcgtcgggtcgggccacggccggtcgtcagtttgggtgtgtccactccactgtaaagctccccctcttgtttttttgggtactccctgcatgccaaaccccccccccgtgtactaggtgtggttcggagcagcaggttgtattacttacccccccctctgtgatgtaagaacgcgtgctgaaattatcatgttatggcatatggattggataagaatgggaaaaaannnnnnnnnnnnnnnnnnnnnnnnnnnnn

SEQ ID NO: 4192 - DNA, 500 bp, Zea mays
  Peptide Sequence Number=SeqID_10297
  Probeset Number=SeqID_18595
atcgagaaaataacaaacatcacgttctccgttctctggcggcgttcttcttcttcttccccacgttatccttcttctttccctttcccacgctaccctctgctaacatctagtatcagtctaggcttcctggatctgtcgtgcgtcatcccgcagtgtccccgttcgtccactatgtagtcatccgacgccatcgttcgcaaggtgcttgacgcaatgcacctgatggaagtccgccttaccgagaagatgtcggtcgttgtgacatcgtcgagcgtcacgtggacacacgatgcaacgagctccacagccgcttcacagcgcgtggctacaccatccagtaggaagtggatgtggtggtctatgatgagttaagcgaccacgacggctatggcgcggcgcccttcgttatcaacggctctgacgagaagtccatctttgacgagggccccatattcgacgaggagcatggtaccttcagcgccgacaacatgcacttc

SEQ ID NO: 4193 - DNA, 264 bp, Zea mays
  Probeset Number=SeqID_18596
gtaagcccggtttagatctcaagatcaaagcaggactgctgagcggctgaatctcaacggagcaagttggctaacatacgcacggcagctacaaatacttataggaataaataaaggtggtcaactgttggtttcatggtgttggagtacatcatctgtactgctcttatcctcatatatgatatatgaactctagttcatcacataatataaatctgttagagagccctgattaaatttgattcgccccggcctttttttgcc

SEQ ID NO: 4194 - DNA, 561 bp, Zea mays
  Peptide Sequence Number=SeqID_10298
  Probeset Number=SeqID_18597
ggctagtgcacccccacatgtggcgctcgcatgcgctctcccctttaacttttgcgcgtaggaggctaaagagggtgccgctgcagcgtttttggccccctacctagctacagtggtagcggagggggcaccgctgaacaaattctgaggtccagcggtgagcgtagtctagcaggcagcctccagaagccccagcccctatgtccgccactccgctaggtctccagtttagtctccatctccgtccggtcgtccaccactcaactcccactcttgcggtccgcagtccgaccaacagcaaggtaattaagttgatgtttttttattttagtgatctactcgttgatgcatattcaagtaatgaaaacatattgtatgcatattctatgaccttactgaaattctctttggtacgttatacccaactgcaaatcagttttataagggtttttgtgatataaaggatttaattgatagatggtgttgcagtagtgactctactattaaacaattccatgagttgttggtggaaactcatgatgatgaacttaaacttgatcg

SEQ ID NO: 4195 - DNA, 962 bp, Zea mays
  misc_feature (601)..(962): n is a, c, g, or t
  Peptide Sequence Number=SeqID_10299
  Probeset Number=SeqID_18598
gtcattcagggtggaattggccctgccggcttatctgctgggaccttcatgttctggatcttacacaacaacgaccgcgatggcatagagtggtggttcaaggtcctggtcctggtccacggtatggacatgtgatggccttggttgggcagcgattcttattgacaattggtggcaatgatggaaaacggcccctggcagatgtatgggcccttgatactgcggctaagccatatgaatggagaaaacttgagccggaaggtgaaggaccaccaccatgcatgtatgcaactgctagtgcccgttctgatggtctccttttgctttgtggtggaagggatgccaatagtgtgcccctatcgagtgcatatgggcttgctaagcatagagatggtcgctgggagtgggcaatggcccctggtgtgtctccatcacccagatatcaacatgcagctgtttttgtcaatgcacggcttcatgtctcaccttttattattcttaatataagatatgcacttctcttgcgtgttcgagaaaaaaatattgcatgtttttttgtgtgagcatccttgtattggattacatgcagaaggatggactnnnnnnnnnnnnnnnnnnnnnnnnnnnnnnnnnnnnnnnnnnnnnnnnnnnnnnnnnnnnnnnnnnnnnnnnnnnnnnnnnnnnnnnnnnnnnnnnnnnnnnnnnnnnnnnnnnnnnnnnnnnnnnnnnnnnnnnnnnnnnnnnnnnnnnnnnnnnnnnnnnnnnnnnnnnnnnnnnnnnnnnnnnnnnnnnnnnnnnnnnnnnnnnnnnnnnnnnnnnnnnnnnnnnnnnnnnnnnnnnnnnnnnnnnnnnnnnnnnnnnnnnnnnnnnnnnnnnnnnnnnnnnnnnnnnnnnnnnnnnnnnnnnnnnnnnnnnnnnnnnnnnnnnnnnnnnnnnnnnnnnnnnnnnnnnnnnnnnnnnnn

SEQ ID NO: 4196 - DNA, 1213 bp, Zea mays
  misc_feature (1)..(345): n is a, c, g, or t
  misc_feature (1127)..(1213): n is a, c, g, or t
  Peptide Sequence Number=SeqID_10300
  Probeset Number=SeqID_18599
nnnnnnnnnnnnnnnnnnnnnnnnnnnnnnnnnnnnnnnnnnnnnnnnnnnnnnnnnnnnnnnnnnnnnnnnnnnnnnnnnnnnnnnnnnnnnnnnnnnnnnnnnnnnnnnnnnnnnnnnnnnnnnnnnnnnnnnnnnnnnnnnnnnnnnnnnnnnnnnnnnnnnnnnnnnnnnnnnnnnnnnnnnnnnnnnnnnnnnnnnnnnnnnnnnnnnnnnnnnnnnnnnnnnnnnnnnnnnnnnnnnnnnnnnnnnnnnnnnnnnnnnnnnnnnnnnnnnnnnnnnnnnnnnnnnnnnnnnnnnnnnnnnnnnnnnnnnnnnnnnnnnnnnnnnnnnnnnnnnnnnnnngttaacaaatgttgatgaggaaggccatctatatggggtttctggaggttctgggggctatgcagaaacaatctttcgctatgtagcacatgtaatttacaagagagaaatagagggtcctcttgacttcagaatcctccgaaattcagattttcgtgaaattacactggaggtggagggcaaacctgttttgaagtttgccctttgttatggattcaggaacctgcagaatgttgttaggaagattaagatgggaaaatgtgaataccccttcattgaagttatggcgtgcccttcaggttgtttgaacgggggaggtcaattaaagcctgttgaaggccaatttgccaaggaacttatccagcaattggagagtgtgttcccccaagatatattaatatctgatcctttccgtaaccctatcgcgaaaaaactatatgacgaatggctggggcaacctggttcaaagaatgcaaaaaagtatttgcccccagaatatcccccagtggtgaaaagtgtggcctcccagttacaaaactggtgaaaggtttcttgttgccctgggagttcctatgtttttcaaaagccaggagggccttgttaagcaaatattggtcatacaggaattgaaacttgtcccttttttgcattaaaacgaaaaagtttttgttagccctataggttttcagctgctttctagttaatgttggacgctgccaacgggaaacaacctttaaactgcaatgtgtaaaatgaacggagtaggtcttgacgcccttttnnnnnnnnnnnnnnnnnnnnnnnnnnnnnnnnnnnnnnnnnnnnnnnnnnnnnnnnnnnnnnnnnnnnnnnnnnnnnnnnnnnnnnn

SEQ ID NO: 4197 - DNA, 1121 bp, Zea mays
  Peptide Sequence Number=SeqID_10301
  Probeset Number=SeqID_18600
aggatataatgatcttcagacgaaggtcatgaagaacatacattcatcatcacaatgaatgttaataaaaggagaagcatatgaaatgtaagagataacatgagcaatcatatagcattgtcaattcatcctcattttattatcatggaaaagtagaaataatattgaatgacaaaagataccttcggcttgatagtaggtgaaagtacaagcgttacgcaaaagcgaatatatgtcagcgtaaacagtacgggggcactgttcatctatttataggcacaggacgcagcctgtgagaaattacattcatgccctttacatttattattgacttatatacaaatctatgaggattaaatagccttttcccctttaagtcggttccttttttccgccatttagccgaagctcccctgcgcgtagcttcggagcaactccgacctttgtcacgatcatgcttttagcccgagtccgaaggtacatgttcatatgtcacacttggaagattttgttaaatcacgtttttgaggaccttcggaggacgaaggcccccaacaatcatcatatacggaataaaatcatagtatcatcattgtatctcatcatgttcattgattaaagtaaagcactagcatagaactaatcataataatcaattcccaaagggtaaacaaggacaggaaaacagaatactagtcaatccttaggttgatcatattatgcgggacaatgaattataaagtaaatgggacataatgggtcagaagacacttgccttcaccaaacagatgatcagggtcttcaatctcatagaactcgaagaactagatcatttggtcgccgaagcttgaccataaattcctcgaagcccgagaacagatcacgttctgtgaggagtagataacgggcacaacatggccgaaacacctcgaagatccttggccacggtgaggtggaaggatggctgctttggtcaccagataatggagtgtcacctgattaactagagagagctaacttggtggctggggagaagagctttggcttgcaacacagaccacagagacaccagaggaacaactagattttcgattaggatgttctaggtaatggtctcgtgc

SEQ ID NO: 4198 - DNA, 1029 bp, Zea mays
  Probeset Number=SeqID_18601
ggcacggggtgatagaccttagttagaagtctcgcagatgctggagggtggagggggaagggcggagcgcggaagacacggaagtcccccgcgcgagataacagtgtttgttggacccatttatttacttcccaaaatggggcgaagggtaccgcttccgttagggaggggggagaaaaaaaacgggggagcgttccaacccgccggggggacagtctcatctttatgtaagctttaattgaggatgcgcgccccagggggtagcggagaaatatatctgcaaccggagagtccggtttttcctgttggaggccttctttgttttcggaagaagcccacaagaggagtcgggttggtgtattgccaaaaaatacaaaaaactgtagtatccaaattggcgttacaaagtagtcatgtgattgttttgtttatgtgggggtgggggtgaggaggttatgttttaaatacatgaatgattattttcttactagaaacaaggaatttaggtctagagtaaccctgtcactcttcacaagtcattccagactcaggtgttttcgagctccctgacacatggggcagtccagtagagttctggggcaggtgaggtggtccttaggaggtcccctggagaagtgctttcattccttcactcccactgtttctcaggctaggtctcttctgtgttgggcagacatcctgggtctcttctcatggaggccagttttagtctcagggctggaaatatactataaaagaggtatcagatttaagtgagctcgtttatgtgaaaagggaagagctgaggagaaaggaattcatctcaaatttttccctctagacagtttcatatcccacattgtagaagtcatgtcccgggcgggttcctcggccagaggagaaaagcttgttgggggccgccgaccgccggggggggcccgggccccgccatgccccctgatagggaactccaattaaccggcgcctcacttggcccctcccttctacaacctccttgccttgcgatac

SEQ ID NO: 4199 - DNA, 708 bp, Zea mays
  misc_feature (7)..(10): n is a, c, g, or t
  misc_feature (654)..(656): n is a, c, g, or t
  misc_feature (694)..(696): n is a, c, g, or t
  Peptide Sequence Number=SeqID_10302
  Probeset Number=SeqID_18602
gttactnnnnctgtgtgcttccgatgcctcctccaccatgggtgcctacaagtatgtttcggagctatggcgcaagaagcagtctgatgtcatgagattcctgcagcgtgtgaggtgctgggagtatcgtcagcaaccttctattgtccgtgtcacaaggcctacttttccagacaaggctcgtcgtttgggttataaggccaagcagggttatgtggtttaccgtgttcgtgttcgaaggggtggccgcaagagaccagttcccaaaggtattgtttatgggaagccaacaaaccagggtgttactcaattgaaatttcagcgtagcaagaggtcagttgctgaggagcgagctggacggaagctgggtggcctcagggttctcaattcttactgggtgaacgaggactcaacttacaaatattatgagatcattatggtggatgtggccccccgtgctattagaaatgatccaaggatcaattggctctgccatccagtccacaaacacagggaactgcgtggcctcacttctgctgggaaaagcaacaggggtttgcggggcagaggacatctgtaccacaaaaatcgtccatcccgcagggcaacctggaagagaaacaacaccctttctcttcgtcgctaccgctgatnnnactgctgttattttatgttgctttattatatgaatatnnngagtgcgttata

SEQ ID NO: 4200 - DNA, 891 bp, Zea mays
  misc_feature (3)..(3): n is a, c, g, or t
  misc_feature (441)..(441): n is a, c, g, or t
  misc_feature (879)..(879): n is a, c, g, or t
  misc_feature (886)..(887): n is a, c, g, or t
  Peptide Sequence Number=SeqID_10303
  Probeset Number=SeqID_18603
ttnaacaattgggtaccgggccccccctcgagaagtacgacgtatgctccgccgaggagtatctcgcgctcgtaacgtcgccggatcagttcaaatcgctcgtctcattcccgctcccgacggggacgctcgaagggtatttgtacggcgatacctacgaccttccgccgatgatgggcgcgcgcggcgtcgtcgagaagcagttgaaagcctttgaaacgaacgtctggaatggccttggccaacccaagaatcttgcacgcgcggtgatcatcggatcgatggttgaactcgaagtgaaattcgacgacgagcgcgcgacggtcgcgggcgtgatcgagaatcgactcttgatcgatatgccgctgcaaatcgacgcgagcatcaactacggccttcaggtgtggcgccccctgaaggtgagcgagtatcgctcggtcngactcgccctacaacctgtaccgccacaaggggctgccgccgacgccgatatgctcccctgagcgcgaagagcgtcgaggccgcgctgcacccgacggccacgacttcctatactacgtggcagatgcccgcggaaaaagcgtgttcgcggccgagtacgccgagcatttgaagaacgtgaagaagcgacgggacgcagtgaaggcccttaaggagcgccgctcgtgagttggcgttacgggacgatcgatcggacgaatgtcgcccgcatcctgcgcccgttcgcacccgtccggatcgaggaggcgatcgagcgtatcgatctcgacgcattgtgggcggcggggaagcggctcattttattggacgtcgataacaccctcgtgcgttggcacgcggaagagttctcgccggccgccaccgcggggagtccagtgntttcaannccat

SEQ ID NO: 4201 - DNA, 1248 bp, Zea mays
  misc_feature (424)..(424): n is a, c, g, or t
  Peptide Sequence Number=SeqID_10304
  Probeset Number=SeqID_18604
ctcgaggccggccgaggagagaaaagtagaggttgaagatgatcgtcaatctcttatcgatgcgcacaagctgaaaaaataatggaggctcgctctcactaagctccctgtttgctaaatcgcaactaatccgatgcaaaatatttgtagaagaagagagaatagagggttcaacgcagaggcagaacaacgcccgccccccctagcgccctccggcccgggctggctgctgcggctccggcggcgtgcaaggggaaacgaaagcggcacctctccgaggacgacgtctggctcctcctccacaggtaccatccagggacgatcctgacggcgctgcaggaggtggcgcagcacgcggatggccggcgcatagactgggagggcgggtggtgggcgaagtcggccccacggggatcacctccgncccgcgagtaccagatgctctggcgccacttcgcctatcatcacgacgtagacgagagcgtcgacgccgatgaccagcctctggacgatgacagtgacctagaactggagcttgaacccgatcccaacctgaccaaggaagctttatgtgaggcctctgcattagccaaggcgctaatatctggatcttcacaagcctctggtcatcgtattaacttggatactcatgttctgaacacccgaaatgaaaagatagtgcgggttccatctgagaaacagcttgctcaaagtcatcgtgtaacaaatgttgcaggtcctgtttccaattcaaagcagttagcccatataggaccctctgctggtcttttggatccaaatggaccttcaaaaaagaggaaaaagccaaaagcatggtataaagaggaatatgcagacgtgtcagctggtgtgcagaagtatggtgaaggaaattgggaggatattttgcataaatgtaacttcgatgaatacagagaacgccatgatcaggttatatcgagtagatgggctgctgaagcgtccaggaggatcaagcaagcctgctagcactaaacacgcctctgttggattagagtaaagatcagcagccctcaaggcactttcattggctgtcggacctatgcgtggatcatatgcgctgagatcaggagcttatccacaaagcattcagcataagtctacagtgtttgctcataagatgccagaactaagattttgcagtaaccctttcaccggcgccagcaggacagtcccagatggtatgcctctgcgtgtggcagctcaagg

SEQ ID NO: 4202 - DNA, 478 bp, Zea mays
  Peptide Sequence Number=SeqID_10305
  Probeset Number=SeqID_18605
attctcccacgcgcgcccaggcttccggctcccttggccgccctccttgcttctctctccctcgcggcttccatcccctgctctaaaccgcaagctgcgctccctctagctcgcccatggacgcacgctccatcttccccagcccctgctcatctcccccgcgcgcgcctgctccccatggccgccgcgccctgctacttctccatggccggatctccctcctctcccttccatggcgctcctcccctgctccttcggtgccgcgacttcttgctcggctccaagaactggcgcactcgtcatcggctcggcatctcctggagctcggccgcgacgcccggcgtcctgcctactcgtgctcacccctgtgtcaactccatcgtcgcactggtatcctgctcgcgagtttctcctgcgcactatggttctggccggtctcctcttccagctcgctcccttcaccaaccgtcccaactcc

SEQ ID NO: 4203 - DNA, 898 bp, Zea mays
  misc_feature (10)..(10): n is a, c, g, or t
  misc_feature (22)..(22): n is a, c, g, or t
  Probeset Number=SeqID_18606
aaggtccagnatttccgtgagnagcagaaggagtgatatggttcaaggataggctgtgcgttcccgacatcgaatcgatccaggaactgattctcaaggaagctcatgagacagcatattctatacaccctggttgcgagaaaatgtaccaagacctgaagaagagattctggtggtacggtatgaaaagagagatagcagagtatgtggccagatgcgacagctgtcagaggatcaaggcagaacatcagaggcccataggtttgttgcagccattgcagattccccagtggaaatgggatgagattgggatggactttatagtcggcctaccccgcactcgagctggttatgactccatctgggtagtagtggtccgtttaacataggcagcccatttcataccagttgttgggggccttcgtcttcggaaggtcctcaaaaacatgatttaacaatgtcttccaagtgtgacatatgaacaggtaccttcggactcgggttaaaagcatacacgatgtgaaaagcatggtcgtgatgaagattggtgttgctccgacgctacgcaggttgaagcttcggctcaatggcggaaagggaagcttcggctcaggagcagaaaacggaacctacctaaagaggaaaagaccgatcagtcctttatagtttgtgtcatgtttatagttatttgttgagggcatgaatgtaatttcgaccgggctgcatctcgtgcctataaatagatgaacagtaaccccgtactgttcacgctgacttgtattcacttgcacgtcacacatggatctttgccttctgtcaagccgaaggtataaatgtaattcaatattgtttatattcattcatgccaatatattaatgatgccatatgattattcat

SEQ ID NO: 4204 - DNA, 610 bp, Zea mays
  misc_feature (601)..(610): n is a, c, g, or t
  Peptide Sequence Number=SeqID_10306
  Probeset Number=SeqID_18607
tacgcttcctcgtacccaggagcctgtgggtggcggtccgctgcctgcccccccgcggggcgggcccccaagtctccggcccaccgcccattcccgaaattcccaagcacgcatcgagatctcttgaggcccctgctcctcgcctttgacgtgcacaacccccagtctcagatcacaccaccaccatggggagcataccggcggcggcggcggggccgggctcggtgcttggaggacctgccggaggacgcgctgcggggcgtcctcgtcctccttgcgccggacttatctacaaggaaccttctccaggggtcgagatgtggctctcgagagggtcaaccaactcgccgtgttgagcgaagcgtgctgtctgcgagatcgtctcctccatgagctgtagtgttattcatcactggaccggtgcgtagtgtttgagggagcttagtgagaaatgttctcttgctacgaacagacactttgacgaggtaagatctgtccagtcaatactgctggagatgtaggggtcgagaacgagcatggagaagctgcacacaggcatctcgaggtaccccggcgaccaccgctcctccctcgccgtcgnnnnnnnnnn

SEQ ID NO: 4205 - DNA, 1907 bp, Zea mays
  misc_feature (1)..(313): n is a, c, g, or t
  misc_feature (1880)..(1907): n is a, c, g, or t
  Peptide Sequence Number=SeqID_10307
  Probeset Number=SeqID_18608
nnnnnnnnnnnnnnnnnnnnnnnnnnnnnnnnnnnnnnnnnnnnnnnnnnnnnnnnnnnnnnnnnnnnnnnnnnnnnnnnnnnnnnnnnnnnnnnnnnnnnnnnnnnnnnnnnnnnnnnnnnnnnnnnnnnnnnnnnnnnnnnnnnnnnnnnnnnnnnnnnnnnnnnnnnnnnnnnnnnnnnnnnnnnnnnnnnnnnnnnnnnnnnnnnnnnnnnnnnnnnnnnnnnnnnnnnnnnnnnnnnnnnnnnnnnnnnnnnnnnnnnnnnnnnnnnnnnnnnnnnnnnnnnnnnnnnnnnnnnnnnnnnnnnnnnnnagatccatcccgttgtgtgctacaaccacttcatttctggtgctggtcatgctaagagggcagacatggccaaggcgatatatgaccgaatggaggcttcagggattgaaccatcaataacaagcaacgtgcttcttctcattagttatgtaaggagcaaaaatctcgggggtgcacttaatttttttaacctcgttcgtcggaagaaaacaccttgtgccaggttatataatgtatttatatctggcctatgtgaagttaggaagcctgagcaggcaatgatgttctttagggaagcaagggataatggtataatcccaagcatgtactgctacgagaatcttcttctcttgctgtgctctgttagcgattataccaatgctgtaaaggttgttgatgatttcagagaaacgggtcgccctgtttcagctttcttgactaatgttcttctgttgcacacattgatgggccacaagcttctgcaggcttttttacgttcaagagataaatcaaagcctctagaactgaaaggtgaagatatccaaggtcggaaggcaggaaggctcttgattggtgatctagttgcctcgtttgcaagtggtatcagaaacatgagtgacttagagcatttgggagaggagatggaaaagtattttcctgttgatatttacacttataacatgctgttacgagggttctctatggcaggaaggatggactctgcctgtaggttgtatgaaaggatatgcaggcaagggtatcaaccaaatcgatggacttttgatacaattgtgcatgggttctgcaagaatggtgacataattgaagctcagaggtggatggatgcattgtatcgaagtggtttctatcccacttggtacactatgagggtatacaacaatttgttgttgttagtacattactagaagatcagtttctttttatgattgacgatatcaatttcatattagacaggtggtatgctttatgccttgatcctattatgcagctgacacagcttagtggaggcaatctctcagacgatcaactatacgcctcggtgaaaagtaccccacgatcaaacactccattttaagcaagcgaatctcaactatcataacctgatgactgggatgcttctgggatatcaggttacgtgtgacatgaagtcattcctttgactttgatgtatctgtcggtggtacggaatttttgcgaaagggtcctctagtgtagtggcccagacgtcctagcagcagttatgggtctcgggttcgagcccccttgagagcgaacttgggccttagctaaaaaaaaatctcccgcgacggcggcggaggctcggggcggtgggtccgcgacgcgtccgccgcccgctgggccgttggagagtgggcaattgatcagcccgttagggatggagggccgagttcgagggttttctcggtcgggatcatgtactgggagaacggtctttccctcctctgccgaggttttttttagttctcatttttgctgtagaattatacattgtgcctgaagtttcaaggttcctggcattcaatannnnnnnnnnnnnnnnnnnnnnnnnnnn

SEQ ID NO: 4206 - DNA, 470 bp, Zea mays
  misc_feature (450)..(450): n is a, c, g, or t
  Peptide Sequence Number=SeqID_10308
  Probeset Number=SeqID_18609
aaaatgaatgtctgaaggcgaagtttcttccattcgaagaagatggctcttctctgtttcaatcctctcgctcccctctcttctcaaaggcttcaactttcgtccttcgcttcaccagttctcagccttaaacctaacaccgtcgagtctaagaacagagcctctctcggtgcttacaacttgagcagtggatatagaagagctgtgattgtgaaggcagctgcttctggagttgacggagctgagcccgagagcaatgaggaaccacctaagactgtcgtcgctgctgttccagttgataaactaccattggaatcgaaagaagctaaagagaagctactcctggaacagaggatgaagatgaagctagccaagaagattaggctacgcaggaaacgtctggttcgtaagcgtaagctgaggaagaagggtcgttggcctccttccaangatgaagaagctcaagaatg

SEQ ID NO: 4207 - DNA, 483 bp, Zea mays
  Peptide Sequence Number=SeqID_10309
  Probeset Number=SeqID_18610
ctatcagctcagggaggcaggggtggggataggtcaggaatacaagcaagccatggggacccctggcgacagctgggtgttcttcctgaaagaggcaaattggaaagaaaagaaggggaaagggtggggattgcgggaggtgatgagaaagggaagggaggagagtggggcagagaaggctggggatcttgggagaaatggatcaagaagaggaagaagaaaacttgtaaccccgagattttctgtatcctgagtcatttggaagaagaaagaagggggtgcagggtggggagactgaggcccaggggtatcccccttcacaggaggtgccctcagagggttcagtttccagccagctccccacctctcccccgccccgggcaaaactcaccttccagaaggttctgagagggtgagtggcggtcactggacactctctcccacagggcctgtgccctgattaggagaactgcaggttttgtt

SEQ ID NO: 4208 - DNA, 1119 bp, Zea mays
  misc_feature (1)..(518): n is a, c, g, or t
  misc_feature (1119)..(1119): n is a, c, g, or t
  Probeset Number=SeqID_18611
nnnnnnnnnnnnnnnnnnnnnnnnnnnnnnnnnnnnnnnnnnnnnnnnnnnnnnnnnnnnnnnnnnnnnnnnnnnnnnnnnnnnnnnnnnnnnnnnnnnnnnnnnnnnnnnnnnnnnnnnnnnnnnnnnnnnnnnnnnnnnnnnnnnnnnnnnnnnnnnnnnnnnnnnnnnnnnnnnnnnnnnnnnnnnnnnnnnnnnnnnnnnnnnnnnnnnnnnnnnnnnnnnnnnnnnnnnnnnnnnnnnnnnnnnnnnnnnnnnnnnnnnnnnnnnnnnnnnnnnnnnnnnnnnnnnnnnnnnnnnnnnnnnnnnnnnnnnnnnnnnnnnnnnnnnnnnnnnnnnnnnnnnnnnnnnnnnnnnnnnnnnnnnnnnnnnnnnnnnnnnnnnnnnnnnnnnnnnnnnnnnnnnnnnnnnnnnnnnnnnnnnnnnnnnnnnnnnnnnnnnnnnnnnnnnnnnnnnnnnnnnnnnnnnnnnnnnnnnnnnnnnnnnnnnnnnnnnnnnnnnnnnnnnnnnnnnnnnnnggttctgcggagttgtgctggtaactccatgtggcatctctaatgactttatagtgtttatctatgtatactcctgtttagtttcattgaggtatattgtatcaatcgttgacccacccaagtccttatttaatttggttcggtttttggtgccaggaaacatgaacaatcttgtaaattgagaactcattgtctctctaggtccgtcacccgtcatgctacacgttgtctgtaactgttcttgccttgatacatatttgttgcactaaaaaaaaaaaaaaagggatgcttgttgcttggttgacgaatgggttagtacatcatattcccactcctaacttttttgtttgatttgtggaatggaacggattgatccatcaccacatcattccttataagctaataattagtataaccgcatgccactaaaattcatgggatgaacacatcatggaccacctcgcctctgtccccctccccccgactttagtgtacataggaatttgtggcatccctttcttccccagtgagattgcttatcattagtcaaagtgtcaaactagatccccgcatatacatttagctgctgtggatgactgan

SEQ ID NO: 4209 - DNA, 472 bp, Zea mays
  Peptide Sequence Number=SeqID_10310
  Probeset Number=SeqID_18612
cggagcctgcaaaatgtcaaagctttcgctaccctactgtcctgtgctgcttatactcctataggggattgggttcctcgaggccggccgggctcgcccgccataagcaaatcacgccgaagtcgcgtccctgcatcctgacgaagttctcggcatcgtcgataggcgggagcaacattatcgcaccttgaaacgctcaccggtgtggggatggatcacgaatccacccctcatcgtggtcgggggttctgcgcgtctaccgccggtcaagaataggcaccgcaggatgaggcgcatgaaggatgtcgcgatgatgttcgtgagaggtctaggccgtcgtctcccggtcaactttggttgctagatcattgtcttcgtataatttaattatttaactattttgtacaaaactttgttatatattaatgatgtgacattcgttccgaaaaaaaaaaaaaaaaaatttgcggcc

SEQ ID NO: 4210 - DNA, 551 bp, Zea mays
  misc_feature (114)..(114): n is a, c, g, or t
  misc_feature (137)..(138): n is a, c, g, or t
  misc_feature (153)..(153): n is a, c, g, or t
  misc_feature (176)..(176): n is a, c, g, or t
  misc_feature (200)..(200): n is a, c, g, or t
  misc_feature (203)..(203): n is a, c, g, or t
  misc_feature (206)..(206): n is a, c, g, or t
  misc_feature (209)..(209): n is a, c, g, or t
  misc_feature (212)..(212): n is a, c, g, or t
  misc_feature (215)..(215): n is a, c, g, or t
  misc_feature (221)..(221): n is a, c, g, or t
  misc_feature (227)..(228): n is a, c, g, or t
  misc_feature (231)..(231): n is a, c, g, or t
  misc_feature (234)..(234): n is a, c, g, or t
  misc_feature (240)..(240): n is a, c, g, or t
  misc_feature (248)..(248): n is a, c, g, or t
  misc_feature (274)..(274): n is a, c, g, or t
  misc_feature (308)..(308): n is a, c, g, or t
  misc_feature (352)..(352): n is a, c, g, or t
  misc_feature (359)..(359): n is a, c, g, or t
  misc_feature (369)..(369): n is a, c, g, or t
  misc_feature (371)..(371): n is a, c, g, or t
  misc_feature (388)..(388): n is a, c, g, or t
  misc_feature (392)..(393): n is a, c, g, or t
  misc_feature (417)..(417): n is a, c, g, or t
  misc_feature (441)..(441): n is a, c, g, or t
  misc_feature (451)..(452): n is a, c, g, or t
  misc_feature (457)..(457): n is a, c, g, or t
  misc_feature (460)..(460): n is a, c, g, or t
  misc_feature (506)..(506): n is a, c, g, or t
  misc_feature (508)..(508): n is a, c, g, or t
  misc_feature (510)..(510): n is a, c, g, or t
  misc_feature (512)..(512): n is a, c, g, or t
  misc_feature (516)..(516): n is a, c, g, or t
  misc_feature (529)..(530): n is a, c, g, or t
  misc_feature (533)..(533): n is a, c, g, or t
  misc_feature (535)..(535): n is a, c, g, or t
  Probeset Number=SeqID_18613
ggtggcggccgctctagtaactagtggatcccccgggctgcagggagagagagagagagagagagagagagagagagctcactagtcccccccccccccccactttttatgtgnagttccgctactgctacaacggnntgaattctccacgtnacagaaaagtcttcctcttcctnttcttcctcggcgccgaccggatntgnctnctnctnctnctgctntgacanngangangacttnttttcctncccctcgccgcccgaaaagaagtgcnaggacaagaccagcgccgcgccgccaccgtcatntcctcgcttgccacatgtatggctaccgccgccgccgccgtctntttgttnctaaaaaggntnctctgatctgatctggnctgnnttactgcgtatgtacccgggtgcntacatatcttgtttgcgcgctgangaccccaccnncaccnacnctagtttttcctgctttttttatttttcccccccctcccccctggntntngnggangcctctgctgctnntancntgcttgcttgctgctt

SEQ ID NO: 4211 - DNA, 409 bp, Zea mays
  Peptide Sequence Number=SeqID_10311
  Probeset Number=SeqID_18614
agcaaagaatcttaaaatccccaaaaccaaaaaccctaagcagagatcgaagccgaaggaaggcgatcccaatcctcctcgattcatctcttcgctccccaaaaccaatggctaccataccggttaaccctaagccgttcttgaacaatttgaccgggaagacggttatcgttaagctcaagtggggaatggaatacaaaggtttcctcgcctctgttgactcctacatgaacttgcagctgggaaacaccgaggagtatattgatggacagttgacaggaaaccttggagagatcttgatcagatgcaacaacgttttgtacgtccgaggtgtgccagaagatgaagaactcggggacgccgaacaagactagtctgtaccaaggaaagtagaaatcgccagtctgtt

SEQ ID NO: 4212 - DNA, 949 bp, Zea mays
  misc_feature (1)..(25): n is a, c, g, or t
  misc_feature (907)..(908): n is a, c, g, or t
  misc_feature (928)..(928): n is a, c, g, or t
  misc_feature (949)..(949): n is a, c, g, or t
  Peptide Sequence Number=SeqID_10312
  Probeset Number=SeqID_18615
nnnnnnnnnnnnnnnnnnnnnnnnntcatctacagcttggaggcattgacaagcgtgtgatcgagaggtttgagaaggaagccgctgagatgaacaagaggtctttcaagtatgcctgggtgcttgacaagctcaaggctgagcatgagaggggtatcaccatagatattgctctgtggaagttcgagaccaccaagtactcgtgcactgtcattgatgctcctggtcaccgtgatttcatcaagaacatgatcactgggacctcccaggctgattgtgctgtgcttatcattgactccaccactggtggttttgaggctggtatctccaaggatggccagacccgtgagcatgctctccttgctttcactcttggtgtgaaacagatgatctgctgctgtaacaagatggatgccaccactcccaagtactcgaaggcccgttatgaagaaattgtcaaggaagtctcttcatacctgaagaaggtcggttacaaccctgacaaggttcccttcgttcccatctctgggttcgagggcgacaacatgattgagaggtccaccaaccttgactggtacaagggccccacccttcttgaggccctggaccagatcaatgagcccaagaggccctccgacaagcccctgcgtcttccccttcaggacgtgtacaagattggtggcattggaactgtgccagtggggcgtgttgagactggagtcatcaagccaggcatggttgtcacctttggtcctactggcctgaccactgaggtgaagtctgttgagatgcaccatgagtctctcctggaggcgcttcctggtgacaacgtcggcttcaacgtcaagaacgtggctgtcaggatctcaagcgtgggtatgtcgcttccactcacaggacgacctgnncagaggctgcaacttcacgnccagtctcatcatgacacccn

SEQ ID NO: 4213 - DNA, 700 bp, Zea mays
  misc_feature (3)..(5): n is a, c, g, or t
  misc_feature (9)..(20): n is a, c, g, or t
  misc_feature (26)..(26): n is a, c, g, or t
  misc_feature (603)..(603): n is a, c, g, or t
  misc_feature (618)..(618): n is a, c, g, or t
  misc_feature (624)..(624): n is a, c, g, or t
  misc_feature (643)..(643): n is a, c, g, or t
  misc_feature (661)..(661): n is a, c, g, or t
  misc_feature (681)..(681): n is a, c, g, or t
  misc_feature (689)..(689): n is a, c, g, or t
  misc_feature (692)..(692): n is a, c, g, or t
  misc_feature (700)..(700): n is a, c, g, or t
  Peptide Sequence Number=SeqID_10313
  Probeset Number=SeqID_18616
agnnnatgnnnnnnnnnnnnccaatngggtaccgggccccccctcgaggcgatccggcggttggagatgatgtacttgatgcgcttgtcctgcgactggcggagcgtttccgcgagatcgcccgcatcgacgccatgagccggatcgtggctgatgtcgatcgcggtcaccacgccgttggcatcggggttgtgatcggatttgcgcatttggtgggactggtcgccgagcattccgtcgctcgatttgtcgcgaccgggcgccatctcgttgacctgcctcagcaggacttcaaggctcctggcgggcctccaatcgatgctcatacgcgcgctccaaatatctcaagtgagcacagctagccgtcggccagggtcggcatgtccgagcgtgaccgggtcgatcaaaaaattctgcgattgccacgaataaaatgtcgggtggcaatgcctatgcgtatcgcgtgatcagactgcctcgcaatctttcgttgtgcaagatggaatgtcacaaaatctcgaatttgcgcgcacgattgcgacaacggagtgcacagtcaatcgtgtcgttgttccaaaacggacaagcgccggcttgtgaccngcgcccgcggtgtancgagcncgcaatgatgggggcttcnaagggcaaaaaagggctnaatcacctttggattgacgngccggggntgntttacggn

SEQ ID NO: 4214 - DNA, 710 bp, Zea mays
  misc_feature (2)..(5): n is a, c, g, or t
  misc_feature (8)..(8): n is a, c, g, or t
  misc_feature (523)..(523): n is a, c, g, or t
  misc_feature (535)..(535): n is a, c, g, or t
  misc_feature (580)..(580): n is a, c, g, or t
  misc_feature (583)..(583): n is a, c, g, or t
  misc_feature (601)..(601): n is a, c, g, or t
  misc_feature (623)..(623): n is a, c, g, or t
  misc_feature (643)..(643): n is a, c, g, or t
  misc_feature (647)..(647): n is a, c, g, or t
  misc_feature (654)..(654): n is a, c, g, or t
  misc_feature (660)..(660): n is a, c, g, or t
  misc_feature (663)..(664): n is a, c, g, or t
  misc_feature (679)..(679): n is a, c, g, or t
  misc_feature (693)..(693): n is a, c, g, or t
  misc_feature (709)..(709): n is a, c, g, or t
  Peptide Sequence Number=SeqID_10314
  Probeset Number=SeqID_18617
tnnnnccnatggggtccgggccccccctctacccctcggcaacggcatgcgccggaaagctgattgctcccctagagctactttacctcggacgagagtatccgcttgggtatgactatttccgaccacgactgcatcgtgcattcatcgccaaggcagccgagcgcgatgaggagaagataaggaaggggattgagcaggctgagtttgtgaagaagggtgagttgcaagagctacgattgttgaaacgaggatgcaattgtaagcacatatgagagctaacaagaacgacagaaatcgaggcactgtaagtatggtcggatttacttatcataacgaccctttagaactttgctctacacatgacttttcacgtttgaataccttgcgcgtgtcatttttgccttatggccagaaaaggcgctgtattctgagaaccctcgcacaaagctgtgcaaagcgaatattcacaagaaagaatgttacacaatcccctccacctccctagtcaaagccaaagganggcagaagcganctgtctaccgttcactgatccttccggacctttctttcctccccncanaaaaataagcagctcacncatgccttttggtatccatagnactacctgaagcgtatccanctgnggaaacntccacncgnncataaaagaaccaangcggaatttgattntatgagaggattctgnt

SEQ ID NO: 4215 - DNA, 395 bp, Zea mays
  misc_feature (382)..(382): n is a, c, g, or t
  Peptide Sequence Number=SeqID_10315
  Probeset Number=SeqID_18618
gtggattagggttaaaagaaccatttttattctcgtcgcgcaacaacaaatccagatcgaaaaaggaagaagagatcgaaatggcgttgagaagggtttacagtgaaatcagagggaagaaggtgacggagcttccaggctatatcaaatcgactttttcaatggagaccgtgaagacctctgtgaagagaggactcgataactacaacgaaaaatacattcagaccagctccggaaaccaagattgatccaaagtttggaagttatgctgacgagtggaagttattatgtttttgttctttcttttcataagaatgtcttttcatgtacggtaaaataatgtctcagaaactcaaaaatctttggatttcgtatgaataanaactttggcaaaa

SEQ ID NO: 4216 - DNA, 489 bp, Zea mays
  misc_feature (478)..(478): n is a, c, g, or t
  Peptide Sequence Number=SeqID_10316
  Probeset Number=SeqID_18619
attgtccgccaaatgtggcggactccctaccgttcactattgtctcttccctccggcgccgccgccgccgtcgccgccttccgattcactcccgaagctgctgggtagtcagaaccctcttgtgttgtgtcttgtcgcgccgaccgagcatctccgctctggcaattgttcctcgaggtatgatgtgcggttcgatggtggcagcgactctgattagacggcgagggttcggtcggaagcggtgagagggcgaggggcacaggatgggacgacttcgtgatgaatcgggcaagggtttcagcggtcgttgacctgcccccaggtttcttcaagccaatccagccaccatcgctgccggtgccgttatcagcttatgcgacgaagcagttctggaaggctgagactacaacggaaagcccgctctctgatggagtggctcagcagacacgtactgatacgaaaacccttctccattctntttctgtttca

SEQ ID NO: 4217 - DNA, 763 bp, Zea mays
  Probeset Number=SeqID_18620
ggaccctcgaggccggccgggccgggactcgatcgatcaccatctgtatgtggacaacaaatatatattgttgtttgtgcatgctatagataatagatcctttgttcgttgctcacttgaaactttgtcgtcttgcttggtgctcgataccatgtcgtcaaggatggcagcggtggcgatggctgcgttcctgttctgcgctctctttgcttggacgtcgtcggaagcggcacgcatggggcggacgggtagatgaggtcgttgttgttgccgccgctagagtctcgtcaatcgaggtggcagacgaagcggcggcaatgtggtctactgggagaggcaacgacagcatgcgcggcactcatctgtcggcgtgccgtcggcgcgaggtctcgcagtcgcttcacagccacagtgacggacggtcgctggccaaggttgcgcggctacaagcagagaggtgccctccggcccggaccctaaacaccacggcgacccgccacccacgtcggctgctccgacgacgagcccatagaaaggaagtaagacgagggagtaatgacgtggacgtgcatgtgcaggcgttgtagaaggcgtaggagtaataatgtacgcgcgcgcccctacgtacatgctgtgttgttgggtccttatttgcatgttggcttgtaccgtgtgcaatgtttcttgtattcgttcaaccggtagcttgaacgagttgaaatagtttctcctcatatatttatataacaaggcccctggggcc

SEQ ID NO: 4218 - DNA, 681 bp, Zea mays
  misc_feature (593)..(593): n is a, c, g, or t
  misc_feature (617)..(617): n is a, c, g, or t
  misc_feature (635)..(635): n is a, c, g, or t
  misc_feature (644)..(644): n is a, c, g, or t
  Peptide Sequence Number=SeqID_10317
  Probeset Number=SeqID_18621
actctcactcacaagttagtcacaaaaaaaaaaaaacacacaaaaaaagtttcaatggccgcctcaacaatggctctctcctcccctgccttcgccggaaaggctgtgaacctttcccctgcggcatcagaagtcctcggaagcggccgtgtgacaatgaggaagactgttgccaagccaaagggtccatcaggcagcccatggtacggatccgaccgagtcaagtacttgggtccattctctggcgagtcacccagctaccttaccggagagttccccggagactacggatgggacaccgctggtctatccgctgaccccgagacattcgcaaggaaccgtgagctagaagttatccacagcaggtgggccatgctcggagccctaggctgcgtttccctgagctattggctaggacggagtgaagttcggagaagccggtttggtcaaggccggttcacagatcttcagcgactggaggattggactacttgggccaacccgagcttggtccacgctcagagcatcttggcccatttgggccactcaaagttaatcctgttgggagccggtgaaaggcttcagagtcccangaaatggccgttggaaaagccgangacttgctttaccccggnggaacttcnacccattgggttggcttcccgacccaaagcattcctg

SEQ ID NO: 4219 - DNA, 859 bp, Zea mays
  misc_feature (1)..(253): n is a, c, g, or t
  misc_feature (854)..(859): n is a, c, g, or t
  Peptide Sequence Number=SeqID_10318
  Probeset Number=SeqID_18622
nnnnnnnnnnnnnnnnnnnnnnnnnnnnnnnnnnnnnnnnnnnnnnnnnnnnnnnnnnnnnnnnnnnnnnnnnnnnnnnnnnnnnnnnnnnnnnnnnnnnnnnnnnnnnnnnnnnnnnnnnnnnnnnnnnnnnnnnnnnnnnnnnnnnnnnnnnnnnnnnnnnnnnnnnnnnnnnnnnnnnnnnnnnnnnnnnnnnnnnnnnnnnnnnnnnnnnnnnnnnnnnnnnnnnnnnnnnnnnnnnnnnnnnnnnnnntacctccgtgcccgttcgaatcggatagtgtcatggatctgttcgtcaggcggtgcctcagtggagatggtggatgccgacggtggtcccgttcgtggagccggtctgcgaccacattcgaagtcgatggaagaggaggggaggctcgggtggtggagggatcctatggtcagatttgtcccggaccgcagtagtgttggtggtcgccgtcgtcatgggcgggctgttgttgttggagggatggatctgttcgtcaggcggtgcctcagtggagatggtggatgccgacggtggtcccgttcgtggagccgtctgcgacaggtcaggtgaggggtaggtgaagtgggaaggctcgggtggtggagggatcctatggtcagatttgtcccggaccgcagtagtgttggtggtcgccgtcgtcatgggcgggctgttgttgttggaggctacggtccgatttgtcccggagcgcggcggtgtcgatggccgtcgtcgtcatgggcgggctgttgctgtcgtcgtagactggaagaatgcttgaatcgtcgaaaggaacaactggttcttcacatgtctgttcaccaaaaaaaaaaaaaaaaannnnnn

SEQ ID NO: 4220 - DNA, 422 bp, Zea mays
  Probeset Number=SeqID_18623
aattctagccgcctccgattagattcttgtaacgccttctctttcccattaattttctcctttaatcagaccattaacatcgtcatcccacttgctgcattattaattcgagctcagagtcttcgttacctaaccgatttggtttcgtcgatcgactgcgactcgacttgggtttgtgctttcagtccgtaaaaaaacaagagctgatcggcatcatttattcagtattggggaggtgaaatccaatcccttcgcttcgcgccaggcttagcaacgcaagaggagaaacaggcccggttcaccataatgtagacctgagaacgtaggcaattgtagaaaattgattctttctctttgagtaaagtcatggcttctcaagcatgcctcctttattcctcccagcatgcctcacatctctcttg

SEQ ID NO: 4221 - DNA, 479 bp, Zea mays
  Peptide Sequence Number=SeqID_10319
  Probeset Number=SeqID_18624
agccgggaaccgtgaagctgcatgccctcttcgatgggtgtgcttcgtcgccaaatccacgccatggcccgtcctcgccgatgccggtaactcgacccaagagcaaaaccagtggggagcgcagggctcggggatgacgtacggtgcacgccgtgggggctaggatgcctaggtcatcggcaatttcacgacgggcatgagattttgccgctattcgttgtcgggctccacgctgttcgatttctgcagtgaggacacgtgtcatctgaagagcaagttggtacctggaatctcaagtgccaggtcaagaacaggtaccagaggatgaggcgcatggaggatgctgtgatgagttcgtgagtggtctaggtcgtcgtctcccagtcaactttgggttgctggaacgttgtctccttataatgtaattatttatttattttgtataaaactcctgttatgtagcaaaaaaaaaaaaaaaa

SEQ ID NO: 4222 - DNA, 393 bp, Zea mays
  Probeset Number=SeqID_18625
gcacggagaggtaagttcatgagacatcttgcagaagctgaaacggcttctaaagctgctactgccaacaagggtgatgcctagacccacgccttgaaggttgccaaggctgtgtagtctggggcagcctagtagaagaccaacaatatccgctcgtctgtgacatttcaccgccccacagacgcctagatgaaggcttgtgaccccaagtacccacgattcatcactaccgtgtggaacaagctggatcagcaccaaattctcaagtacccccttaccacacattcagcgatgaagacgattgacgataacaacactctgatcttcattgttgacctcaaggcatacaagatgaagatcaaggctgacgtcaataagatgtatgacatccat

SEQ ID NO: 4223 - DNA, 417 bp, Zea mays
  Peptide Sequence Number=SeqID_10320
  Probeset Number=SeqID_18626
atcgagaaaatgccagtatcagctccgtcgccgcctcgtcttcaatctccgttcatccaccgtccaatcaatgcaactccgtcttcttcccgttcactctccgcgaggaatctccgttcgccgtcaacgtcgtcttatccgcgaatcaaatcagaagtcgatacgaacacggtaatcgcaatctctgtaggcgtggcgagcgtcgcgttgggaatcggaatccctgtcttctacgagacgcagatcgacaacgccgctaagagagagaacactcaaccttgttttccttgcaatggcactggagctcagaagtgcaggttgtgtgtgggaagtgggaacgtgacggtagagcttggtggaggagagaaggaagtgtcgagctgtatcaactgtgatggtgctggttccttgacttgc

SEQ ID NO: 4224 - DNA, 728 bp, Zea mays
  misc_feature (551)..(551): n is a, c, g, or t
  Peptide Sequence Number=SeqID_10321
  Probeset Number=SeqID_18627
ctccccaccactcaaaaacaactaggccaaaaacttgctcacgaagaaaaaaaaatcgccgagtcagatctcaatcgcaaaccgtctccaatggctctcgagtgggttgtcctaggctacgcggccgccgccgaagcgatcatggtgatcctcctaacgatgccaggactcgacgcgctccgcaaaggcttgatcgccgtcacgcgcaacctcctgaagccgtttctctcgatcatccccttctgcctcttcctcctcatggacatctactggaagtacgagactcgtccctcctgcgacggcgactcgtgcaccccttccgagcacctccgtcaccagaagtcgatcatgaagtcccagaggaacgcgctcctgatcgcgtcggcgcttgtgttttactggattttgtattccgttacgaatcttgttgtgaggatcgagcagcttaaccagagggttgagaggcttaggaagagggagtaaagccgaggttgattcgtcgtcgtttcgggctctttgatgcgctgatttgaggttgtttcttcgttttnttatgtttgcttttatcttgtggagattgtaaggatctatgctatctcttatactttagttcaatcctctgtgtttagtctatgaatcttgtcatagttttctcacttgatgatactttgctctgttatcttggttagttatgatgaatctgcttacgactaaaaaaaaaaaaaaaa

SEQ ID NO: 4225 - DNA, 611 bp, Zea mays
  Peptide Sequence Number=SeqID_10322
  Probeset Number=SeqID_18628
aatttggcccgaggcaacccctccgcgggattgtgccttacccagcctttttccttgtcgccggctccccatgtcgggggggttcaaggggttcctgaatagcccagtgggccccaaaacgacccccttttggggacccgtctcgaactggggcatcatcctcgcgagggtgggtgacccgaaaaagcctctttagatgatatccggcaacatgccaggagtgttgtgggtgtactttgcgctttttgtcaggttcgcgtggatggtgcgccctcggaactatttcctcatggtaacccccagctgcaacgagtgggttcagcttttccaactgtcgcgctgggttagggcccaggggttcctttaaaaaaaaaaaaaggagaggccccaaaacgaagattttccgccggcccggccctaaaccatagtttggccgaacaagcatggttctgcttcggccgtacaataatacaatgtactcggttgtcccccaaaggcaatattttatgcatgtacgtaacgtgaaaaaaacctcggttatacatgttgtaggttcatttgcggatactgaactatgaatttccgagcataaagcatcaatttcccctgcc

SEQ ID NO: 4226 - DNA, 779 bp, Zea mays
  misc_feature (596)..(596): n is a, c, g, or t
  misc_feature (634)..(634): n is a, c, g, or t
  misc_feature (637)..(637): n is a, c, g, or t
  misc_feature (655)..(655): n is a, c, g, or t
  misc_feature (665)..(665): n is a, c, g, or t
  misc_feature (676)..(676): n is a, c, g, or t
  misc_feature (704)..(704): n is a, c, g, or t
  misc_feature (711)..(711): n is a, c, g, or t
  misc_feature (714)..(714): n is a, c, g, or t
  misc_feature (719)..(720): n is a, c, g, or t
  misc_feature (727)..(727): n is a, c, g, or t
  misc_feature (737)..(738): n is a, c, g, or t
  misc_feature (745)..(746): n is a, c, g, or t
  misc_feature (752)..(752): n is a, c, g, or t
  misc_feature (764)..(764): n is a, c, g, or t
  misc_feature (776)..(776): n is a, c, g, or t
  misc_feature (779)..(779): n is a, c, g, or t
  Peptide Sequence Number=SeqID_10323
  Probeset Number=SeqID_18629
aattgggtaccgggccccccctcgagaacgcgatgctcccgggcgccttcccgaaagctgcgacacagattctttacgctcagcactccactgatgctccagctgacgtcgccgttccgcgactcttgtacatgggcgccaacagcaaaaaaaccagcacaaaacgcgctgatgggcgaaactgtcgcccgccgcggtttatgccgtgctccctgtccgcacggcccgcgagcccgaggtgcctcatgaatgctgttgttggtcccaggaaggtcaatgcgcaggaccgctgcttccacaatacggcaattgccgttgtcgcgctgctcggctgcgcgcccttagcctggtcacagactccagccgacaaggcgaccacttccaccgcggcggctcccgctgccgctcagcctaaaaagccagccgccgcagcggccgtcccggaggtgcatccgacgtgaaagctcccaccaacgcgaaagcacaagccagctacagcctcggcgtttcgatgggcgatcagctcatacctgggcctcagtcccgattaatcgcgaccgagcgcctgaccaagggctgcgtgatgcactcgccgnaaatggcatacggcaacgacaagaaaatatcggagttngtnaaaacccgccttggatgnggcagaatcngcggcggaaanattcttcccaaaggaaaaaaccgggttnaaaaacncangggtnnaaactgncccggggacnntttttannggcccnccgggggactcntttgtttttagnggn

SEQ ID NO: 4227 - DNA, 442 bp, Zea mays
  misc_feature (77)..(77): n is a, c, g, or t
  misc_feature (424)..(424): n is a, c, g, or t
  Probeset Number=SeqID_18630
aaaagaatttaaaactttttttctttcttccttcccctgtaatggcgcttccacacatactctcttcaccaccgtcnttcaacttcgttatctccgtctttcaaatcaaagccgcctctctcaccggcctttgctagtaatctccgacggtgcaagctcacctccttccgatgttcgtcttcctctttctccgagaagcatcacaacgcgaaccctccaaaacccgatgacgtcgtcgagcttcctctcttccctctccctctcgttctcttccccggcgcaatcctccctctccagatcttcgagttccgttaccgcatcatgatgcacactctcctcgagtccgacctccgcttcggcgtcgtttactccgacgccgtctccggctccgccgcagaggtcggatgcgttggggaggtcgtcnagcacgagaggctcattg

SEQ ID NO: 4228 - DNA, 497 bp, Zea mays
  Peptide Sequence Number=SeqID_10324
  Probeset Number=SeqID_18631
tcgaggccggccgggatacaatttaactggataccacaaaagctcgccgcaggtgtatacatccttagcacaagcactggtctatgtttgcctcaccaagcggacatggggatgaacaacatgtcagcacagctacaccaggtgaagacggaggccaagccgaggaagatgcagcaagtgcgatggagcaaggcgccagggcacgaccacgtcgacacagacagagtaacgtgcgtgtgtgtgggccggagtgggccgtgtaagagccattgggctgggctgtaataggtgaggtataagtagcctcatcaccagagaacgaaccatcgatgaacaaaacactaatagtgtgtttggtttgaggaatgaagtgatccattttcttctcacttctcacttttttatttggtttgtggaatagaatgggttgatccatcatcacctcatttctcataagctaataattagtatataaaaaaaaaaaaaaaaaagcggcc

SEQ ID NO: 4229 - DNA, 926 bp, Zea mays
  Probeset Number=SeqID_18632
ggctttcgctttattttgcggggttttgttttgtgaatgtgaagcggtaacatttcatcccgggaacagctatgtccattgtttcctcaagggcgccaatttgcctcctttaagggaacgaaagctggatttacatggcgttgccgccggctttagagattgtggatgcccccggtcgcagggatttcgcacgagaccattacctagaacatcctaatcgaaaaactggaaattttcagttttatcatctcaccctttccgtttcgtttctctctctagactctttgaaaggacgacggaaagagaaagagaaagagagaggaagacgagagagatggatccagacgcagtagcgaaggctttcgtggagcactactacaccaccttcgattcgaatcgtggaggattggtctctctttaccaagaaggatccatgctgaccttcgaagggcagaagatccagggctctcagaagcatcgtcgccaagctcaccagccttcctttccagcagtgcaaggcacaacatcaccaccgtcgattgccagccctctggtcccgccgccggcatgctcgtctttgtctccggtaatcttcagctcgcgggcgaacagcacgctctcaagttcagccagatgttccatttggtatcgaatcagggaaactactacgtgttcaacgacatattcaggttgaactatgcctgaggtatctagttgcagagactgatggatgtttggtgggttaattcatcttggtttttagtagaattgaagcttgttttgctgtctgtctttactttaatcaatggagagctctttgttaagtttggttgagataactctgtatgattcagccagcggttataatcaattattacaatgaaaatgtctatttgaaatatggttttctaaaaaaaaaaaaaaaa

SEQ ID NO: 4230 - DNA, 1333 bp, Zea mays
  misc_feature (1)..(47): n is a, c, g, or t
  misc_feature (1333)..(1333): n is a, c, g, or t
  Peptide Sequence Number=SeqID_10325
  Probeset Number=SeqID_18633
nnnnnnnnnnnnnnnnnnnnnnnnnnnnnnnnnnnnnnnnnnnnnnngggagaggacagaagagggagatacaggttaatttttaggtaccagatcatctgatttctcagaagcaagatgctgtttggagctcagtgacaccatcttgtaatgcctgtgattttacgggaaatggaggatcattctgtccatcccatgtctaagtctaaccatgcctccttgtcaggaaatggttatgagatgaaacattcaggccataaagtttgcgatagggattcatcatcggagtctgatcggtctcaccaagaagcatcagcagcaagtgaaagcagtccaaatgaacacacatcaactcaatcagacaatgatgaagatcatgggaaagataatcaggacacaatgaagccagtattgtccttggggaaggaaggctctgcctttttggccccaaaattacattacagcccatcttttgcttgtattccttatactgctgatgcttattatagtggggttggggtctcgacaggatatgctccacatgccattgtatgttcactcttaatttttcagtttctgtcttcctggccacattctgtccatccccagcaaaatgatacaacgaacactccgggtatgttacctgtggaacctgcagaagaacaaatatatgttaatgcaaaacaataccatgcaatccttaggaggaggcaaacacgtgctaaattggaggcccagaacaagatggtgaaaaatcggaagccatatcttcatgagtcccgacatcgtcatgccatgaaacgggctcgtggatcaggacggttcctcacacaaagcagctccaggagcagaaccagcagtatcacatcgactgtgctcaaaattcctgatgctgatttggtaagatgactttcattaatcttcagcatttgctgcatacagagctttgattatcaatacagtagatttttcttgggtcttgaccatattcagagggaggtcacaaaagaccctctggctacaatttcagtgggtttgtcataggcttaatttttttattagcaaattgttctggacttgtgtcaccaagcatttttgtaagggtgagagtaataattattttgtaactagctaacatcaagcattttcttggcttcttcaacattttttcatctgttcttttctgatctgaaagctgcatgaattagtcctgcattcctatacaggcaatagttctgttacttcagctatataatttatatggcaaatacacgttacaaagttgcatttcttcacagccatatcttcatgagtcccgacatcgtcatgccan

SEQ ID NO: 4231 - DNA, 526 bp, Zea mays
  misc_feature (36)..(36): n is a, c, g, or t
  Peptide Sequence Number=SeqID_10326
  Probeset Number=SeqID_18634
aaagctggagctccccgcggtggcggccgctctagnaactagtggatcccccgggctgcagggcgagatggaacacaagggagaatgagacttgtattatcctgcactagggtgctcgtacctaggggttacaagcacgtcgcgagagagggagagagagagagcctgttcgtttgctcgtcccccgcgccaacctcctctaggaaagccctggacctcccttttatagatgcaaggagagggtccagatgtacaatgggggtgtagctatgcgctaacgtgtccggcagagaggtgcctgagcccggtgtacatgccaacgtggctgtcagagaggtgcctgagccctgagtacgtgataatgtggccgtcgaagaaatgcgtgagccctgagtacgtgataacgtggccgtcgaagaagcgcctgagccctgtagaagcacaactggcggtgtggcaagggttctgctgacgttcccttgctttcgtaagggggctgagaaccaccaacgtcatggacgcacgc

SEQ ID NO: 4232 - DNA, 774 bp, Zea mays
  misc_feature (1)..(1): n is a, c, g, or t
  misc_feature (8)..(8): n is a, c, g, or t
  misc_feature (18)..(18): n is a, c, g, or t
  misc_feature (23)..(24): n is a, c, g, or t
  misc_feature (28)..(28): n is a, c, g, or t
  misc_feature (31)..(33): n is a, c, g, or t
  misc_feature (39)..(39): n is a, c, g, or t
  misc_feature (47)..(47): n is a, c, g, or t
  misc_feature (53)..(53): n is a, c, g, or t
  misc_feature (67)..(68): n is a, c, g, or t
  misc_feature (70)..(70): n is a, c, g, or t
  misc_feature (93)..(93): n is a, c, g, or t
  misc_feature (136)..(136): n is a, c, g, or t
  misc_feature (168)..(168): n is a, c, g, or t
  misc_feature (173)..(173): n is a, c, g, or t
  misc_feature (185)..(185): n is a, c, g, or t
  misc_feature (245)..(245): n is a, c, g, or t
  misc_feature (269)..(269): n is a, c, g, or t
  misc_feature (273)..(273): n is a, c, g, or t
  misc_feature (769)..(770): n is a, c, g, or t
  Probeset Number=SeqID_18635
nttttgtnaattagaaanttaannccanagnnnaaacgnaaccttcnaaaggnccattcctttaaanncnaaatggggaacaaccatttgtgncgaagctctaatggtgtgagcagtcatttgataaatatctaanagaaggacttacaggttgtgacctgtattcanagggncaaagtcaagtncaatagtcttcgacgatccccgtgctcatcgcatgaccggattaccattattcttttgcnaatggctacacagctccggtttcnttcntcctgctattccctgggtcacaatcactcagatctcttagcttggggctttagtggctttgatccggggttgcgtgtaagagcgcggatttacttcgcatgtacgtggagattgctaagacacgctaggcgatagttcggagcagctaacacttgcgtagagtcacgatgatttcggtagtgaatgaattttgagggctgggcgcccggaatgaagtcgagatccacgcaattccatgctgggaggactgcgctgcttgatacatggatcccctcttgatcgtggaatcgtggctttcacgcccgaaaagcgacttcaagaccgaacccaaagctaaccgattgaccaaccaattctcgctccggtagctgatctaatctcgtattgagctcttctccgaggcgctgacgtgtaccaacagtttggaatatcatctcggtcggcatgggggcctgctcctatctcaactcgagggggggcccggtacccaattggnntcaa

SEQ ID NO: 4233 - DNA, 695 bp, Zea mays
  misc_feature (6)..(8): n is a, c, g, or t
  Peptide Sequence Number=SeqID_10327
  Probeset Number=SeqID_18636
gacccnnnacaaattagcaaacaaacaataacactaccgccatggcaaagctcgtcctcctcttcaccaccttagctctcttcctcctcatagccaatgcttccatctaccgtatcgagatagatgatcttgacgaggaattcgatctcgatgaaaacccacaacagaaaatcggtaaacattgtcgaaaagggtttgcaacccacaaacacctaagagcatgtcaaagattcataaggagacaagctcgatctcctcgtgatgaagtcgtagatgacgtatccgatgaagaaaactcaggtcaacttctacagaactgttgccagcagttgaaacgggttgatgtcccatgcagatgcccatcactcaaatgggcattaaagcgtcagctacaaccatccattgagcttgaactcccaggacaacagcaacaagaacaagggcaaaaaggtcaaccaggccagcagggtaaaggacgtcaatggaaggttcagaagatgatcaaaacagcatctaacttaccttcaatctgtcagattccaccacagagttgtcctttcaaacaaccacgatggtggtttgatgagtaaatatagcggcggtttaactagaaaaatatgcggttaatgtgtgtaatgattaataaaggtttcactatattagctccagttacgaagctggagttacgctaacaa

SEQ ID NO: 4234 - DNA, 493 bp, Zea mays
  misc_feature (205)..(205): n is a, c, g, or t
  misc_feature (248)..(248): n is a, c, g, or t
  misc_feature (269)..(269): n is a, c, g, or t
  misc_feature (274)..(274): n is a, c, g, or t
  misc_feature (285)..(285): n is a, c, g, or t
  misc_feature (288)..(288): n is a, c, g, or t
  misc_feature (301)..(302): n is a, c, g, or t
  misc_feature (313)..(313): n is a, c, g, or t
  misc_feature (320)..(320): n is a, c, g, or t
  misc_feature (322)..(322): n is a, c, g, or t
  misc_feature (325)..(326): n is a, c, g, or t
  misc_feature (331)..(331): n is a, c, g, or t
  misc_feature (339)..(339): n is a, c, g, or t
  misc_feature (342)..(344): n is a, c, g, or t
  misc_feature (350)..(350): n is a, c, g, or t
  misc_feature (368)..(368): n is a, c, g, or t
  misc_feature (372)..(372): n is a, c, g, or t
  misc_feature (376)..(377): n is a, c, g, or t
  misc_feature (382)..(385): n is a, c, g, or t
  misc_feature (390)..(392): n is a, c, g, or t
  misc_feature (399)..(399): n is a, c, g, or t
  misc_feature (406)..(408): n is a, c, g, or t
  misc_feature (412)..(413): n is a, c, g, or t
  misc_feature (415)..(415): n is a, c, g, or t
  misc_feature (417)..(418): n is a, c, g, or t
  misc_feature (424)..(430): n is a, c, g, or t
  misc_feature (436)..(436): n is a, c, g, or t
  misc_feature (439)..(440): n is a, c, g, or t
  misc_feature (443)..(448): n is a, c, g, or t
  misc_feature (461)..(461): n is a, c, g, or t
  misc_feature (466)..(471): n is a, c, g, or t
  misc_feature (475)..(484): n is a, c, g, or t
  misc_feature (492)..(493): n is a, c, g, or t
  Peptide Sequence Number=SeqID_10328
  Probeset Number=SeqID_18637
gctggagctccccgcggtggcggccgctctagaactagtggatcccccgggctgcaggaattcggcaccaggagagagagagagctcactagcccccccccccccgaaaataacaggggccgccgaaaatggtgtacagtgctgttgtgttccctcttttacattccaaatattttagataggaaagtatattgtatcatttcanaattgatggaatggatggacccctccccccgggggttacttcntttttttggggaacaaattanaaaanttgggggaagnccnccctattttgccnnaaattcctttnaaagggntnaannggccnattggggnatnnnttttanggggaaaaaaggggtggngggngcgnnttaannnnggggnnnaaaaaanttgtttnnngggnncncnnaaaatnnnnnnnttttanaanncannnnnnttttttttaaaanggggnnnnnnaaannnnnnnnnntttttttnn

SEQ ID NO: 4235 - DNA, 540 bp, Zea mays
  Probeset Number=SeqID_18638
tatgtccagaacgcggcctttatcgtggtttcggccgggggcctggctcctttttatctcatgcgcctacggtgcctactgaaatcgttattgtggccatgttcttaggtcttcgccccgggcctatggctcaattcttcgcctggaaaccccgccagcctctgggggggctgcttcaaaaatggttcactacattcaggctggcactgacttctgccaaacaagggaggatgcttaccgattttctgagtatgactagaggcttcattaggcaagaattcaccctaggcatgtcagatcaatccacagctcctgtcgcgacgatgacaaaggaggcttgtttcagaggccacagctcagctcacagtcttcaggatagctgccaacctccttcgggccacctgctccaatgggccgacgcgcgcaggggcttcgttggaagatatgggtgatccgcccagggcaaatctaattgcttattctgttggtgctagacatggggccacatctacaaggaacgttgtcgctgatcaccattca

SEQ ID NO: 4236 - DNA, 444 bp, Zea mays
  misc_feature (435)..(435): n is a, c, g, or t
  Peptide Sequence Number=SeqID_10329
  Probeset Number=SeqID_18639
aatccggatgaccagccaacccagaaatggacgagagaagcaaaggagtgtccaccaagcagagcataggcgagagaagcataggagcgtgggctacggacatggcgaggaagttgtggccaccgtaggcggagccggacgcgttgagtcgttgacgcagcatctacaccatcgcaggtggggctggccggacacagtggctgcgttgacgtgagtactcaccactggtccactgcagacgcgaaatcaagcaattaggagctcgggttgcggcggaactttgcgcggtgaagaggatgtttttcgcctccgcaagtttgggagtgctagatacgtaactgttggaggcttttttttcccttttttcctagaatctctactacttattaagtaagtaatagtagtctgccaaaaaaaaaaaaaaaaaggcttttngaaacggtg

SEQ ID NO: 4237 - DNA, 692 bp, Zea mays
  misc_feature (652)..(654): n is a, c, g, or t
  misc_feature (684)..(684): n is a, c, g, or t
  Probeset Number=SeqID_18640
gcattaagaggaaaacttccaagatggttctgctagagaagctttgggacgatgttgttgctggccctcaccctgagcgtggccttggcaagctcaggaagctatccaccaacgttaaagatgaaggagaaggtagcaagttactgaacttgtcgatgccctctacgccgacaaccccagtgactccaacgacaccaacaacccccttgtctgggcgtaaagctgacaacgtttggaggagtgtgttccatcctgggagtaactcagccacaaagaccattggtgctcaaatgtttgacaaaccactcccaaacactcccactgtctatgattggctctacagtggagagaccaggagcaagcaccgctaaggtggcagcgaactcccctgagtcgcatgtaaatagtgtccttatctgttgagcgcctgccacgtgtctgcatttgccatcacgtgtcgcgacttaactggtctgtggctgactgaattcgtgtttttggttagcatatgtgaatgtaaaatgcttaataattaatatgctttgtttgtactgaagttttgtaagccagatctgccgcgaactttggcttgggttaatctttctttcttttttatttttccctccagtaagtgatggtctaatccgttatnnnaataaatataagtttgttaaatcttctctnaaaaaaat

SEQ ID NO: 4238 - DNA, 1203 bp, Zea mays
  misc_feature (953)..(1203): n is a, c, g, or t
  Peptide Sequence Number=SeqID_10330
  Probeset Number=SeqID_18641
aatcgctgcggtgccacgtgccagtgcccaaatctaaccccctaaaccctagcgccgccaccgccatgcttcgccgcatcgccgccgtcgccccgcgggcattcttctcctcgtaccccccgcacgccccgtcgcttccggcgtcgggctacatcccgcgccgcgagtacggcctggtacccatggtgatcgagcacacctcccgcggggagcgcgcctacgacatcttctcgcgccttctcaaggagcgcatcgtctgcatccatggccccatcaccgacgacacggcctccctcgtcgtcgcccagctgctcttcctcgagtccgagaaccccgccaagcccgttcacctctacattaactccccggggggcgtcgtcacggcgggcctcgccatttacgacacaatgcagtacatccgctcccccgtcaccacgctctgcatcggccaggccgcctccatggcgtcgctactcctcgccgcgggggcgagcggggagagacgggcgctgccgaacgcgcgggtcatgatccaccagccctccggtggcgcgtcggggcaggcgtcggacatcgccatccacgccaaggagatcctcaaggtgcgcgaccggctcaataagatctatgccaagcacacgggccaggccatcgaccgcatcgagcagtgtatggagagggacatgttcatggacccggaggaggcacatgaatgggggctcatcgacgaagtcatcgagcaccgccctgtctctcttgtgtctgacgctgttggcagtgatccgccaaacctcggtggaggcggaactgaggtgaataaagggacggacgagccatcttcagcgtgatggcattggacagtcacaaggtgcaatccttttttttgtgttcctgcagctgtctcttgcgatttaagcgtttaattacgtacatagacgtgaatatacttaatnnnnnnnnnnnnnnnnnnnnnnnnnnnnnnnnnnnnnnnnnnnnnnnnnnnnnnnnnnnnnnnnnnnnnnnnnnnnnnnnnnnnnnnnnnnnnnnnnnnnnnnnnnnnnnnnnnnnnnnnnnnnnnnnnnnnnnnnnnnnnnnnnnnnnnnnnnnnnnnnnnnnnnnnnnnnnnnnnnnnnnnnnnnnnnnnnnnnnnnnnnnnnnnnnnnnnnnnnnnnnnnnnnnnnnnnnnnnnnnnnnnnnnnnnnn

SEQ ID NO: 4239 - DNA, 916 bp, Zea mays
  misc_feature (1)..(132): n is a, c, g, or t
  misc_feature (838)..(916): n is a, c, g, or t
  Peptide Sequence Number=SeqID_10331
  Probeset Number=SeqID_18642
nnnnnnnnnnnnnnnnnnnnnnnnnnnnnnnnnnnnnnnnnnnnnnnnnnnnnnnnnnnnnnnnnnnnnnnnnnnnnnnnnnnnnnnnnnnnnnnnnnnnnnnnnnnnnnnnnnnnnnnnnnnnnnnnnnnnatccaccctagtgtgaagctgggcaacaaccaggacaacaacggccccatggtgaatatcgaggtccacgatgtttcgaacgtggattggaatgtcgagacaattaccgtgatccatggccagccgacaggtccccaaaaggctagaggtaatgaaacccttcggactaagtaccacttctggaaatgggggagcgatgactgggatcaattggggtcaaggctccgtccactcaagggacacgatctcgcctcgcccgagcccagcctcgggcaaaggcagccgacccaggaggattcacgtctcgcccgaggggctcggactcagcctcgacctcggacgacggactccgcctcgcccaaccccagggctcggactcagcctcgacctcggatgacggactccacctcgcccgaccccagggctcggactcagcctcgacctcggaagatggactccgcctcacccgaccccagggctcggactcagcctcgacctcggacgacggtctccgcctcgcccgacccccgagcccggactcagcttcgacctcggacgacgaaccccgcctcgcctgaccacagggctcagactcagcctcgacctcggatgacggactccgcctcgctcgaccccagggctcggactcagcctcgacctcggaagacagactccgcctcgcccgacccccgggcccggactcagnnnnnnnnnnnnnnnnnnnnnnnnnnnnnnnnnnnnnnnnnnnnnnnnnnnnnnnnnnnnnnnnnnnnnnnnnnnnnnn

SEQ ID NO: 4240 - DNA, 432 bp, Zea mays
  Peptide Sequence Number=SeqID_10332
  Probeset Number=SeqID_18643
aaggccctcctccgtctcactcgtgacgcctacataatggcggactttaagcctgtcggtgagctatttctggaggccattcaagattggtacaagaagccaatcacctatgtccaagattatgaagaagatgatgactcaactggtgaggccaaggttgtcgtcatcgacagggcctaggcggcaaaatccacctcatgaccttgggtcacttctactgaagcgccaattggttttgactacaaaacgtccaaggtagagttgatctttaatttgctcctaaaagagaagtagctccaagtgatctgccaatcacaagatcatgttgactcatgagctgaaaaggcaagtgttactacaagtggcgcaatatatgtcgcagagtgcaaggtgttgtggcagtggcttcagttggtctagtagcggaagacc

SEQ ID NO: 4241 - DNA, 773 bp, Zea mays
  misc_feature (3)..(4): n is a, c, g, or t
  misc_feature (347)..(347): n is a, c, g, or t
  misc_feature (356)..(356): n is a, c, g, or t
  misc_feature (359)..(359): n is a, c, g, or t
  misc_feature (369)..(369): n is a, c, g, or t
  misc_feature (379)..(379): n is a, c, g, or t
  misc_feature (406)..(406): n is a, c, g, or t
  misc_feature (408)..(408): n is a, c, g, or t
  misc_feature (416)..(417): n is a, c, g, or t
  misc_feature (421)..(421): n is a, c, g, or t
  misc_feature (427)..(427): n is a, c, g, or t
  misc_feature (442)..(442): n is a, c, g, or t
  misc_feature (461)..(461): n is a, c, g, or t
  misc_feature (467)..(467): n is a, c, g, or t
  misc_feature (472)..(472): n is a, c, g, or t
  misc_feature (481)..(481): n is a, c, g, or t
  misc_feature (487)..(487): n is a, c, g, or t
  misc_feature (498)..(498): n is a, c, g, or t
  misc_feature (504)..(504): n is a, c, g, or t
  misc_feature (506)..(509): n is a, c, g, or t
  misc_feature (517)..(517): n is a, c, g, or t
  misc_feature (520)..(521): n is a, c, g, or t
  misc_feature (540)..(540): n is a, c, g, or t
  misc_feature (548)..(548): n is a, c, g, or t
  misc_feature (557)..(558): n is a, c, g, or t
  misc_feature (563)..(563): n is a, c, g, or t
  misc_feature (565)..(566): n is a, c, g, or t
  misc_feature (573)..(574): n is a, c, g, or t
  misc_feature (579)..(580): n is a, c, g, or t
  misc_feature (588)..(588): n is a, c, g, or t
  misc_feature (592)..(592): n is a, c, g, or t
  misc_feature (596)..(597): n is a, c, g, or t
  misc_feature (605)..(606): n is a, c, g, or t
  misc_feature (609)..(609): n is a, c, g, or t
  misc_feature (611)..(611): n is a, c, g, or t
  misc_feature (614)..(614): n is a, c, g, or t
  misc_feature (617)..(617): n is a, c, g, or t
  misc_feature (626)..(626): n is a, c, g, or t
  misc_feature (630)..(630): n is a, c, g, or t
  misc_feature (634)..(634): n is a, c, g, or t
  misc_feature (636)..(639): n is a, c, g, or t
  misc_feature (641)..(644): n is a, c, g, or t
  misc_feature (653)..(653): n is a, c, g, or t
  misc_feature (658)..(658): n is a, c, g, or t
  misc_feature (663)..(663): n is a, c, g, or t
  misc_feature (667)..(667): n is a, c, g, or t
  misc_feature (677)..(678): n is a, c, g, or t
  misc_feature (680)..(680): n is a, c, g, or t
  misc_feature (686)..(686): n is a, c, g, or t
  misc_feature (688)..(689): n is a, c, g, or t
  misc_feature (691)..(691): n is a, c, g, or t
  misc_feature (698)..(699): n is a, c, g, or t
  misc_feature (704)..(706): n is a, c, g, or t
  misc_feature (713)..(714): n is a, c, g, or t
  misc_feature (719)..(721): n is a, c, g, or t
  misc_feature (727)..(728): n is a, c, g, or t
  misc_feature (730)..(731): n is a, c, g, or t
  misc_feature (738)..(740): n is a, c, g, or t
  misc_feature (747)..(747): n is a, c, g, or t
  misc_feature (753)..(753): n is a, c, g, or t
  misc_feature (755)..(756): n is a, c, g, or t
  misc_feature (758)..(758): n is a, c, g, or t
  misc_feature (763)..(763): n is a, c, g, or t
  misc_feature (769)..(769): n is a, c, g, or t
  misc_feature (772)..(772): n is a, c, g, or t
  Probeset Number=SeqID_18644
gtnncaattggtccgggccccccctcgagaagcgcgggctccgcctggtccgcgcagaggtcgcgttcgtctgtacgcgcacgctcaacgacgccgcggcaaaaggccagtcgcgcttcgtcgtctacctcaacaccatggagcgcctcgtgttgtcagcacgcgcgcgcgccggctcggacgtccaggcgatctgcggcaaggtcggcggcttcgatcgctacggcaaccagttcggaccgctctccagttacttgcacattgcactcgtcgagggccgcgcgcgcagcgagtacaagttccccggcgtcggcacggtcgcgttcgtgcgcgacgcggacgcattnagctcgctngtnagcctgcatngctgatcagnaagtaggctgcgcgatctgctgacggncncgtgatcnntcantaaaangacgaggacaactcnttggcgaacgcgaagcggnaccacnatccntcacggggnaagttngtcgtcggacngagctntnnnnaaaagcgnaannatgcctgacattgttttancgcacgangttgacaanngtctntnntggatgnngtaannaagtgttngatnaacnnttgttggnnccnantanttnattgtatanggtngatntnnnnannnntagtcttgntgaantttanaaanaatttcatgnnantttttntnnantcgaatnnatgtnnnaaaattnnatttnnntatttnntnnataattnnntacaaangtgtantnntnagctntttttnaana

SEQ ID NO: 4242 - DNA, 626 bp, Zea mays
  misc_feature (3)..(4): n is a, c, g, or t
  misc_feature (7)..(7): n is a, c, g, or t
  misc_feature (9)..(9): n is a, c, g, or t
  misc_feature (12)..(12): n is a, c, g, or t
  Peptide Sequence Number=SeqID_10333
  Probeset Number=SeqID_18645
agnnatntncgnttggtaccgggccccccctcgagatcctttctcgaatgagagcaacgcgacgaacgcggctgcgccgtccagagatatcagtgacatgagcaacgtcttcgccaagttgcgcgagatcgcggatctcgcgctgctagcgcgggcggcgcggcggattcttggcgtaggctgccgatcatgcggctgaatacgaactggtcgcggatcgacgtccgccggggcgagcaagctcagcagacgttgaggattgttggcttatcggcgacgccatgacgcgccgatgtgtcaagtctggtctgctatcgaattgcttgtcggcaaagcgtcgctcgacttgaaactggccccacacatcatcgaggatatctccagaccaacgcccgcgaagctacgcacactccttgcgatcgcgaaatcggggaagtgcagcagaagccccccaaacgaggcgacatgcccgagtcgaccgcgaagctcacttgccgaggagattcgccaagacggactcgatgtgccctgccgatgggtccccgatgaatagtccgctcgaaacttcacgggatattccggtcacacacattccttgcagctaatatcgtccgatcggaggatgc

SEQ ID NO: 4243 - DNA, 437 bp, Zea mays
  Probeset Number=SeqID_18646
cgaaactagtcgatacgaatattgtcgttaacgaattttttgttggataccgtgtaaaacataattccacatatatcatatgtccgactcggtcttcgactcgtccctctccgcctcctacgtcgttgttctctgtgactcctcacgctgtcgagacctcgacgccgcggtgtgatgcaacgccatgggcgcctgcctctacgaggtggcctacggcgacggttcctacaccgtgggcgacttcgccaccgagacgttcacattgcggactccacccccatctacaacgtggacatcgggtgtgaccacgacaacgagggcctcttcgtcggcattgtcgggctgctggcgctcggcggcgggccgctctcgttccagtcccagtatacaaatgacacttattttctagccctaggtgtcgcgacctcgctgtcctc

SEQ ID NO: 4244 - DNA, 966 bp, Zea mays
  misc_feature (5)..(5): n is a, c, g, or t
  misc_feature (7)..(9): n is a, c, g, or t
  misc_feature (12)..(13): n is a, c, g, or t
  misc_feature (15)..(17): n is a, c, g, or t
  misc_feature (19)..(19): n is a, c, g, or t
  misc_feature (25)..(25): n is a, c, g, or t
  misc_feature (33)..(33): n is a, c, g, or t
  misc_feature (35)..(35): n is a, c, g, or t
  misc_feature (40)..(40): n is a, c, g, or t
  misc_feature (42)..(42): n is a, c, g, or t
  misc_feature (45)..(45): n is a, c, g, or t
  misc_feature (51)..(51): n is a, c, g, or t
  misc_feature (53)..(53): n is a, c, g, or t
  misc_feature (55)..(57): n is a, c, g, or t
  misc_feature (61)..(62): n is a, c, g, or t
  misc_feature (64)..(64): n is a, c, g, or t
  misc_feature (70)..(70): n is a, c, g, or t
  misc_feature (76)..(76): n is a, c, g, or t
  misc_feature (78)..(78): n is a, c, g, or t
  misc_feature (81)..(82): n is a, c, g, or t
  misc_feature (86)..(86): n is a, c, g, or t
  misc_feature (94)..(94): n is a, c, g, or t
  misc_feature (110)..(110): n is a, c, g, or t
  misc_feature (112)..(112): n is a, c, g, or t
  misc_feature (139)..(139): n is a, c, g, or t
  misc_feature (146)..(146): n is a, c, g, or t
  misc_feature (149)..(150): n is a, c, g, or t
  misc_feature (152)..(153): n is a, c, g, or t
  misc_feature (156)..(157): n is a, c, g, or t
  misc_feature (163)..(163): n is a, c, g, or t
  misc_feature (181)..(183): n is a, c, g, or t
  misc_feature (810)..(810): n is a, c, g, or t
  misc_feature (833)..(833): n is a, c, g, or t
  misc_feature (837)..(837): n is a, c, g, or t
  misc_feature (848)..(848): n is a, c, g, or t
  misc_feature (853)..(854): n is a, c, g, or t
  misc_feature (861)..(861): n is a, c, g, or t
  misc_feature (867)..(868): n is a, c, g, or t
  misc_feature (870)..(870): n is a, c, g, or t
  misc_feature (872)..(872): n is a, c, g, or t
  misc_feature (875)..(875): n is a, c, g, or t
  misc_feature (878)..(878): n is a, c, g, or t
  misc_feature (885)..(886): n is a, c, g, or t
  misc_feature (890)..(890): n is a, c, g, or t
  misc_feature (894)..(895): n is a, c, g, or t
  misc_feature (897)..(897): n is a, c, g, or t
  misc_feature (911)..(911): n is a, c, g, or t
  misc_feature (914)..(914): n is a, c, g, or t
  misc_feature (918)..(918): n is a, c, g, or t
  misc_feature (920)..(920): n is a, c, g, or t
  misc_feature (925)..(926): n is a, c, g, or t
  misc_feature (933)..(935): n is a, c, g, or t
  misc_feature (941)..(941): n is a, c, g, or t
  misc_feature (947)..(947): n is a, c, g, or t
  misc_feature (949)..(950): n is a, c, g, or t
  misc_feature (952)..(952): n is a, c, g, or t
  misc_feature (956)..(956): n is a, c, g, or t
  misc_feature (959)..(962): n is a, c, g, or t
  Peptide Sequence Number=SeqID_10334
  Probeset Number=SeqID_18647
acttnannnaannannnancatatnaagggatnanaaatnangancaattncntnnncatnngncgcaanttgaangnatnngaancttttaanataacaatgaaaaggnanttgacaaacgattaagttggaaacgcnaggtttncanncnngannttaaanacggccagtaattgtatnnntcatataggcgcattggtccgggccccccctcgagctggtgcgctcgctgggggccgaggtggtgatcgaccacacccgggccgacccgttggcgggacccggcctctatgacatcgtggccgacaccgtcggagcccactcgttcgcggcctgcgagcgcatactcgacgagaacggccgctatctttcggtggcgggcagcctggccgacctgctggcacggccgcgcggcagcaagacctccatcggcggaccggccgaggagcgcgtcgacgacctgcagcagctgatgtcgctggcagcccagggcgcgctcaagccggtgatcgaccgggtgtacggcttcgacgacctgccccaggcccatgcgcatgtggagacggggcgcaagcggggggccgtggtggtcagtctggcgcgggcctgatgttcatcggcatcaccgccgtgcaggtgaccacggccgggctttcaacgccttgatggctccgcaccgcgcgcaccttgccgctcatgccgccccgcagtagaagaggccggcgccatccgattcctgcagcccgggggatccactagttatagagcggccgccaccgcggtggagctcagttttgcaaccacatganggtaattcactttgctattaagnatantgttcctgtgnaattnntttcgtncattcnncnanttnaancggagcnnaagngaanncngggggcaatattanaantacntntggtnncttttgnnnttcatntgggantnntngtanttnnnnaatt

SEQ ID NO: 4245 - DNA, 680 bp, Zea mays
  Peptide Sequence Number=SeqID_10335
  Probeset Number=SeqID_18648
cccacgcgtccgcccacgcgtccgttcactcgtccgcccacgcgtccgcccacgcgtccgagcacagcaccaccgcgctagtcatccccttcgtcgtcccccagcacacacacaccctccctcccgctgcctcagctctggcagcgccgagctggatccggctccggccgcacccgggctgccctcctcatcctgctgctcctcgccctcaacatactccgcccgtcctccgccgccaacttcgagggcttcgactccgacgaccttcccgccgcggccggtggcctcgatgctgacgatgacgaggaaggcctgcgacggcgtcgacctcccgccccctccgccgcatctccctctccgcctccgcgccttcgcctcccgtcacgacgacactccgcgccgaaccctagccccgctacgcctacgcctcggtatcccaaccgggagttcgacctctgcgacgaagacatagaggaagggactacccgtgcccgaagcgatacccactgatcagtccgccgcggcctgcgaggccaacacaacgtatccctccacgctggtaccactgaaagggcaggcgttctacgagacatgaaccaagatgcgcgctccggcatgtaatactttgagggcggctgagaaacggctggatcctgcgaagaggtcctatgccacaacga

SEQ ID NO: 4246 - DNA, 698 bp, Zea mays
  Probeset Number=SeqID_18649
attgggaccctcgaggccggccggggtgaagttatatctctgctcaccagtggctgccttctccgctccgcgctgtgcctcccccataagacttcagcggctgctgcgacccttctgttctccgctcttgcgtcttgcgtgatcgccggcgggacttggagcgggcctttgcacgaatttatctgagggaagaacaaactatacaattcatcctgtctggagggtcgcctgatagtcttccccggtatctggacaaaatagccttagttctctatcaatttccaaggaccatgaactatcttcccagtctgcctgcttgcccattgttgtactacgcgcttctggagaccttgctacacaagaaaactttcccagcgctctttcaccttttccagaagggatgtctgcaatctggagaagcccatatatttgggtacgtcgagatcaatactctttctgatgatggattaagagaacgcattcgtggatacctcaagggagcttcagatgaacatctttctcagtgtttgcaggtactacaatatggtagtggctcctatgatagggatggaacgatttgagtgatctatattacgctagctctgagcatgatagcttcacaacaacaatggctcgggaagctaccgcaaatgattatgatttggcatggcctccatcagtctacccatcagcatgca

SEQ ID NO: 4247 - DNA, 1196 bp, Zea mays
  Peptide Sequence Number=SeqID_10336
  Probeset Number=SeqID_18650
ggctcgaggtctacgtcgctgtcaacggccctgatgtcaccctcaccgatgtcctcactgctaccgtcactgatcagtctaccctgaccaccaccttcaccaccaccatctccgatgccactgccacccagacccagaccgtcactgccatctacgtctgctccaacggcaagtgctaccccgagaacgacagcggctccaaggttgtcttcatcttcgttggttaccccggtgaggactgcgacggcgagctcgtctacatctccgaggcctgctcttgccagggtggatctcaatacgtccccaagtactgctctaacggcagctgccacggcctcactgtctacaagcctgaggagtgcaaggactggtacaaccacgacaacttcttcgttcccgccaactgcgatgtctgcgagcacggtgatatcgtctacaagccttgggagaactcctggggtacccccgctgagtgccacgaggctgagatccccagctgcaccaaggatacctgccctaccaacggcggtggctccaagggaggcaatggcggcaacggtggcagcggcggaaacggtggaaacggaggtaatggcggcaacggtggaaacggaggtagcggcggcaatggaggtaacggtggaagcggaggcaacggtggatcaggctccaacggtggatcaggctccaacggtggatcaggctccaacggtggatccggctccaacggtggctctggttcctctggttccaacggcggctctggctctgagggctctggctccaagggcagctccggttccgagggttccggctccaagggcagctccggatctgagggctccggctccaagggcgagagcggctccagctgcgagggtgaccactgtgtccccgtcactgtcagcagcgctggcaagcaggccgtcagcgcccttgctctcctcgctgctgttgccgctcttctctaagcgacttgacacagcttgagtttctgatcttgaacctttgccttcctttctgggtttctctttgggaagatccgcaatacaaatggtggcattgtcttgtgccaccgactttgtagttagacttaatgcagtttcaattctaccggggttttgggaaatgccctatctgtagtcaactaataatgacgttctttttgctttcaaaaaaaaaaaaaaaaaaaaagg

SEQ ID NO: 4248 - DNA, 360 bp, Zea mays
  misc_feature (93)..(93): n is a, c, g, or t
  misc_feature (101)..(101): n is a, c, g, or t
  misc_feature (114)..(114): n is a, c, g, or t
  misc_feature (122)..(122): n is a, c, g, or t
  misc_feature (129)..(129): n is a, c, g, or t
  misc_feature (150)..(150): n is a, c, g, or t
  misc_feature (231)..(231): n is a, c, g, or t
  misc_feature (253)..(253): n is a, c, g, or t
  misc_feature (264)..(264): n is a, c, g, or t
  misc_feature (305)..(309): n is a, c, g, or t
  misc_feature (313)..(313): n is a, c, g, or t
  misc_feature (323)..(329): n is a, c, g, or t
  misc_feature (333)..(333): n is a, c, g, or t
  misc_feature (337)..(338): n is a, c, g, or t
  misc_feature (340)..(340): n is a, c, g, or t
  misc_feature (343)..(343): n is a, c, g, or t
  misc_feature (345)..(345): n is a, c, g, or t
  misc_feature (349)..(350): n is a, c, g, or t
  misc_feature (353)..(353): n is a, c, g, or t
  misc_feature (357)..(357): n is a, c, g, or t
  Peptide Sequence Number=SeqID_10337
  Probeset Number=SeqID_18651
gctggagctccccgcggtggcggccgctctagaactagtggatcccccgggctgcaggccccccccccccccccccccggtctccatctctgntaatctgngaaactaatcatnatcgtctncagtctncctagtccctgctgccgctgncgcttgtcgctgacgccgtcgcttcttcggatttaagctggcaggggggaacaaaaccggttcggcttttcttcggtcggnccccgaacaagttggttccttnccgggaactcnaacccttaaaggttttaaatttggttggaaaagggcttttnnnnnttgnggaaaaaaannnnnnngggntttnnanaangngggnnttnaatnggg

SEQ ID NO: 4249 - DNA, 654 bp, Zea mays
  misc_feature (601)..(654): n is a, c, g, or t
  Probeset Number=SeqID_18652
agcacaatgcttcgcataccaataaaaagtaagtaataatattacagactagagccatttacataatatcaatcaaagcacacagaatcgaaacgtagccaacgtaaacaaacccaccacaggcagctgactgtggtgaaacgctagcctaaaccacgaactcgccgaagtcctggcactcctggggatccgcctcgacgctttcttctttacctgagcatagattgcaccaaaggcaaccttcaccaaacagatgctcaggatcttcagccttgtagaactcgaagagtttgatctcttggtcgccgaagcttgactgtcgattcctcgaagctcagaaacgaatcgcgatcagagaagaaggctcgccggaggaagactgcgttggtgggttgcgctggctggccgcgccacaccggggatcggaagccgaggccggcggcctccatggctgcgcgccagggatgaggaaggagcagatacgctgggcacatggttgtcgggtcctcgcgtcgtgggagagacggtttgaaggggagaggagtgggggcgcgtgggacccgcggctaggcagaggccgggcgcggacactccgtgtggnnnnnnnnnnnnnnnnnnnnnnnnnnnnnnnnnnnnnnnnnnnnnnnnnnnnnn

SEQ ID NO: 4250 - DNA, 576 bp, Zea mays
  misc_feature (8)..(8): n is a, c, g, or t
  misc_feature (14)..(14): n is a, c, g, or t
  misc_feature (93)..(93): n is a, c, g, or t
  Peptide Sequence Number=SeqID_10350
  Probeset Number=SeqID_18653
aaaaatanaaacgngagccccttctcgtttggagatccccaccctgacagcaccccaaagacggcaaggaagataccccgcaagaaggtcaancacctccccggcaacgacatcttcaagggacacgccccgccagcttccccagagaagcatctgacgccccgcgatgctgaaggagctccctggaagccacattttcgcagatgggaaggaacccctccgcgagcgtgtggcgcggaacccgcaccccccctggcggtgagcgcagcctcgcgctgatttagcataacccgggactcagtgtccccccctagaggaggatttcccccagccccaggcagcaggctgttggatcctcagtttggtgtcttgttcctgatcaaggccccgcagtgaagggccccgttttactcccccccatgtttattacctgttggtgtgcgcatgtttgctttggctgtgagatccccaccccgtcctcctcaatcagcgcagtgtgtagtgtgcacggttgatgtgttttcaccaataatagctcgagtctgccccaaaaaaaaaaaaaaaacaaaacaaagc

SEQ ID NO: 4251 - DNA, 229 bp, Zea mays
  Peptide Sequence Number=SeqID_10351
  Probeset Number=SeqID_18654
cggattggttttctgggacagaacctcgtgttcgctgagctgctgacgtcgtttgtctattattttcagatcaagaaattacaggtgtgtttattggctgttgaaggttgtgctgctcttggccaattgttggagctgcaatattgtgtagctcacattttccaatcattatcaatttctcccaggacaagtcacaacatataaagctctggtctcggcacaagcacac

SEQ ID NO: 4252 - DNA, 880 bp, Zea mays
  Probeset Number=SeqID_18655
ccgtcccctctttctcccccttcctccgccccacccgacgccctcgccgcctccagcttcttccaatccccccctttccgtctagggttttgcttccttccccagaaaaatcgaggccgaccccctaatccccgagcgcgtcgcgcctcgccgaccggtcgccggagatgtcccgcacgctggtgcagccggtggggcagaagcggctgaccaacgtggccgtggtgcggctgcgcaagggcggccagcggttcgagatcgcctgcttccccaacaaggtggtcaactggcgcgaccgcgtcgagaaggacctcgacgaggtgctccagtcccacaacgtctactccaacgtctccaagggcgtcctcgccaagtccaaggacctcatcaggatcttcggcaccgacgacctcgtcgaaatctgcgtcgagattttggagaaaggggagctccaggtttctggcgaggagagggaggcgcagctgtccgcgcagttcagggacatcgccaccatcgtgatggagaagactatcagtactgagacccggcgcccctacaccatgaacatgatcgagcgcatcatgcacgagatacactttgccgtcgatccaaaccttacctccaaggaacaggcactgagagttattaagaagctaatcgagcacttaccctgaatacaagataaagcgggcaccctttgggcagtgcggttcactgcacctaagcccaatcttcctggccttatggggaagctcggcgggtgggatgctattgtctctttcaaaggatgagtcggccgctactcagccttctattgtaagtctactggttcttgttctctgtggttaaaaaaaaaaaaaaaaaaaaaaaggggggcccc

SEQ ID NO: 4253 - DNA, 595 bp, Zea mays
  Peptide Sequence Number=SeqID_10352
  Probeset Number=SeqID_18656
atgcgcatcgtcctcatcaccggcatctccggctcaggcaagtccgtcgcgctgaacgcgctcgaggacgcaggctactactgcgtcgacaacctgccgccgcacgtgctccccgaactcgcccgctatcttgccgagggcggccagcatcggctcgcggtcgcgatcgatgcgcgttcgagcgcgtcgctcgatgaaatgcccggcctgatccgcgcgctgtcgctcgagcacgatgtccgcgtgctgttcctcaacgcaagcacgcaggcgctgatccagcgcttctccgaaacgcggcgccgccatccgctgtccggctcgccgtcgtcgctcgaggaagcgatcgagcgcgaacgcgatctcgtcgcgccgctcgccgaattcggtcaccagatcgatacgagcacgttgcgcgcgaacgtgttgcgcacgtgggtcaagcgcttcatcgagcagaagaacaacgacctgatggtgatgttcgaatcgttcggcttcaagcgcggcgtgccgctcgacgccgatctgatgttcgacgtgcgcgcgctgccgaacccgtactacgaccatgagctgcgcccgctcaccgggc

SEQ ID NO: 4254 - DNA, 586 bp, Zea mays
  Peptide Sequence Number=SeqID_10353
  Probeset Number=SeqID_18657
tcatccggggccccgttcccctgtcgctggaacggctgtcccccctccaaaagctggactttagctacaaccccctgtgcgggccgctccccaaggggcccggggtcttcaagcccgggtgcaaaccgtacgggcccaaccagttccccaaagggacccccctcccgggctgccaggaccttgagtggagtgagttacccgggggccaaggttttttaaactctgctttgctttccctcgccggggtggttttcgcttcccgatcgtggtgtgtgtaaggaactaaggacgccggtgcctggtttaggcgtttagctataaacgaaagcccgttcggccgcgtgcttggtttagctacccggccggttgatcttgaccagttaagcgtgtacgaaacgacagccctgtgtacgtgtgtactgtctgttaaagtgtaaaatgtactgtctgtgtgtatttggtatggatccgatcggcctaatgtatgaaaaggatgtttacgtactatataaaaatggaaaatcgtatttgcctaaaaaaaaaaaaaaaaaaaaaaaaaaaaaaaaaaaaaaaaaaaaaaaaaaaa

SEQ ID NO: 4255 - DNA, 3481 bp, Zea mays
  Peptide Sequence Number=SeqID_10354
  Probeset Number=SeqID_18658
attgggtccctcgaggccggccgggcccgccatccccccctgctagggtcacacccgctctctgccgactgcgtgaaacaccagcgccggtcaccgggcaggacgatgcccctccccaaacagagaggggcggttgatcatgcgtgccgctcctggtggagggcgtggaatagctgggcaggcggcaagcatgggtttgggaggtatggtttcgctctcgaacttggttccgctatgccgcacaaaagttcgagtactgcggttccctctcatttaagaaatataatgatgtgcgtcagatcatctagcacacaacttactgatgtgttacacataaaatttattccaaggcaacctcacctacgtgtgtcggaccaaaggggaaaaagccatggtctcccttcgcatctaatttattccaaggcaagctcacccacgtaaagtccgaaaaaaggggaacaaggacatggttgtcggcacgtctcccactggggtgaaacccaacgaaaccagataatttaattattcttagacggatggtaggcaaactggaatttgttagggtggaggtggtagtacgatttgtttcatgttcaaacatactaattccagttacataatacaaatttgatttgatgttctattctcttatgtctttgtgtgtaggatgcaaggattcttcgaaggaactttgtgattgaactattaagttatgaggacaattcatgacgctatgtcatccctgcaaacatacaacagagacttatcaatatctctacaaaggaatagattagtgtacgattgtcgatatattgtttgttttcatgtaattgttgtgcactcgcgttttattaataatttgtgagtcgtcgcaacgcacagacacctaactatcatatatatataggtgtgcatgatattgatggttgcaatatagtggtgaaacaggtagattaaaataataaatttatatgtatagccaggatcaccaatggattacaaaatcttttctcataacaatataacacatttatatataagttatcctgatattatatgttcctgttgcaacgcacgagcactaacctagtaaactaaataaggttctctatgggcttaagcaagcaccaagagcatgatatgaatgccttagagattttcttatcgaaaatcaatttaaagttggaaaagtctatccgacactcttcaccaagggagtggtcaaaggttcatttatttgccaaatatatgttgatgatattatttttggctcaacaaaccgttcatattgtaaaaagtttagcaatattatggtcaagaaatttgagatatctatgctgggagagttgaagtttttcttaggatttcaaatcaagcaactcaagaaaggcaccttcatttgccaaatgaagtacacccacggcatactcaagaagttcggtatgaatgatgcaaagcccatcaagagacccatgaggacaaatggacaccttgacatcgacatgagaggtaagtaatatatcaaaaggtatattgatctatgatatgatctctactagattagatattatgcttagtgtatgcatgtatgaaagatttcaagacaacactaaagaatgtcatcttagggttattaagagaatcatgcagtatttagttcatacaccaaacccagggctatgatattgaaaaggtaaaaagtttatctcattggatattctaatacaaattatgttggatgtaaggtcgataggaaagcatgtcagggacatgttaattcttgggtaggtctctagtatcatggtcttcaaagaaacaaaattccattgctctttccaccgccgaggtccaatatattgtagcagaacattgttgggcttaattacttcggatgaggtaaaccttaaaggactttggctacaatataagcaaagtccatctcctatgtgatagtgagggcgtaattagaatgatagatagcccagttgatcacgaccgcacaaaacacataaacattcaatatcatttcttgggagatcattcacacaagggggatatcgtgatagaccatgtgagctcaaacaagcaattagccgatatcttcaccaagcctctagatgagagaaagttttgtggtcttaggaataaactaaatattattaattctcgtaacatggattgaaatattgcacgtcatgatattttatatgcctttgatcatgaataactttcaattggtacttacaattggcatcattttatacatttatgccagtgtaacaccctaaatccatcaattaaagataacttaagtttatattattaattttcagtagaaaggaaaatatttatgtgttcaaataatgaaatggtgctataaataaatttaatgatttcttgattacataaaattttgtcaagtgtttgatacattcatgaagaagcataaattttgtttgatgtgtccattttttttatttaagttgttgtgaaaatcttattttagaaaataataacgactttttgaaatgtttttttacaaatatggattttgataggttttatttgatttaaatttcagattttaaactttggaattaatctttgtgaaaaaaaatctccatgcataaaataagaatgaatagttaaagtatttttttaaaaaaaaaagtgtgcatttttattcgttaataacattcgttagttcattctatttgtagaaatatatgtatatttctagagatatatatatatttatttatatatatatacacacgtaaatgcattatttgagatttatttcttggtacgaaactttccataaaattataatgaattgttatgatgttttgcgaaaaacgtattttaaaatgttaataatttatttgattttagtatgaatttttggaatatatgtaaaagatatcctgttatttaaaagaaaaaaagagaaacgtttttggaaaaagaaaacaaaaaaaactaaaacgctcccacttcctacgatcggatgaatccaggtagtctgtcaacacatcttccacttacatgcgggcccacttcttttctcaccacgagtggacccacacgtcatgctgttccttcggctattttcttctccggccgttcgtaactctcatctgcgcttactgaatcgccgccagcacgccaaccgaagcccgactgccccaaccctgccgcgaccccgacggtcgcgctcctacgcccgccgagtagcgccccgacccggccgaccacgcgcagcttcacacgttgcgcagccgcgaccccgcccgtacaccatcgctgtgcccagctcgccgtcgtgcctcgccggagacgtgcccgaaccccatccaagcctcgccgatcccgccgtgcctagccttcgccatcgcgtgctcgagggggggcccggtaccaagtcgcactatagcgagtcgtattacgattcactgccccgccttttacaacgtcgtga

SEQ ID NO: 4256 - DNA, 572 bp, Zea mays
  misc_feature (43)..(43): n is a, c, g, or t
  misc_feature (81)..(81): n is a, c, g, or t
  misc_feature (95)..(95): n is a, c, g, or t
  misc_feature (142)..(142): n is a, c, g, or t
  misc_feature (149)..(149): n is a, c, g, or t
  misc_feature (200)..(200): n is a, c, g, or t
  misc_feature (238)..(238): n is a, c, g, or t
  misc_feature (335)..(335): n is a, c, g, or t
  misc_feature (340)..(340): n is a, c, g, or t
  misc_feature (372)..(372): n is a, c, g, or t
  misc_feature (416)..(416): n is a, c, g, or t
  misc_feature (435)..(435): n is a, c, g, or t
  misc_feature (439)..(440): n is a, c, g, or t
  misc_feature (456)..(456): n is a, c, g, or t
  misc_feature (460)..(460): n is a, c, g, or t
  misc_feature (471)..(471): n is a, c, g, or t
  misc_feature (473)..(473): n is a, c, g, or t
  misc_feature (497)..(497): n is a, c, g, or t
  misc_feature (506)..(506): n is a, c, g, or t
  misc_feature (514)..(514): n is a, c, g, or t
  misc_feature (542)..(542): n is a, c, g, or t
  misc_feature (544)..(544): n is a, c, g, or t
  misc_feature (568)..(568): n is a, c, g, or t
  Peptide Sequence Number=SeqID_10355
  Probeset Number=SeqID_18659
aaaagctggagctccaccgcggtggcgggcgctctagaactantggatcccacgggctgcaggggagagaggtcactaatncccccccccccccncatccagcgtggagggcccaggcccacacgtcatgtaattggcgcgncggttgntacgtgcgaaaaatgcacggccacttacgccaatgtcgcacctcctcgacnacgaaaccggtgccgtgactcgaggcaaccctgcgctnggcccaatagtgccaaaccaagcacatcggtcacagggtcagtcagccgcaaggaaaaggcgcgacgggtcgaattggcaaaagtggggccgggaanaaagngcggcggcaggcggggggaagagcagtcaaanttgttggtaggctcacggtcccttttgggggaagcaaggggagncctcttcccaccggcgtgnaaannaagccgcccgtggttncgtncctcgaacggntncacacaacgggtggcccgcggaancacttcgtncccgtcgnttgacttccgcgggtaagggaggggganancgttgggaaggggaaacgggcgangcct

SEQ ID NO: 4257 - DNA, 308 bp, Zea mays
  Probeset Number=SeqID_18660
tgagtcgtgatttgcactccaatatacggtttgacctgcgcgtgcaatttggtgagcatcctcccgtaggttggtaacatgtatcgcttgccctttaagttcctgttcgtttttgagactgtaatatgctgcttcttttgcgccctttactgtgtgcttttttggtgacaggagccgttataagttgtttttgtgtaacattttagtctgctccatgcgtccatgccagtttctccttagatttggttctgttaaatccaagcactcgtttcactcagtacagtgttcatctgcaggcttttttcagt

SEQ ID NO: 4258 - DNA, 745 bp, Zea mays
  Peptide Sequence Number=SeqID_10356
  Probeset Number=SeqID_18661
gaaaaaaaaaaaaaaaaaaaaaaaaaaaaaaaaaaaaaaaaaaaaaaaaaaaaaaaaaaaaaaaaaaaaaaattaggggttttacgccgggaaccccgaatcccgctcctccgccgcctcgggtccgcccttcctcttggggcgctccgatccaaaagaggggggggccgctgctgacaaaaaaaatcgggaaaaagggggtcaagcagttcaagaggccccatctcgaccgctataagggccttaagccaagctggggcaggccaaagggtattgactcccgggttaggaggaagttcaagggatgccccttgatgcccaacattggttatggttttgacaaatcaaccaggccctacctccccaacaagttcaaaaagtttgtggtccccaacgtttttgagctggagttgctcatgatgcacaacaggacctactgcgctgaaattgctcacaacgtttcaaccaaaaagcgcaaggagatcgtggagcgtgctgcgcagctcgacattgtggtcacgaacaagctcgccaggctccccagccaggaggacgagtagtttggtttcttgtcataacggccaactggatgttgccattcccggctgtaggaaactactttgcttgtgttttgttagtactgaaaaccagagtccctcctacctttttgcaatcagtagctaataaaatgtggcagattcccctaaaaaaaaaaaaaaaagaaaaaagaaaaaaaaaaaaaaaa

SEQ ID NO: 4259 - DNA, 475 bp, Zea mays
  misc_feature (295)..(295): n is a, c, g, or t
  Peptide Sequence Number=SeqID_10357
  Probeset Number=SeqID_18662
ccccacaagccggggaaggaagggtgatattcataaaacatggtggtggccgggccaggatcaggatccgcgaacgatgacccgtcggagtcggacttaaggcacgtggaaacgcagatcttgtttgacctcttgataatgtgcgtcaatggagtggagcgagacaagcaggagtgtaagaagatcttctccgaggatgggtttcaggactacaggattataccgcttttgggcgttcgatccatcatcgagcttctatccctaattaaaatttctgtcccccctccaattgaanagctaagctcgccactcgcgacaagcttgttgtggctgggcgtgtggtggtgatcgaacgtgtgtttgccatggtcagggatccatgcatgctatatgtaataaaataacatccgctacatgaccgattaaatcggtataagatcaccaaaaaaaaaaataaaataaagagaaaatatta

SEQ ID NO: 4260 - DNA, 410 bp, Zea mays
  Peptide Sequence Number=SeqID_10358
  Probeset Number=SeqID_18663
aaccgaaagcctctccccaaaatctcaaaacaccgatccatttctccggcgataaatcgacgatctcgatccgatggcgaaggaaccagttcgcgttctcgttaccggtgctgcaggacaaattggatacgctcttgtccctatgattgcaaggggtatcatgcttggtgctgaccagccagtgatcctccacatgttggatattccctttgctgctgaagctctcaacggtgtcaagatggagttgatcgatgctgctttccctcttctcaaaggtgttgttgctacaactgatgccgttgagggatgtactggagtcaacgttgctgttatggttggtggtttcccgaggaaagaaggaatggagaggaaggatgtcatgtccaagaatgtctccatttacaagtccc

SEQ ID NO: 4261 - DNA, 519 bp, Zea mays
  Peptide Sequence Number=SeqID_10359
  Probeset Number=SeqID_18664
ataggagctgtatttgcgatcatgggagggttcattcactgattcccgttatttactggttatacactacatgaaacatgagcaaaaatccattttggagtaatatttgctggtgttaatttaaccttcttccctcaacattttttaggcttagccggaatacctcgacgatactctgactacccagacgcttatacattatgaaataacatctcatctatcgggtccttaatttctcttgttgccgtaattatgataatattcattatctgagaagcatttgcagctaaacgagaagttacacttacagaattaacatcaaccaatattgagtgacttcacggctgcccacctccttaccatacctttgaagaaccagccttcgttcaaattcaaccatcaaataattagtcgaaaaaagagggaatcgaacccccatactctgatttcaagtcagttgcatcaccggtcaaccattttcttactaataaactattaaaaaaaaaaaaaaaaaaaaaa

SEQ ID NO: 4262 - DNA, 597 bp, Zea mays
  Peptide Sequence Number=SeqID_10360
  Probeset Number=SeqID_18665
ggagagagagtgagagaggagaagatgaagttcaaccctagagtatcgagcagccgccgcaagagccgtaaggctcatttcacggcaccgtcgagcgtccggcgtgtgctgatgagtgcgcctctttcgacggatctccgatcaaagtacaacgtccggtcagtgccggtaaggaaggaggacgaggtgcaggtggtgcgtgggacctacaagggacgtgagggtaaggtgactcaggtgtaccgtcgcaagtgggtgatccacatcgagcgcatcacacgtgagaaggttaacggctccactgtcaatgttggcattaacccttccaaggttgttatcacaaagctcaggctcgacaaggatcgcaagtctcttctcgatcgcaaggccaagggtcgcgccgccgctgataaagagaagggcaccaagttcgcaccagaggacatcatgcagaccgtcgattagtctctttctctctctttctcttttattatttactttcaaaaaaacccaaatatatgagacttttgagcttattgtagtctttttgaatcttaactattcattttgctttattgttgatcaatccttttgacg

SEQ ID NO: 4263 - DNA, 1026 bp, Zea mays
  misc_feature (1)..(41): n is a, c, g, or t
  misc_feature (936)..(1026): n is a, c, g, or t
  Peptide Sequence Number=SeqID_10361
  Probeset Number=SeqID_18666
nnnnnnnnnnnnnnnnnnnnnnnnnnnnnnnnnnnnnnnnnaaagatttgtgagagtgatccggcgctgagaagagatggctaagatcgccgcagccgccgcggcggcggcggcgctgtgcttcgcggccctggtggccgtggccgtctgccaaggcgaggtcgagcggcagaggctcagggacctgcagtgctggcaggaggtccaggagagcccgctcgacgcgtgccgccaggtcctcgaccggcagctaaccggcggcggcgtcggcggcccgttccggtggggcaccgggctccggatgcggtgctgccagcagctccaggacgtgagccgcgagtgccgctgcgccgccatccggagcatggtcaggggctacgaggaggccatgccgccgccggagaaaggctggtggccatgggggcggcagcagcagccgccgccgcagggaggaggaggaggaggaggacaggggggctactactacccctgcagccggccaggagagggatacggctacggtcagggtggccagcggcagatgtatccaccctgtcgtcccggcaccaccggcggcgggccaaggatcggccgcgtgaggcttacgaaggcccgggagtacgccgccgggttgccgatgatgtgccggctgtcggagccccaggagtgcagcgtcttctccggcggcgaccagtactagctaccatggttaaaaaaaaagagagtgagtcggcgcgaggtgcaaggcgcagcatgtgtactgtgcgcgtgcaaatccagaatgacgtagttctgacgtgggctcgcattgtcgcgtgttcacaataatgataataactatgaggaataaatatgggaatgttgcccgataaaaaaaaaaaaaaaaaaaaaaaaaaaaaaaagaaaaaaaaaaaaaaaaaaaaaaaaaaaaacccnnnnnnnnnnnnnnnnnnnnnnnnnnnnnnnnnnnnnnnnnnnnnnnnnnnnnnnnnnnnnnnnnnnnnnnnnnnnnnnnnnnnnnnnnnn

SEQ ID NO: 4264 - DNA, 629 bp, Zea mays
  misc_feature (579)..(579): n is a, c, g, or t
  Peptide Sequence Number=SeqID_10362
  Probeset Number=SeqID_18667
tatttcggcacgagggttgggggggggggggggggccccacaatatggatcaccccgcagcgcacccttgcgcagaaaattctcctcttactccaaacactccatatggcccaccaaagctcctggttcaagatatttgccgggatatctaccgttcatatcctgaatggaacatcatggggggggggtacttcatttcttttgtgggcgcatcctaggggatatctcggggaggacccacgaggaattcccaacaacctcatgccctatgtgcagcaaggtgcggctggtaggaggccagctctaacagggttatgaaatgactatgccacaagagatgggactgcggtaattcgtgctgcgtatgacgagcgcaattgtgctgatctgggataccattcagattgattaatcggatgcctttgaagctgggtattccaaatagaactgcgtgggcaattttctaggcaaaacggcaataagtgctgtggcagggcctagcactaacaagaggtatgagaactctcatctcttccttaaaaaacgtgactagggctgggtatatgacttactgcctantgaatagacccggcttgttgaagatgatctttaactacacaggacttcct

SEQ ID NO: 4265 - DNA, 307 bp, Zea mays
  Peptide Sequence Number=SeqID_10363
  Probeset Number=SeqID_18668
cacctaacctacaagaacaacttcacatacgctgaaacagcagcgggcagggaccggcaccaccagcgcaacgtggcgctcggacacatcgagcaccaccgcctcgccggcgtcgtcctcttcgcgggcctcggcgacgtgttcgatctccgcttcttcgacgagctcaggggaatcagcgcgttccgcgcgtggccgattgctacgatgcgggcgcgcgagaggtaggtggttgtcaggggcaacgcctcatcttcattacctgaatccgcctggttcccccaggacttgggcggcaaaggcaaaa

SEQ ID NO: 4266 - DNA, 634 bp, Zea mays
  misc_feature (11)..(11): n is a, c, g, or t
  misc_feature (13)..(13): n is a, c, g, or t
  misc_feature (601)..(634): n is a, c, g, or t
  Peptide Sequence Number=SeqID_10364
  Probeset Number=SeqID_18669
agcggcgagtngnggggtagggaggggggagagggcgggggggggagggggggggggggagggggatgtataaggggggtgagtatggggcgaattgggtaccgggcccccccctcgagtcgttttgctgctgcaacgatgtgggattccccgagaacccagaagctgggacgagcaacggaaggagaggcacaagatgtggagagccctctgatcccatggcttatttaccttgtcaggaaccaaaccgacagcgagaggctctcagctgcagcaatactcacaggactcttcaaagcgggccttggcacacaaggaacccgcgagacaagtcttggcctgctcgtcgtgccgattcttgttggcatgatctcaaggaatgacaaggacaaaccaaatagtgagcatgagaatgagcgcaggcgcattttggaaagagctccagccgttcttgcccaccttattgcggacagcgaagttcttcagaaagcggcgttcgactgcgatgccgtaactatcctggggggggggggggactagtgagctctctctctctctctctctcctcgtgccgaattcctgcagcccgggggatccactnnnnnnnnnnnnnnnnnnnnnnnnnnnnnnnnnn

SEQ ID NO: 4267 - DNA, 722 bp, Zea mays
  misc_feature (1)..(119): n is a, c, g, or t
  misc_feature (720)..(722): n is a, c, g, or t
  Peptide Sequence Number=SeqID_10365
  Probeset Number=SeqID_18670
nnnnnnnnnnnnnnnnnnnnnnnnnnnnnnnnnnnnnnnnnnnnnnnnnnnnnnnnnnnnnnnnnnnnnnnnnnnnnnnnnnnnnnnnnnnnnnnnnnnnnnnnnnnnnnnnnnnnnnnttggattcctaccagttttctcaatatttgtgtttgatgtgcacaatttcactggaatgcttctaacaattgtcttttctttgcaaactgtagttgagcaagttgctgactgagcaatagtggattaacgggacagcaacttcgcttcagtggtgtagtttgtaaaggttgctgactgctatagagagtacatgatatccattttttcccagcggtattaagcatgtgatgtgctcgaggattggcttatccatatacgaagttgcacccgcaattaatcaacacttccatctttgtgcccgataggaaattttgtgcttccctttctacatgtagatcaggtcttaggtgtcgaagacattttatagcctatcatgaggtactcgtttcacggagatggtatatgatataggtgatcggagtgatattttacaaggtgcatatagtagcttgtcgaactgagaatgtttttacctgtgatgtacatcggacttgggagctttgtatcattgtgttacaccttttcaatggtggcgaataaatttacagcagatgttttcaatagcctttttagtaaatgtgtgaacgatttgcgttgtgnnn

SEQ ID NO: 4268 - DNA, 604 bp, Zea mays
  Probeset Number=SeqID_18671
cgggcgcgtgggcagctcggcagtcccccgctcgaggtattccattcgcagtcgaccgggtcctcggagcgccggagatcacgatgaagttcattgctgcctacctgcttgctgttcttgctggtaactccagccccctcagctgagggacttgacagccattctggagtcagttggctgtgaagttgacaatgaaaggatggaactcctgctgtcccaactgagcggtaaggacattaccgagctcattgctgcgggcagggagaagtttgtttcagtcccatgtggcggtggcggtgtagctgttgcggcatctgcccctgctcctgggggagctgctcctgcagctgaggcgaaaaaagaaaagaaggtggaagagaaggaagaaagtgatgatgacatgggcttcaccctcttcgaataagctgcgcagtcatagagtattattttgggcagtggtcccagccgaaacccagagtcatgtttagattttacccttgttttgtgtggaaatttctggaaagacagcacctgtcttcatattttgtattcacccgtagattgctatgctggttggggtttactggtgacccaaagtttctct

SEQ ID NO: 4269 - DNA, 717 bp, Zea mays
  misc_feature (601)..(717): n is a, c, g, or t
  Peptide Sequence Number=SeqID_10366
  Probeset Number=SeqID_18672
cctccccgcggtgccccccgcgctggcgcccgcgcttcccccgggcggccccccggccgcccggggtgcggccccacgagtccccccccccccccaacgggtggaaaattagaattatgtgttgtttgtgaataaagataggcatataaagggacaaaattaacgaatctctctgataatccagtatcattgaatattatgctatatatctgaaagcagaggtcagaaaaaatcaatcgataacgtttctctcgtggatatcttgcttttactttttttaatttggctggaacttctgctcgcactttttaactcttcctgcctctagcacaatctctatatcctgtcgcaagtactacatataccattgatcattgccttcaatggatcgtggtccaaaataaatggatctatgtgcatcattgaaattcaacgaccatgtgaatggtagtcagttggcagatataacctggagcagtcggccgtgctaacttgccccgggctgccctgtttgcagctcctgttgtgtttcctggtttcgacttcctgtcttcgtttgcccctactggacccagggcacccgccttctctccatagcctnnnnnnnnnnnnnnnnnnnnnnnnnnnnnnnnnnnnnnnnnnnnnnnnnnnnnnnnnnnnnnnnnnnnnnnnnnnnnnnnnnnnnnnnnnnnnnnnnnnnnnnnnnnnnnnnnnnnn

SEQ ID NO: 4270 - DNA, 512 bp, Zea mays
  Probeset Number=SeqID_18673
tccccatttccgccgggccccccgggggggtggtcaaccccttgtaccctgggggcagttttgccccccccggcctggccggggcccccgaggcctttcccgggctcaaggtgaaggggctcaagaccggccccccccccatgttttccatgttggggttttttgtccaggccattgtccccggcaagggccccctcgaaaacctccctgcccccatcgttggccccgtcaacaccaaggcatgggcctacccccccaatttggtccccggcaattaagctccccggctatgctatgcaacttctttgtctttcggatcggaaagggtgtccgcccgtggatttatttatgctgccaaaggcatgtgtgtcttttgtttcccgttcccttgcataggccagtcgagattatgagttggcgttgtcccctaagatgacccctgtttgtcccaaaggggtggtttttgtttccccccgggttaattgttgaaaccccctaatttgttttctccc

SEQ ID NO: 4271 - DNA, 602 bp, Zea mays
  misc_feature (601)..(602): n is a, c, g, or t
  Peptide Sequence Number=SeqID_10367
  Probeset Number=SeqID_18674
ataaaaagtcttggcacatgtctcgcgtcttaccgggattgacccgccgcctctacgcccctccagtctcctctgtcatggccggcggcaaactattcggtcgagcgctgagctacgttgtcaaccagttcctcgtcgagggcctcgccaacaaccgtgcagtccagaggtttgctgtgaagaccaacaagactcttgagagcctatcgtctaaagccaaggaaatgagggaggagttatcggaacaattcaaggatgctcgtggccagaaagatcacttcaagcagtgaagccgatccccaaagttgattcaacgacacgaatctagctatgagttttttctagttctcgtccgggtcctatttatgaatggcatttgaagggatttcttggtgtcgttcaatggacggatccgttgtataaagtttatctgcacttagattagtagatatattggtagacacacatcactttctgctgcccctttttcataaatacatatatctcgatctctactgtattaaaaaaaaaaaaaaaaaaaaaaaaaaaaaaaaaaaaaaaaaaaaaaacgaaaaaaaaaaaaaaaaaaggcccctagggnn

SEQ ID NO: 4272 - DNA, 447 bp, Zea mays
  Peptide Sequence Number=SeqID_10368
  Probeset Number=SeqID_18675
atttgccttctgcgcctcacactctctcatccccacaccaaaaccaaacacaatgccgcccaagttggacccgagcgcgatcgtcgacgtctacgtccgcgtcaccggaggcgaagtcggagccgccagctccctcgcccccaagatcggtcccctcggtctcgccccgaagaagatcggagaagacatcgccaaggaaaccgccaaggagtggaaaggcctccgcgtcaccgtcaagctaacggtccagaaccgtcaggcgaaggtcacggtggttccgtcagccgcggcgctcgtcatcaaggcgttgaaggagccggagagggaccggaagaaggtgaagaacatcaagcacaacgggaacatttcgtttgacgatgtgattgagatcgcgaggatcatgaggccgaggtcgattgccaaggagctgagtgggaccgtgaggga

SEQ ID NO: 4273 - DNA, 580 bp, Zea mays
  Peptide Sequence Number=SeqID_10369
  Probeset Number=SeqID_18676
ggggaagggggtaccttttcttgggaaccgggttaagcccaagctttccttaattgccaaaaccaaaagttggaaaaacttgccccccaagtggccaaccaccgttaagtgggtggggtgttcaaaaaaggtgcctttcattccttgggttgaattttcaagggtaaagccaaaagcgaacgaaaaaattggtaagtacccccaaatcacggaattgaagcaagggaagccattctgtttggtttcgttgaaagtaatggttcttaattcttaattttcgaaaattttggtatttccattggttcaaatcccgcaaagcacccatgatttagaacgcccccgagagtgccctttccgcatcctcttttttatcagttagtacttggctcctgttgtctcactcggaggctccatgcttcttgctctatctgtatttccttagaagtgattctttacctgctcttatagtctttatagttccatatgaaaggaacgaagtgcatcagaacatcactttatatataggagggcctgtctgtcaaaaaaaaaaaaaaaaaagaaaaaaaaagaagaagagatt

SEQ ID NO: 4274 - DNA, 900 bp, Zea mays
  Probeset Number=SeqID_18677
tgcctgcaggtcgactctagagcctccactaaatatgtaacatctagtgatgaggataactctagtgatgatgaggataatttgcttgctctttttgccaacctcaacatgtaacaaaaggaaaaattaaatgaattaataggagctattcatgagaaggatgaactcttggatagccaagaggactttctaattaaagaagataagaagcatgttaaggtcaaaaatgcttatgctcaggaagtagaaaaatgtgaaaaattaactagtgagctaagcacttgccatgatactatttccaaccttagaaatgagaatgttaaattaattgctaaggttgaggatttaaatgattgtgatgattctcttgtcaaacttaaaaataataatgctaatttgattgctaagattgacaagttgaatgaatcaattgctagccttaatatagaaaatgataaattgattacaaagactaaaaatgtttgtgtttgtgctatttttgttcttagtcatgaaaatgccatgttacatgctaagattgatgaactaaatgtgtgcaaaccctcaacttctagtgttgatcatgtttctatttgtactagatgtagagacattaatgttgatgctattcatgattacctagctttaattaaacaacaaaatgatcacatagctcaacttagtgctaaaattaatgagcatgacttagaaaatgaaaaatttaaatttgctagaagcatgctctatagtgggagacgccctgtcatcaaggatggcattggcttccaacagggaggcaatgtcaagcttaatgccactaaaagattgtctaattttgttaagggcaaggctaccatcctcaggataataaggactatattttatatcatgctggttatc

SEQ ID NO: 4275 - DNA, 748 bp, Zea mays
  misc_feature (30)..(30): n is a, c, g, or t
  misc_feature (61)..(61): n is a, c, g, or t
  misc_feature (71)..(71): n is a, c, g, or t
  misc_feature (73)..(75): n is a, c, g, or t
  misc_feature (119)..(120): n is a, c, g, or t
  misc_feature (129)..(129): n is a, c, g, or t
  misc_feature (142)..(142): n is a, c, g, or t
  misc_feature (144)..(145): n is a, c, g, or t
  misc_feature (151)..(151): n is a, c, g, or t
  misc_feature (154)..(154): n is a, c, g, or t
  misc_feature (161)..(161): n is a, c, g, or t
  misc_feature (163)..(163): n is a, c, g, or t
  misc_feature (170)..(172): n is a, c, g, or t
  misc_feature (192)..(193): n is a, c, g, or t
  misc_feature (236)..(236): n is a, c, g, or t
  misc_feature (244)..(245): n is a, c, g, or t
  misc_feature (248)..(248): n is a, c, g, or t
  misc_feature (296)..(296): n is a, c, g, or t
  misc_feature (315)..(316): n is a, c, g, or t
  misc_feature (329)..(330): n is a, c, g, or t
  misc_feature (351)..(351): n is a, c, g, or t
  misc_feature (362)..(362): n is a, c, g, or t
  misc_feature (365)..(365): n is a, c, g, or t
  misc_feature (373)..(373): n is a, c, g, or t
  misc_feature (375)..(375): n is a, c, g, or t
  misc_feature (381)..(381): n is a, c, g, or t
  misc_feature (390)..(390): n is a, c, g, or t
  misc_feature (417)..(417): n is a, c, g, or t
  misc_feature (426)..(426): n is a, c, g, or t
  misc_feature (435)..(435): n is a, c, g, or t
  misc_feature (444)..(444): n is a, c, g, or t
  misc_feature (451)..(451): n is a, c, g, or t
  misc_feature (458)..(458): n is a, c, g, or t
  misc_feature (477)..(477): n is a, c, g, or t
  misc_feature (482)..(482): n is a, c, g, or t
  misc_feature (496)..(496): n is a, c, g, or t
  misc_feature (498)..(498): n is a, c, g, or t
  misc_feature (507)..(507): n is a, c, g, or t
  misc_feature (541)..(541): n is a, c, g, or t
  misc_feature (556)..(556): n is a, c, g, or t
  misc_feature (581)..(581): n is a, c, g, or t
  misc_feature (588)..(588): n is a, c, g, or t
  misc_feature (617)..(617): n is a, c, g, or t
  misc_feature (645)..(645): n is a, c, g, or t
  misc_feature (649)..(649): n is a, c, g, or t
  misc_feature (653)..(653): n is a, c, g, or t
  Peptide Sequence Number=SeqID_10370
  Probeset Number=SeqID_18678
acggccgccagggacagaaattttgccggncgagcggccgcccgggcgggggcgcggggancacccaaaanannnggagcgggcagaaacacaccaagcgaagccaccgagcaacgacnnaacaacaangggctaccaaganannagcccnccnggcgctncnggccctnnntgtgagcgcaacaaaggcgnncattatgccgcgaggccgacaagctcttgggtagcttcattanaccacagnnccncccaccagaaacgggagggggcggcgaacacccaccccgcgcaagccnacaggcgacaacaagcgcnngcggcaagcgccnnacaacaacccaaaaaccaaangcaacaacaanccngggcacancnaaccanacaaaccancgcaacgcaacagcaacaacagggccnaccagcacngagccaacnagagggggngaacccnggcgccnacccgcaacagcagcggcnggcanccaacccacgggcncnggcgaacgnagcggcggaccaacaacaacaacaagggcagcanggcgcggccagcgcncaggcgaccagccagggggaacccngccgccngccgacaacagcgacaacgggggggaggnagccccgggggcggggggggagggaccnacangccnagagcaacagggggcgggggggggaagggaccggggggggggacaccgggaaggggggagaggggggggggaggggggggcgagggcgcggccgc

SEQ ID NO: 4276 - DNA, 550 bp, Zea mays
  Probeset Number=SeqID_18679
gagttgttccattccagtcaaacaccccttccaaagaacagggtgggaaaacaaaaacactagctctgctctttccgcatccttgtcttctctcacttttcccagccaaaaaataccctgtgtatttaatcctgagatgtaatcttccccttttctgaccctggataaaatgcatagtttaacccaagggtagacataccacccacccttttctccatggtatggactgagtaataacagtcatcagttttctctctgtgccagagttcttcagggccaatggtgcctctggaaagaaggagacttcctctctgccctggatgacagagccttagcaaccagagtcagtcatgctagaggagaagtctttgagctccttggaccaagcaccagggctgagatgactctgcctagcatgacattctgccctcagaaacaaggaaagggctgttcttaggcccaggcctgagggaagtgggggtcatgaattgcagtggttcattttgacactaattatgtactcacagactcgtagaggccccagagatcc

SEQ ID NO: 4277 - DNA, 495 bp, Zea mays
  Peptide Sequence Number=SeqID_10371
  Probeset Number=SeqID_18680
gaatgagtcagtgagtgggtgtgagcagagctttgagcggagaggagctagctagctactgcatactggaggagggcttcctccgacgtcggacatggggcaggttaagcacctgtgcctggccaagttcaagcagggtgtcgtggtgtgacgacgtgctcaagggcatgaccgacctcgaagccggaatggacacgagtcaatctttcgagtggggccaggacgtgatgaaccaggaaatgctgacgcagggattcatgtatgtcttgtcgctcacttcgcatccaccgtggacctcacggcatacatggcccacgacatgccacaccgccttggccgccaccatcatgcccgccatggacaaggtgctggtcgtcaacttaccccgtcgtggtcgccaagcctccgccgccggcatgacccgctagccgctctcggcaacaaacgagccactgaacgcctccccttaaacaggaagaacaacagataaaaatg

SEQ ID NO: 4278 - DNA, 266 bp, Zea mays
  Peptide Sequence Number=SeqID_10372
  Probeset Number=SeqID_18681
tagtaattggaagaaaaccattgacatgcatgaaaggctttccagctaaggctcgggtggtatatgttccagtgctggaagttggtagcgaagggcgcctagctcatgcttgcaaagtcataactgacgcgtttatcaaggcaggcctagtttttgaaagggacgtgagagaacatttgcataacaaaatcatagttaaactgaataaatctttttttttgggttgtggtataaccgtgttgcccttttgccgctgcaggcatgca

SEQ ID NO: 4279 - DNA, 1178 bp, Zea mays
  misc_feature (1)..(31): n is a, c, g, or t
  misc_feature (1172)..(1178): n is a, c, g, or t
  Peptide Sequence Number=SeqID_10373
  Probeset Number=SeqID_18682
nnnnnnnnnnnnnnnnnnnnnnnnnnnnnnnacttatcttccttatcctatctccatcgccccatttcctatcctcccagccgatcccctctccctcacggcgctctctcccatggccgtcggccctccccgccatggacgccgctcttccttcctacattacgtcagcgacctcgtctccctcccttccagtggacgcctgctgcaggagctgttcctcccctgcgctcgcctaagatggccggactcacccatgatggctttcccctgtcgatgttgttctctagccgccatggcagtgcctccctgcagcagtccggtgaccgggccctccccttcccacgtcatgctggtgccatgtcttctccctcaccggccaacctcgccagccaccaggaaggtgtctccctctcggcagctcccatggccaccatcagccctagctgcgcttgccctggtttgagcagctcgacgccagcccctcaatcttccatcgctgccgctcagcttgtcccagccccaacgccgacgcccctgttccctctagcttcaacgtccgccactgtttcgttcattgtcggagcgaaatccgtggaatctgagtgaagaagaaacagagcacgtccgtcacttactagctgctgggtgaaaggattgaatcggctatcgtggtcgtttagtgccgatcgagtcaactttagtcatggtatgttaattgatcacgtgctatggaagacaagagctggattaatcacaagacgatgctgatggacgaagctaaagtggatgaatcaaccaagtgccaggatgggagatactcaccaagtgatcgtcatttaacaacactaacatagtgttatcccagggttttattccctgttgtttttcaagtcgtaattttgttctgttgtggatggtgctaagtgccggtgggctcggccttcttatataagtatatcccatctttagcttccctattgaggattgtcacttaagctagcatatattttaaaacttataaatgttttatacatttcaaattgtaatctttttgaatcaatttcttttgtaatcaactccgatgatatatattgtaatcttgttataacttgtaaatgttgtaacttgtaatcattttgtaacaaaccatttattttcgctgcaaaaaaaannnnnnn

SEQ ID NO: 4280 - DNA, 735 bp, Zea mays
  misc_feature (75)..(75): n is a, c, g, or t
  misc_feature (174)..(174): n is a, c, g, or t
  misc_feature (692)..(694): n is a, c, g, or t
  misc_feature (729)..(731): n is a, c, g, or t
  Probeset Number=SeqID_18683
gaacactgatagaccatttgtacaatacaaaatatccaagcttgtcttggaagccaaggcttgaaatttgtattnggagctgccagaggtcttcattatcttcacaaaggagcggctgggggaatcattcaccgtgatgtaaaatccaccaacatattgcttgatgagaacctntgtggctaaagttgctgactttggcctttcaaggactggtcctcttgatcatcaaccatatgtcagcactggtgttaaaggcacttttgggtatcttgatcctgaatatttcaggtcacaacagctgacagaaaaatccgatgtctattcatttggggtagttcttctggaagtgttatgcgcaagaccacccattgacccgtcacttccaagggagcaggtgaacttggctgagtggggaatgctttgcaaaaacaaggggatgctcgaagagatcattgatccttccatcaagggccaaacagatcaaaattcactcagaaaattcagtgacacactagagaaatgcttacaagaagatggttctgatacgccaacaatgggagatgtgctgtgggacttggagtatgcgttgcaccttcagcgaggtgcaatacatagagagccacatgaggatagttctagcagtgcttctgcgtcacttcaattgcccaatattcggcgtcttccttcactcnnnacgctaagtgaaatggatgacttatcggttgtgannngtga

SEQ ID NO: 4281 - DNA, 482 bp, Zea mays
  misc_feature (84)..(84): n is a, c, g, or t
  misc_feature (463)..(463): n is a, c, g, or t
  Peptide Sequence Number=SeqID_10374
  Probeset Number=SeqID_18684
aaaaaaaaaggccagcagcggaaaccaccagtgccaaaaaatggatcccttaagatggcccccctttttgttttttttttaagngtcatggaagacgcgcctttctctcagaacaacgccccgcccagcaaccatcgggcgtgcccacacaaacaagaacggcgcacaaggccaaggggttttcatgacacatgttacatgtaaacctcatccgagacacttttacgctggcgccgtagaagatttactcagggtgggcgattacgcaatcaatctaatagcccaaataatcctcctgtgaggtttggtacaactcggtgcatatgtaacatatgtagcggcgtctggaggatctagtacagggtatgtacactgagggatggagtatgtacaaacacggaagagggatgatccactggctgggaatagattagagcgaatgataacaaattccagaagaatngagattttcaagtttaaaa

SEQ ID NO: 4282 - DNA, 353 bp, Zea mays
  Peptide Sequence Number=SeqID_10375
  Probeset Number=SeqID_18685
ctgggttttgagctgggctattattccttcagcttacatcatatttgttttcttgatcagcttttatgatcctggaccgcatggaaattttagatattcaaagaatatgttacctgaggtcacagaggctgattttaggaagggttcacaggaagagtttgttttgactttaactatttcagtggttctcagttaagcgccaacatgcgttgatgatcattgcagatagtctttactataccaagttcaagcttcattgcagagtgagattctgtcttttattaattgtgccgagtcaaaccacacctacatttgaaatggacagagtattttgatctaaaagacagggtacc

SEQ ID NO: 4283 - DNA, 621 bp, Zea mays
  misc_feature (601)..(621): n is a, c, g, or t
  Peptide Sequence Number=SeqID_10376
  Probeset Number=SeqID_18686
cgcctgcaggtaccggtccggaattaattcccgggtcgacgagctcactagtcggcggccgcccttttttttttttttttttttttttagagtaaactcagaggccaacaacaaatcagtaccatcgacactagacagtagcttcattggtactgtttccaggacagctcctttgaacaggtttcagaaccaaagggagggactcttaccaagctacaaaccacatcccaaacaaataagtatttttttttaaatttgaaaaggtacaagatgggcgcataccatggcaaagcattcaggtttttgtgtcatagccagtagacggaataacaatatttctcccagagattcaaagcagacaaatacaatcgaatatgctgacaggcctccttgcttgagcattcaaaactgtggtcacctgaaagacgtggacctgagcccttttcttcgatgacttcttggggggcttcttatggggcttaagcttatcctatttgaataacatgccgttcacgttcgctctctgcttttctatgttggcgtatgatacaaggtaacggccgcgtcgacgtcaaatatttgatgactgtttggtgccctnnnnnnnnnnnnnnnnnnnnn

SEQ ID NO: 4284 - DNA, 641 bp, Zea mays
  Probeset Number=SeqID_18687
ggcgggtgggacggccaaaccctggtgtatgcgccccccccccgggagctagttcgacttccccggggggtcgccctgcccgttaccctaggccccctccagtataaggtgttccatgtgtgccccctccgccccgtcgttccgggggttttgtttgcgcccgtcgggcttctggacatgtttaaccccgggggccccctttaggagttccacgtgatcaacaatgctggcggcaaggccatggctttcagggtttccgggtgcggtcggtttggcgcttactgctcccgggaaccggcgaggtgcctattggactcggcggaagtggagttcagcttcgatattgaccctggccttgtgtccgtcgactttccggtgccggaacaggaactatacctttggacgctggagattattatttaggtcgtgatgctgtgggccgaccccaacgcttgcctttccgggtgagcccttattagtcgggcgccattgtccttttttatgtgccccaaaaaaaaatgtattgtgggggtgttgtaaaattggcatggggagggttttttttgttatgtttttatctgtaaatcaaacgggctctgaatgttatataaaacttgataaaaaaggagggggctcctttt

SEQ ID NO: 4285 - DNA, 450 bp, Zea mays
  misc_feature (7)..(8): n is a, c, g, or t
  misc_feature (10)..(10): n is a, c, g, or t
  Peptide Sequence Number=SeqID_10377
  Probeset Number=SeqID_18688
agtgggnntnattttttttttttttttttttttcctttttttttttttttgagtactgaaagttaatataataatattattgagtcacaccatgaccaagctacatgggctgcatattcccacgagtcttatttagatagatgtgacatggacatgcttacatatattcatgcacacacatttattatcccttgatcgtagatgcgatcatgctttattcttcctcctccccgttactcctgctgcttttcaagttactcctcagttccattgccatccttatcagcaggaactaatggagcatgaactactggaggagttgcaagcgcaagtgctgcgacacatattcctagcgcaagaagcggaagcattgttgatgatttggtgaaccttgagattatggttgttcgcaagacgaagttcactttgcaggacgcttattagtgtcct

SEQ ID NO: 4286 - DNA, 377 bp, Zea mays
  Probeset Number=SeqID_18689
cgggtacttaaagttaatacaataatattattgagtcacaccatgaccaagctacatgggctgcatattcccacgagtcttatttagatgagacatggacatgcttacatatattcatgcacacacatttattatcccttgatcatagatgtgatcatgctttattcttcctcctccccgttactcctgctgctttttatcctcagttccaaagccatccttatcagatggagcattaactactggaagagttgcaaccgcaaatgctgcgacacatattagtgcaagaaccggaagcattgttgatgatttggtaaaccttgagattattattgttcgcaagacgaagttcactttgcaggacgcttattagtgtc

SEQ ID NO: 4287 - DNA, 998 bp, Zea mays
  misc_feature (1)..(22): n is a, c, g, or t
  misc_feature (998)..(998): n is a, c, g, or t
  Peptide Sequence Number=SeqID_10378
  Probeset Number=SeqID_18690
nnnnnnnnnnnnnnnnnnnnnnacagggcacaagcgtccacagcttgcactactagagaccgaacagatagagattggccggagtgtgtgatccagcgccccatctggactggtggcgaccaaccacatgatgaggtccggccttctctcgctatgtttccacctagccctggccatcacactggctgcaagtgttcctggccttgctcgtagtagggtaatcgacatggaaccgcaactcaaaccgacgctgcaactagaaccaaagcatggtgtatctcaaccagacagaaaccaagaacccaaaccgacaccacagcctgagccaaaaccagagcctaaaccggaaccaaaacctgcaccacaaccagaccccaaaccagaccccaaacccgcaccacagccagacccaaaacctgcaccacaaccggacccaaaaccagaacccaaacctacaccacagccagacccaaaaccttcaccacaaccaggcccagagccgaaacccaagccagtgccacagcctgaaccaaaaccagaacccaaacctacaccacaaccagacccaaaacctggaccacaaccagacccaaaaccagaacccaaacctacaccacaaccaggactagagccaaaacctaagccagcgccacagcctgaaccaaaacccacgccgcaaccagatccgaaacctgaaccaaaaccaacaccacaaccaccctttccacagcccgagcctcaaccagatcccaaaccccaacccgaaccatccaagccagaccctcgaccagattctaaaccccaacccgaaccatccaagccagacccccagccagggcccaaacctacactagagccaaaacccttgaagccgaagccatcgtcgtctcttccaccaccatttggcacggtcgtcgtggaagggaactgagaggagcatagtggaaccgatcatcatcgtgcatgccatctatagctttttggctatgattgataan

SEQ ID NO: 4288 - DNA, 879 bp, Zea mays
  misc_feature (1)..(9): n is a, c, g, or t
  misc_feature (659)..(879): n is a, c, g, or t
  Peptide Sequence Number=SeqID_10379
  Probeset Number=SeqID_18691
nnnnnnnnnctagcttggtgccgcctcaccagcttgccaaatctctaaccctaggtgcaggggcggagatggcccccaagcgctcggctccacctccgccgcctccgcccccggctgcctcctccgaggagaccgcctctggttcgggctccgaggaggaggaggaggaggaggaggaggaggatttggagaccgcccactcaccgcctccggtcgcggggagagcgttgctccgctgccgcagaaggtccaggaacccgaagcgtccgacgaggatgagtatgacgatgaagatgacgagccgcagaaggtccaggaacccgaagcgtccgatgaggatgaatatgacgaagagggcacacccaggcttgttcaagcgggagcctgtgatgatcgaaggcctgcacggatttgggatcagcaaggcccgtcacttgtacgagaggatcaataagttcaaaggcgtgcactgatgaacctacatcttcgtcggccggacctgaccaaggaagtgaccaggacgctcatggacctggctgagtgatgctgtggactgagctgagtatcatctaagaattctattttatggtatttaagtgcactgatgatcgattaccagcaaatgttgtatgacctactcaagcatggtagctgaatcnnnnnnnnnnnnnnnnnnnnnnnnnnnnnnnnnnnnnnnnnnnnnnnnnnnnnnnnnnnnnnnnnnnnnnnnnnnnnnnnnnnnnnnnnnnnnnnnnnnnnnnnnnnnnnnnnnnnnnnnnnnnnnnnnnnnnnnnnnnnnnnnnnnnnnnnnnnnnnnnnnnnnnnnnnnnnnnnnnnnnnnnnnnnnnnnnnnnnnnnnnnnnnnnnnnnnnnnnnnnn

SEQ ID NO: 4289 - DNA, 448 bp, Zea mays
  Probeset Number=SeqID_18692
ccccctttggcaatggggttgcgtccgcaggccggaaagtgggtggctccccgggtttttccctttgcgccccctgggaaatgggggccgggctgttagggttattcgcttcataaaaatttaattttcccccccaccacggtgtagaaggctggccatttaaaagaagtcgcggcgcattttctagaggtgtccctttgtttttcttttgtatataaacttgggttttttttttccttttttttttggtttttttttttttttattttttttttttttttttttattctttttacccagttcaaactgttttcttgagacttgaacatataagctagggttgtatgcacaatcaaaatccgttgctgcattctgaatggctagcactggaaatgtatgttgtatgtaccattgtatttgcaaatgtagttgtgcacggacgcgtggg

SEQ ID NO: 4290 - DNA, 571 bp, Zea mays
  misc_feature (98)..(98): n is a, c, g, or t
  misc_feature (101)..(101): n is a, c, g, or t
  misc_feature (103)..(103): n is a, c, g, or t
  misc_feature (111)..(111): n is a, c, g, or t
  misc_feature (115)..(115): n is a, c, g, or t
  misc_feature (123)..(123): n is a, c, g, or t
  misc_feature (146)..(147): n is a, c, g, or t
  misc_feature (151)..(151): n is a, c, g, or t
  misc_feature (156)..(156): n is a, c, g, or t
  misc_feature (187)..(187): n is a, c, g, or t
  misc_feature (204)..(204): n is a, c, g, or t
  misc_feature (209)..(209): n is a, c, g, or t
  misc_feature (211)..(211): n is a, c, g, or t
  misc_feature (215)..(215): n is a, c, g, or t
  misc_feature (224)..(224): n is a, c, g, or t
  misc_feature (237)..(237): n is a, c, g, or t
  misc_feature (241)..(242): n is a, c, g, or t
  misc_feature (256)..(256): n is a, c, g, or t
  misc_feature (297)..(297): n is a, c, g, or t
  misc_feature (341)..(341): n is a, c, g, or t
  misc_feature (349)..(349): n is a, c, g, or t
  misc_feature (351)..(351): n is a, c, g, or t
  misc_feature (354)..(354): n is a, c, g, or t
  misc_feature (357)..(357): n is a, c, g, or t
  misc_feature (368)..(368): n is a, c, g, or t
  misc_feature (374)..(374): n is a, c, g, or t
  misc_feature (385)..(385): n is a, c, g, or t
  misc_feature (387)..(388): n is a, c, g, or t
  misc_feature (406)..(407): n is a, c, g, or t
  misc_feature (409)..(409): n is a, c, g, or t
  misc_feature (414)..(414): n is a, c, g, or t
  misc_feature (427)..(427): n is a, c, g, or t
  misc_feature (433)..(434): n is a, c, g, or t
  misc_feature (438)..(438): n is a, c, g, or t
  misc_feature (440)..(440): n is a, c, g, or t
  misc_feature (446)..(446): n is a, c, g, or t
  misc_feature (456)..(456): n is a, c, g, or t
  misc_feature (459)..(459): n is a, c, g, or t
  misc_feature (464)..(464): n is a, c, g, or t
  misc_feature (473)..(474): n is a, c, g, or t
  misc_feature (479)..(479): n is a, c, g, or t
  misc_feature (487)..(488): n is a, c, g, or t
  misc_feature (492)..(492): n is a, c, g, or t
  misc_feature (497)..(497): n is a, c, g, or t
  misc_feature (507)..(507): n is a, c, g, or t
  misc_feature (513)..(514): n is a, c, g, or t
  misc_feature (522)..(522): n is a, c, g, or t
  misc_feature (524)..(525): n is a, c, g, or t
  misc_feature (527)..(527): n is a, c, g, or t
  misc_feature (535)..(535): n is a, c, g, or t
  misc_feature (537)..(537): n is a, c, g, or t
  misc_feature (540)..(540): n is a, c, g, or t
  misc_feature (542)..(542): n is a, c, g, or t
  misc_feature (544)..(546): n is a, c, g, or t
  misc_feature (557)..(557): n is a, c, g, or t
  misc_feature (562)..(562): n is a, c, g, or t
  Peptide Sequence Number=SeqID_10380
  Probeset Number=SeqID_18693
tggagctccccgcggtggcggccgctctagaactagtggatcccccgggctgcaggaattcggcaccaggagagagactcactagtcccccccccccntangnccgagggngttnagttttcnttatgactggcgatgatatgcgnntgangcaanactgtctactgctggcttttattgggacgcncattgatcgtatgatgnttgtncnacgncttcttagntactgctttgatnaaannttggtctgaactgntttggtctgtgctttaggattctgtttcattgggagaatcngatgcccttgattacttttatttatgcttttctgaataattaanaacactancntcntgntgaaatcttcngcgttntatataatacntnncaaagaggcttgcactgnntnggtanaaaggggactttntctccnntacntnggaatnatcttgtacngantatanaattttttnnttctnaaaatagnntacnatggnttttatctgnttattnnggtatttncnntntatatcgngnatngngnnncatgcttgacntaccngtttcgtgg

SEQ ID NO: 4291 - DNA, 716 bp, Zea mays
  misc_feature (688)..(690): n is a, c, g, or t
  misc_feature (695)..(706): n is a, c, g, or t
  Probeset Number=SeqID_18694
gggatttttgacagaaacagagcaaggaaggaaggaaggaacaagaagagtgagagtgaaaaagatgcctatgagcagaatttcagggtcactatcttctcccaaggtggacgttgctatagatatgggcaatccatttctcaatcttactcttgatggtttttggaagatcggaaccgttgcagccacacgttcagttgctgaggatacctatcatatcatccgaaagggaaatatttcaagtcacgattttaagaaaatgctgaagaagatgtgtaaagaaggtgcatattggggaactgttgctggtgtatatgttggattggaatatgggacagagaggatccgaggcaccagggactggaagaatgccatgattgggggtgcagtaacaggggctctggcatctgcagctagcaacaacaagaaagacaagattgcaatagatgccattacgggtgcagcagttgctactgctgcagaattcataaattaccttacctgaatgaatgaaaatgaatgtctttctgttcttgcatgttttgagaagggattgcccagtcagtctcttttgtcattatctgtatcggctatgtattgatattgaagcagttacttctaagatatgctggttatctagcattctgttaaacctatgttttgaataattatattggcccatcgtttnnntgctnnnnnnnnnnnnaacttatcga

SEQ ID NO: 4292 - DNA, 620 bp, Zea mays
  misc_feature (1)..(19): n is a, c, g, or t
  misc_feature (620)..(620): n is a, c, g, or t
  Peptide Sequence Number=SeqID_10381
  Probeset Number=SeqID_18695
nnnnnnnnnnnnnnnnnnngtgggatcgcgagttgcggcgacggtagaggaaaaatcagccgtggactctcttccgctcagcaggctctagcccctagcccctagccgccagtgtcatgcattcgtgctgaggctcaactgctgatccgtcttccaagctctggtgtcatccctgcgctctgacccaagatgtatctccagtactacatcaacgagaagggggccaaggtctacccccccaagaaggagtcgcctcttggggtgccgacgcagtctgctcacccagctcgcttctcacctgatgacaagtactctcgccaccggtacctgttgaagaagagatttggacttctgccaacgcagaagccagcacccgaggtccggagcctccacgtcaacttccaaccatggatgtgcagtttgtgtccctgcttgatgcttgttggttggaatgtagaataggtatctgaggaaagatatcaaaccctgctaggccctactactatgacatctcagcgcattcaggccctatatgtaatgctatgtgattgacaggtcttgtttttaaaaaaaaaaaaaaaaaaaaaaaaaaaaaaaaaaaaaaaaaccgcaagaagggn

SEQ ID NO: 4293 - DNA, 492 bp, Zea mays
  Peptide Sequence Number=SeqID_10382
  Probeset Number=SeqID_18696
gctccatgtgcaagcaaacgacgacgcactcgcatatacagagacgacgcgcttctacgcggacgtgctcggcttcgtgcccatccgccgccccggctctttcgacttcgacggcgcctggctgttcaactacgaaggattcgtaccttgcttgctttgctatggggccggggcggagtaaaaaatttctttactggacatgcgagagcatggtggcggtggagcggcggctcaaggagatgggcatcccgtacgtgcagcgctgcgtggaggagggcggcatcaacgtggaccagatcttcttccacgacccggacgccttcatgatcgaggtctgcaactgcgacaacctccccgtcgtcccgctcgccgccgccgccgaccagcgcgcgcctgccgtcctcggggcctgcaagcgggccgcggcggtcggcgtcaagcagcagcagcagcaaagcagcgccggcggcgtgcctcttcacgccgccccag

SEQ ID NO: 4294 - DNA, 743 bp, Zea mays
  misc_feature (653)..(653): n is a, c, g, or t
  misc_feature (743)..(743): n is a, c, g, or t
  Peptide Sequence Number=SeqID_10383
  Probeset Number=SeqID_18697
agcgtatcgaaatcaatcgtgttcctcgcctgcacgacgagaacccgagaccaatccagccgccgcctccgccttcgccttcgccttcgccttcgcctcgcctagtattccctccgattcagaggccgatggagtgcatcgccgagatgccccgcgcgccgctggacagcaggctgcgcaagcgtcagcgtctcggctgggacgtcggccctgccgagatgtataaggccgtgcggccgcggcacgggtgggacgtcggccccgccgagatgtatcagttaggactttgtggacaagaagttgtgaatgccatcagtgctgcagcgttgggcctttcgtcgggctgtgtttcttctcaagtcaaacaagagcagcctcatcatggttcccctcctctgagagaagatgacagggatgggcattatgtttttgctgatggagataacctcacatctcgctataagatcagtgcaaaaatgcgagggttagctgattggatggttcaggcttgatgaataaactgagatactcaaggatcaattgctttctcaggattggcgcgttatgtgttgcacaagcatgtcttttttttacatatttatcataccttttgtatgattgtagtgttgccactaggaaaggaaaagaaatgntggctatcagaatcgctaggggcattataaagtacaggtatgctgcaatgatcgaaattggcatgctcaagcagcttgataaatatgatn

SEQ ID NO: 4295 - DNA, 427 bp, Zea mays
  Peptide Sequence Number=SeqID_10384
  Probeset Number=SeqID_18698
ataatctttgtatcggtcgtctctctcttctcgatggttttatgtttctgtctgagaaatcgtcgtcgtcgttgctctccttctccaaatccgcccgtgaaatcgtcgtcgtcgttgctctccttcagttccggcttttaccatgattttcctcttatcgagaacatttgtttctctcacactcaaacctttttcttcttcctcgatttccatggcgaatctaaccaccaacgcgaaatcacgccttagaggcgtcgtattcgacatggacagaactctgacagttccggtcatcgatttcgccgcaatgtacaggtccgtcttaggtgaagacgagtacaagcgaatcaaagcagagaggagagccttactgaaatcgatattcttcaccacatcgagtcttggagcgccgagaaacagcagaagg

SEQ ID NO: 4296 - DNA, 934 bp, Zea mays
  misc_feature (601)..(934): n is a, c, g, or t
  Peptide Sequence Number=SeqID_10385
  Probeset Number=SeqID_18699
aagctggagctccccgcggtggcggccgctctagaactagtggatcccccgggctgcaggaattcggcaccagtagagctcactagtccccccccccccctcacccgcccgcgacgagtccgccgcgtccaactctccccggcctcgccctcgctcgccgccgcgtccgcgtccacgctctcccctcacgaggtgggcttggatgtggcgttcctagctgacacggccgcggctgccgcctcttgccccggcgccgtcgacgcgctgcggcggtgtctgccacctggtaatggttctgcgctagggacgaaaacggtttcggaacttctcgtttttgttgcaggctgttgcaccaactatgaagcaggttgatcgtcccccgagaaatccgaagcgtgtaatcatcgagtcaagccaagagtgctttagcgtcgacaccccccggttgacagcaaccggagaccctcccaatgcctctcgtgacggcgatcgatcgcgccccccgaaagagacctgctgttctccagcaaagcacgaatcaactgcctagtggggatgataacgatgacttcatgcctcctaaaaagaagtccaatgccannnnnnnnnnnnnnnnnnnnnnnnnnnnnnnnnnnnnnnnnnnnnnnnnnnnnnnnnnnnnnnnnnnnnnnnnnnnnnnnnnnnnnnnnnnnnnnnnnnnnnnnnnnnnnnnnnnnnnnnnnnnnnnnnnnnnnnnnnnnnnnnnnnnnnnnnnnnnnnnnnnnnnnnnnnnnnnnnnnnnnnnnnnnnnnnnnnnnnnnnnnnnnnnnnnnnnnnnnnnnnnnnnnnnnnnnnnnnnnnnnnnnnnnnnnnnnnnnnnnnnnnnnnnnnnnnnnnnnnnnnnnnnnnnnnnnnnnnnnnnnnnnnnnnnnnnnnnnnnnnnnnnnnnnnnnnn

SEQ ID NO: 4297 - DNA, 892 bp, Zea mays
  Peptide Sequence Number=SeqID_10386
  Probeset Number=SeqID_18700
gaccctctctgcccagcgcacagaagcttccagggagcagccgctcacctcctccactccctcaacgccggcctcctctgccccaggtccggcacccctaccccaccaagctccatccatggcgtcggcagcagggagcactaactcgtacttcatcgcgctctctgcttcatcccctctccagcccctcctcccatgggcgccagtagcagggatctcttccctctccccatggcgcctagctccttgaacgccatactcctccctgctccagccacttcttccactagcacgcagcctccccttccctgttcttgtcgcggccgagccaccacttcaacagccgtagccctctccccctccattatttcagcgtctgaaacaaacccctggccaccatccacacttgtgctcggccctcctcgtgcggcgtcaactgatctgcgtagcggtgccggtccacagcagcgaaccccatcgatctacacggggctgccatcgttcccagcacgtcggcatcgagctccgctagtcgtcaatctgtgcagcgaacaacaacctcgcccttgtcgccgtcacgccttgcgtgtcgctcgtcggcaaagagccccgtttgatggcatgcatgcgcgacacgagtcggccaggttgttcgccttgaatgattgcgatttgttttactaacttattcggtcgatgatgtgcctgcgtgtttatatgcgtgtgaaaatatatttgtatgaatggacgcgtgtagagaaggtaatgaagtggaaaaaaaactcgagaatttttactttgataggaaatgtgcgatgcgttgtttgatgcgaaaactaagttacaaaatgcggattatgttttgggaaaaaaaaaaaaaaaaaaaaaaaaa

SEQ ID NO: 4298 - DNA, 889 bp, Zea mays
  Peptide Sequence Number=SeqID_10387
  Probeset Number=SeqID_18701
tcgagtcagctacgtaggccccccccccccaattgcattggaagaatgcatcaccgcgttgtgttgtgattgaaaatggagagcgatgttgaagaatctatgcggaagaggcccagaaaatatcctttctccgccgattcatcctctcgcaagcaatttgaacaatattctggacggacatttgcaagtatgggggaagtgaattttatgcaagatgatgataatcgtttggagattacccgaactaaatttggaagtttgcttaaaagacatggagatttgacagagcggcttgctagggattctgacaagataatatttgagcgtctacagaaggagtttgaagctgcacgagcttctcaaactgaagagatatgtttagacggggaagagtggaatgatggtctactagctacaataagagagcgggtgcatatggaggcggacagaaaagcaatgcaaggggatgcggacatattagcatgtcccctggaaaaaattacatataaaattggaaacaaggtaatttgctgtttggaaggggcaagaatcggcgtacaatatgagacatcgtttgctggtgaaccttgtgagttttaccattgtgtgctggaaagaagtcatttcttgaaaagatgactgtccttgaacacacagttccatttttcctgccaatacgagaaatagaaaatgacctccattcatccaatgccatgaaactcctagatcctgttggagatctattgcaagccttttgtgaataaacgggaacaggtagattgcccatggtcgaactattaagggagctgtatggaaatcagattaaaagagctgtatcttagccttccccaccctaatggccgaattggattaaaatgatcccgattgc

SEQ ID NO: 4299 - DNA, 229 bp, Zea mays
  Peptide Sequence Number=SeqID_10388
  Probeset Number=SeqID_18702
ggtacaaaacaaagctgatggccgctgccatacggaacaagcaggacgtatttagccttgttagatgacccgcttatgtggggattcaagggttttccaacttcggatgcaaagcttggaaggtgggtgctgacagcagaagatatatgcttcaagaatgtagtcatgtcctacatgtttcgacttggtgagtgtatatgatcaacttatgcgggttttgtggatgaaa

SEQ ID NO: 4300 - DNA, 333 bp, Zea mays
  Peptide Sequence Number=SeqID_10389
  Probeset Number=SeqID_18703
agaagctgcttccacagttggcttcctggctacccatgctgtagtccaggcgtgcctcagttctgtaaatatgatggacgggatgtgtattaattaacccacgcctgctgttttttttcgtcgtccttgtgtgcgtttgagagctcccctagtgttttggaacaataatttttgggccgactatgtgttctgtatgttttggtcgtcagacatatctatcccccgtccatggctttgcttaacggtttaacctggactcttctgagaagttatggatgttctgaactcaagttataaaaaaaaaaaaaaaaaaaaaaagaaaaaaaaaaaaca

SEQ ID NO: 4301 - DNA, 698 bp, Zea mays
  misc_feature (3)..(4): n is a, c, g, or t
  misc_feature (6)..(6): n is a, c, g, or t
  misc_feature (8)..(20): n is a, c, g, or t
  misc_feature (23)..(23): n is a, c, g, or t
  misc_feature (640)..(640): n is a, c, g, or t
  misc_feature (677)..(677): n is a, c, g, or t
  misc_feature (686)..(686): n is a, c, g, or t
  misc_feature (689)..(689): n is a, c, g, or t
  Probeset Number=SeqID_18704
agnnangnnnnnnnnnnnnncantgggtaccgggccccccctcgaggcggccatcgcctggtgtcacgcttccgcgcccaccgcgcgagaaaccaactgggaacagatcattgcgctctacgacaccctgctgcgcatccggccgtcgcccgtgattgcgctgaacagggcgattgccgtggcgcagcatgccggacccgcggcagggctggcagcgattcgagcgatttccggcagcgagcgactcaacacctatccgttttatcccatggccctcggcgagttggaattgcagtgtggtcacctttgtagtgcgcgtctgcatttcacgacagccttggcactggcccgtaatccaaccgaacagcgcttcatggagagccggatcagcgcctgcaactcccaaagttgacgcctgacacgctccgcatagcaccatttgcgggcatagtcacgctaaagtttacgcgtttgtacatagactcgcctcgcaacattcgttcagcggggagatgtcatgttgactcgtatacgggtggacctgttcgcactcctgactgttgtgtagcctggccggcgcgcagaccgccgccgatctcacagcacgttacgtgtcaccgtattgtgtgctggctgacgnaacgaatacgccagtcagcggactcggcagacccggnacgtgctcnatntgtgcgggt

SEQ ID NO: 4302 - DNA, 2621 bp, Zea mays
  Peptide Sequence Number=SeqID_10390
  Probeset Number=SeqID_18705
ttttcgggagaagaggggaaagggggcccataatagacaaaaccccttttcttccgcgggggggggggtttttaaaataaccagggccgccccccgttttttccccttgaaaaaggggcggggggggccccccccccaaaaagggggggggtgtccccccccctataggggccccccggggggttctcccctttatatttccccgcgttcatattttttggggaaaaattgggagggggaaaaacaattttcccccgggaacacccttttgtgcccctgtttcccgccacacccgaaaatttaccccccccttaaggggacaaaaaagggggggccccccccggggggggcccccttttaaacttaggggttccccggggtgccgggaatttccccccggggggggagggagaggggagagtcccttaaccccccccccccccccccgggatctttgcttcctaaactcataaagatctcttcttttaaaaaaaaaaaatataagaaaaacgaagagaagaccgaagcattgcataagggtctcaatccgagatagtagttgaatctcttttagcttcaagcaatctcagatcttcaatgcctactcagcaaatccaatccttaagagtctttgtggcgacatggaacgtgggaggaaaatctccacactctggtcttaatcttgatgctttgcttcacgtgcatagtgaattcgatgtatacgttttaggttttcaggagattgttccattgaatgctggaaatgtccttgttcttggagacaacgagcctgctgcgaaatggttagcgatgatcaatcaatccttaaacaaatcatcatcatcttctggaggaagacttagcccaaaaactccatcttttggcgctggatcgatgttctttgcgaaaccttctttgaagaagattagtgagagtttcagaacagagtgcaggagaaagctgaagatctgtaactgcagcactttctctgaagatattgtaagaaagtatgggagagaatcttgtttcagatgtcctgaaggtctagttaaccaatccggtgtactttctgatgacgaagaagatgaagatgatgacgatgatgatgaagacgaggatgaaggaggaggaaaagttgcttctcttgtaagcaaccaaatgacgatgaagtatggcttagtagcatcaaagcaaatggtgggtatattccttactgtgtggatgagaaaggaacttattcaacacgtttctcatctcagaatctcctccgtcacccgcggaatcatgggttgcttaggaaacaagggatgcatagctgtgagtttgcagctctacaagacgagcttctgcttcatctgcagtcatctagcttctggtgagagagaaggagacgaacgccgcagaaacttagatgtgatcgagattctcaagaacacaagtttccctagaatatgcagaacctcttttactcgtgtccctgatcgaatcacaaagcacgatcgggtcatatggcttggagatttgaactacagaatagctttgagttactcagaaacaaagaccctcttggataaaaacgcttgggacactcttctcaacaaagatcagctcaagattgaaagagacgcaggtcgagtgttcaaaggatggcatgaaggaaaaatcttctttgcaccaacttataagtactcttataactctgatgcttacgcgggagacactagcaaagaaaagaagaacaagagaagaactccggcctggtgcgataggattctttggcacggtgatggaatccggcagctctcgtacgtgcacggcgagtcacgtttctccgatcaccggccggtttgctccgtgtttgtcgtcgacgttgaggtttgcgagggtaaaaccggaactaggagacaataacttacatcaactgttgaaaaacgtcttggtagaattaagatataatctttacatttattacgatactaccactagcgggcctttggagcccgcgagagtgtttactttgacgttgtgttgtgaaaaaggtgaacactagagtaagacccaatttcgttagaaatattggccgaccaaaccaaaaaaaaaaaaaaaaaaaactcgagggggggcccggtacccaatttgagctctaataaggatcaaagccatttcaggatctgcaaagcctagtcagcaaattccatccgttaagagtctttgtgggcgacatggaacgtgggaggaaaatcctccacactctggtcctaatcctgaatgcttgctttcacgtgcatagtgaattcgatgtatacgtttagggttttcaggagattgttcccattgaatgctggaaatgtccttgttcttggagacaacgagcctgctgcgaaatggttagcgatgatcaatcaatccttaaacaaatcatcatcatcttctggaggaagacttagcccaaaaactccatcttttggcgctggatcgatgttctttgcgaaaccttctttgaagaagattagtgagagtttcagaacagagtgcaggagaaagctgaagatctgccaccgcagcactgtcgggggggggagtgtaagggcgtttgtggacacaaaagaacgggaaccgca

SEQ ID NO: 4303 - DNA, 964 bp, Zea mays
  Peptide Sequence Number=SeqID_10391
  Probeset Number=SeqID_18706
ctctttcccgtttgttctcctcacccccattcccctcggctcgccgtcgccgacgggaccgcctcctccacctccgcgcatcctcaccaacatctctcccagacctctctctagccacgactaaagcgtaaggaggaagcaagtgcccacctcccgccgcctctaccgccacagctgtagcagcagtagcggacgcaggagattcagagctgtgtgctgaacacgcgcgtggcagggatggacgacggcgacagcgtcgctccgagcgcagacaaggacgatgcccccccgggcgacgacgggagctccacgccggttcggcgttggctcagacggtacaaattgggaattcaccaacctataaacttgaaaggaagcttggaaagggaggatttggacaagtatatgttggtcgacgaatttcggctcctcgtctcagggaccgtaaccctggttcaaatgctttagaggttgcactgaaatttgaacaccaaaccagcaaaggttgcaactttggagctccttatgagtggcaagtttacaacactcttagtggaaaccatggtgtcccacgggtacactacaaaggaaagcagggagagttttacatcatggttatggacatattgggaccaagcttatgggatggttggaataataattcccactcgatgtctggtgagatgggtgcatgcataggtataaaggcaatctccctactggaaaagatgccctctaaagggaatgtccttggggaggcgaagccggagaacttcctgtttgggccctctgggacccaaaaaaaaagaaggtttttcttggtgaccttgggatgggcaactaaggggaaaggatgttggtacgcggcatcctggctgaaacgaacccgaggaccgggattttttaggggaacgggcccgctaggcaggggcggagggtcccctcgggaaaaaacggcggagaa

SEQ ID NO: 4304 - DNA, 374 bp, Zea mays
  misc_feature (23)..(23): n is a, c, g, or t
  Peptide Sequence Number=SeqID_10392
  Probeset Number=SeqID_18707
atacactggggttttttttatangcataaggggctcactcttgaattgggcaacttggacatttccatcgattcaattcaatacaacatcatataggctttacacatggatctggtgcctggtacaactggaatttatatggctctatttgaaccaaaccaatgtatatttcaaagagctcccaacaattgtttgttcccggactttaccatcggataaaatgctcaaagccccatcgccctggcagctggataaaatccgcccggtactgcggctagtgtcgacgaaattgctgtccaaccatcggatctgagaccatcgcctgcgggatcggacgtccacaaatgcatgcagtgttatcccggtcgctgaat

SEQ ID NO: 4305 - DNA, 520 bp, Zea mays
  Probeset Number=SeqID_18708
cgttgctgtcgatccttgtctcagttcttgatcaccatgtgtagcttcagttagttgtattgtgttcccttcctccaaaatcataacctggacacgcccaaatccattaatcaaggcactgaacacctgcagatcctccacttcaccgtggccagaacgcgaagaagaagtggaagtccctgaagcgaagacaacaccacctttggagtctcaggcagggtctcgtctctactttaacatctgcgggcctgagactaactcatctataaacaaaggtgaggaagcgacaaatttttgttgcttttgctccaaggtggtaccaaatgaagaaaaacaagactgaagtgcgggaggacttggtcctccacataggatcttttgcttaaacttatcgggaggagtttgtgcctcccttggtttgtataatattactactctgcactcacttttagttctggtctgtaatcaagtaactcaagcttacttttgaaataaatcgacagcaacggcgacagcaacg

SEQ ID NO: 4306 - DNA, 866 bp, Zea mays
  misc_feature (18)..(18): n is a, c, g, or t
  Peptide Sequence Number=SeqID_10393
  Probeset Number=SeqID_18709
tccgcatctggtctttgngatactgactaaaatcttgttctgacttctgagcatttcagcatgttgcataagtcacctacccagtgttattaaaactacatttaaacgttaaaactctaattagaggttgaaaccgtgttttagcgttttgacgttctaaactgtaacacaaagtgtttcatgcgttttagaccattagctacttttgagcccaatctgttagttacttttggggtccaatccggctcatgggtgaagttttggtaagctactaaactctctgttttggtatttaacttcatgttattgtctgaaattatgatatattggtattttttctatgttgtttaaaattacgtttaagcaaagtttaaacgtttaaaagtcaaaacttcacccatgagcgtgtcaacattttatatttttaaaaccttgcacctacttagaagtggtccagttctcagtaggtattagattagctgatgcctttttgtttactctattagtttgaagctctgatgggttcacaggtttcatgaggtcgtttttcatattcttgtcacttttgctctgcacatatcagtgttctatggtatcattcgctgtgctattgagagctcactgcattatttataataggtgtagttagggcctaagcccattacacaaatacaacacattacaatagacattacacagtagctctaacaattaacattgtttattggtgcaagggtcccgaactttataatagtaatgatacctcagaacacatactagaacaattgtatattaagtagcatatggttcagagctatcttccagagctatcttccagaaaacaacctacctagtgaccatgcata

SEQ ID NO: 4307 - DNA, 1027 bp, Zea mays
  misc_feature (1)..(424): n is a, c, g, or t
  misc_feature (1025)..(1027): n is a, c, g, or t
  Probeset Number=SeqID_18710
nnnnnnnnnnnnnnnnnnnnnnnnnnnnnnnnnnnnnnnnnnnnnnnnnnnnnnnnnnnnnnnnnnnnnnnnnnnnnnnnnnnnnnnnnnnnnnnnnnnnnnnnnnnnnnnnnnnnnnnnnnnnnnnnnnnnnnnnnnnnnnnnnnnnnnnnnnnnnnnnnnnnnnnnnnnnnnnnnnnnnnnnnnnnnnnnnnnnnnnnnnnnnnnnnnnnnnnnnnnnnnnnnnnnnnnnnnnnnnnnnnnnnnnnnnnnnnnnnnnnnnnnnnnnnnnnnnnnnnnnnnnnnnnnnnnnnnnnnnnnnnnnnnnnnnnnnnnnnnnnnnnnnnnnnnnnnnnnnnnnnnnnnnnnnnnnnnnnnnnnnnnnnnnnnnnnnnnnnnnnnnnnnnnnnnnnnnnnnnnnnnnnnnnnnnnnnnnnnnnnnnnncatttttgtcgtggacagcaatgacagagagcgtgttgttgaggcaagagatgagcttcaccggatgctgaatgaggatgagctgcgtgatgctgtgctgctggtgtttgccaacaagcaagatcttcctaatgccatgaacgctgctgaaatcactgacaagcttggcctgcattctctgcgccagcgacactggtacatccagagcacatgtgctacctctggagaggggttgtacgagggccttgactggctgtccaacaacattgccaacaaggcttgaagcatctcggcaggggcttctatggatctggataagctggatattcggactaatactgcctttacgtattataaactatatagtcttgacagataagtgtgggtgtttttggaaggataaagctctctatcaagagttttagctataattttccgcgcttctgttttggttttgtgcaaggtaaaccatgtctgactgtgctcgcccctgtctgagtcgttgtactatcccggcctgtccgtttttttttttgtctagagatgctttcagttttgaactgctagaaagtcggttttaaaaaaaaatgttttttaatcnnn

SEQ ID NO: 4308 - DNA, 435 bp, Zea mays
  Peptide Sequence Number=SeqID_10394
  Probeset Number=SeqID_18711
tttttctctctcaaagcaaaagagaacaaaaggcatggattcattctcgtccttcttcgatgctcaaccaggaagcagaaactggagctataattctctcaagaacctccgtcagatctctccctccgtccagaatcatctcaagcgggtttatctcactctgtgttgtgcgctcgttgcgtctgcgtttggagcttacctccacgtgctctggaacatcggtggtattctcactaccattggatgctttggaagcatgatttggctgctctcctctcctccttatgagcaacaaaagaggctttcacttctgttcctgtctgctgttctcgaaggtgcttcagttggtcccttgatcaaactggcagttgattttgacccaagcatcctcgtcactgcgtttgtcggaactgcgatagcctttatctgtttctc

SEQ ID NO: 4309 - DNA, 603 bp, Zea mays
  Peptide Sequence Number=SeqID_10395
  Probeset Number=SeqID_18712
ggccctccctcgagtttttttttttttttttttttttttttttttttttttttttttttttttttttttttttttttttttttttttggaagggaagggatcaaaaatttttggcccctgggaccaaattgaaaccttgggccccttttttttggggggcatacaaaagaagtttttttggtggttggttaccgggaatttgaatttttatccccggaaaatggggaaaaccctttttgaaaaattgtttttaggggcccaaaccaaccttttagagcaaacgaccccaggggcaaaagccaaaaaaaacggccttgaagggggggcccaggttaactttaatggcccgattaaaacggttaaacccccctgcccgatggggggacatgggggcaaccaaaccccgccccggccctcccaaaaagggacttcccctggggcccacttatggggggcaggggttgcgccggcgtgtttttccggttaacctctttaaacaccgacctgacagccggggccctgccaaggccgttaaaaccggccccggcctcggcctgggccgtgccccgaaccttgccctttccctttgcctgccttgacctt

SEQ ID NO: 4310 - DNA, 872 bp, Zea mays
  Probeset Number=SeqID_18713
tcgaggccggccgggccgggatgatccactctccggtttccgctcctatcgagctgctccctccccaccaccgagaccctggagcaccacgtcaccgacgaccagatcgccgagttcagggaggccttcatcctcttcgacctcgacggcgagtgctgcatcgcgaccatcgagctgaggcactgtccatggctgctcggctgtcggtccaaatgcctatcagacggcgtgaccctgccagggacatggatcaaccgaggtctaatgctggatgagcaacgagtaccatcggatgttcccacgagtcttctcaacctttatggctcgactgatgaaggacaccgactactgaggaagagctcaaggctcccttccgtgtgtttgacaaggacctataacggatgcatcgcgggcgtcgacctccgccatgtcatgacaaatcttggcgtacaaactatctgatgaagagtgggacgagatgatccccgacgctgatagtcgatggtgatgggcacatcgactactacgaatgtatgacaaggacatgatgtgcaatggagctcgcatgaaccgtaatctgcatacgcagagaagattatgcgttgcatatctagtcaagatgcacctttttattccatcgacttctagtgaaacattctgctagatggagttgctgaatcaggcaatgtacttcctgcgttgttcttccctccagtgtgttttcagaactgctgtttcctgtgaacttgtaatgattgccctctctgctgtgtcttgattgcacgttaaaatcatatgtagtttcaccccacccacacatcaacttctgtttcacgctgtttgtatcgaaaaaaaaaaaaaaaaaagcggcc

SEQ ID NO: 4311 - DNA, 706 bp, Zea mays
  misc_feature (1)..(1): n is a, c, g, or t
  misc_feature (3)..(3): n is a, c, g, or t
  misc_feature (567)..(567): n is a, c, g, or t
  misc_feature (586)..(586): n is a, c, g, or t
  misc_feature (600)..(600): n is a, c, g, or t
  misc_feature (602)..(602): n is a, c, g, or t
  misc_feature (605)..(606): n is a, c, g, or t
  misc_feature (615)..(615): n is a, c, g, or t
  misc_feature (640)..(640): n is a, c, g, or t
  misc_feature (655)..(655): n is a, c, g, or t
  misc_feature (659)..(659): n is a, c, g, or t
  misc_feature (672)..(672): n is a, c, g, or t
  misc_feature (706)..(706): n is a, c, g, or t
  Peptide Sequence Number=SeqID_10396
  Probeset Number=SeqID_18714
ncnttggtaccgggccccccctcgagcttgcgttcatggctccaggcgacgagaacatggagcagtcagatctgcttgctctcccaccgatcgagcaatatcttccgccgagcaccgacgccgatgccgcgaagtcgctgtcggcactataccggtcacactgtacctcccttgttgagtgcatccgatactgcaaggagaagacattcttccacctctatacatctttccagggtaccctgacgatgcctgtgcacaagctcttcagccatcctgccctcgctccatggatcgaagggtgtgatctcgtcctgtaccagaacatgatgcgcatcatctccaagttgacgctgcaggtgctgcccaagccagtcctggacactttacgagctatttccgagcgtttgattcctcatatcaaggaatcattccagggtcagcctgccacgtcctgcgggccaaggaaactccagcgaccctctttgccggacttctttgaccgagcactgcgtgtaacttgaccgcacacgcacaacgaacatgctggcgaacccaccaaccggaatnaatgtacgtggaatggatncaatgataaacctncnaanngccaatgcngccacccgggcatggatacaccgcnccttctagcaacganagcngactttggacctnaacggccggggaatgaggctgacattatggaacn

SEQ ID NO: 4312 - DNA, 874 bp, Zea mays
  misc_feature (2)..(6): n is a, c, g, or t
  misc_feature (13)..(14): n is a, c, g, or t
  misc_feature (17)..(17): n is a, c, g, or t
  misc_feature (648)..(648): n is a, c, g, or t
  misc_feature (654)..(654): n is a, c, g, or t
  misc_feature (693)..(693): n is a, c, g, or t
  misc_feature (700)..(700): n is a, c, g, or t
  misc_feature (702)..(702): n is a, c, g, or t
  misc_feature (705)..(705): n is a, c, g, or t
  misc_feature (714)..(714): n is a, c, g, or t
  misc_feature (716)..(716): n is a, c, g, or t
  misc_feature (720)..(720): n is a, c, g, or t
  misc_feature (728)..(728): n is a, c, g, or t
  misc_feature (731)..(731): n is a, c, g, or t
  misc_feature (733)..(733): n is a, c, g, or t
  misc_feature (737)..(737): n is a, c, g, or t
  misc_feature (739)..(740): n is a, c, g, or t
  misc_feature (744)..(744): n is a, c, g, or t
  misc_feature (753)..(754): n is a, c, g, or t
  misc_feature (757)..(758): n is a, c, g, or t
  misc_feature (760)..(760): n is a, c, g, or t
  misc_feature (765)..(765): n is a, c, g, or t
  misc_feature (771)..(771): n is a, c, g, or t
  misc_feature (778)..(780): n is a, c, g, or t
  misc_feature (784)..(785): n is a, c, g, or t
  misc_feature (788)..(790): n is a, c, g, or t
  misc_feature (799)..(803): n is a, c, g, or t
  misc_feature (805)..(810): n is a, c, g, or t
  misc_feature (813)..(814): n is a, c, g, or t
  misc_feature (816)..(816): n is a, c, g, or t
  misc_feature (818)..(824): n is a, c, g, or t
  misc_feature (827)..(843): n is a, c, g, or t
  misc_feature (845)..(848): n is a, c, g, or t
  misc_feature (852)..(855): n is a, c, g, or t
  misc_feature (857)..(862): n is a, c, g, or t
  misc_feature (864)..(873): n is a, c, g, or t
  Peptide Sequence Number=SeqID_10397
  Probeset Number=SeqID_18715
gnnnnnatgtgtnnccnattgggtccgggcccccctcgagccgacaccaagaatactctcgctggaggcaactacctctcaatcatcaactgtttgatgcaactgcgcaaggtgtgcaaccatcccgacttgttcgtcgatcgtccaatcatgacctcattccgcatggcgaagtcagttgccgccgactacgacttcacagaaaggcgtatccagtctttgttggcaacgcctcctatgagccaagtcgatcttggtttcctgaacctcatccctacgactcatgagcacctatctattgggacggctgatcgcgtcgctcagctaagctcccaccgtccactgaatgagctgcgagagacccaacgacaccgcgcacagtccaccaacactcatctggacccgtcaactgttcagtcaaaccttgagtatctggaaagtgcatcccgctggggtcgctttgaggaattgcagcattgtgtttatctgaatgcgttgcgccggcagcagcgaccgatatatgggaaaggccttgttcagatgctcacggttggagttgacaaaaggcttataagcccaagcccaaagtgccaaacatgtcatggatggtcgaaacacagcaccttatacgagcagatgtcctctttnttcaanaccatagttacgctacaatgaaaagtttctgttaccccnccgtgcncncanactggacantntctngaggaagnggngntttnannaaanaaatttttnnttnnanggggntttttnaaaaaannngggnnttnnnggggggggnnnnntnnnnnnganntntnnnnnnnggnnnnnnnnnnnnnnnnnannnngggnnnntnnnnnnannnnnnnnnng

SEQ ID NO: 4313 - DNA, 1530 bp, Zea mays
  misc_feature (1)..(67): n is a, c, g, or t
  misc_feature (1485)..(1530): n is a, c, g, or t
  Peptide Sequence Number=SeqID_10398
  Probeset Number=SeqID_18716
nnnnnnnnnnnnnnnnnnnnnnnnnnnnnnnnnnnnnnnnnnnnnnnnnnnnnnnnnnnnnnnnnnncccttctgtcgctgctcccaccatgctagcccgacaggtgaagccgccgccgctgcagtgtccatagccaccgcaggagactgagatggggggttttgtcaagacccacaagatcaatgtcttacttccactgtatccagccgaagtaacccgagaaggcgcgctggcaagacagactaacagggccaggataaggctgcattaaccaagacaaaaacaagtacaactacacccaaatacagaatttgttgtgcgatttaccaaccagggacataccagcacaaaatcatttctggctagtaatagcagggtgatatgggtctttggcttctgctttactcgcatgagtatgcgcacgatatgggtctcggaagttgggtctgaccacactatgcagcttgcctacctgcactgggccttctgttggatcgtacgcgagcctcaagaacccgcggtttagataaggaatagtgagggcaatgttgaggccacgtggtgaggatttctctgctgagccaactgatgagaggaggcctttccgtgctctctttggatgttggtcttatgtaggactacaactgggaacccgtgtcttttggtgcccctcaaggggagcttttggatgggtggactggatattcctcacaggcgagaggagggtttgctggtttcaagaaggatgacaagcagctggatgctgatatccatcgcaagtacatctatggtggccatgttgctgactacatgaggaacctcgctgaagagggagccattttttgttccagtctcacttcaagtgagtacatttagaaagggaatttgaggctgatgacatggaaagctctgtacaagaaggtccatgctgccatccgtgctggatcctttctgtggtcaggtcaaccaagcagccaccaagggagcaccagaggtaccactcccaagaaccctgacataccgagcagaggaaggccagtctcatttaaaggctcaaccaaatcaactcctcgggcggagcagattatgcgcatgaggatgacgagtaaagtttggtcccatcaaagtagtgctatcttatgcgcccaccccgtctttgtgctatggcatttatcgctcccggtagtcgtgcaacatgccatttttgtttaagtttgtcgatgcgaccaaagttgtttctgttagtttggagctggagttctgaatatttacttttataatattaaaattggaccgagtcgaaaaaaaaaaaaaaaaataaaatcaagagttcgcacgaggtggcccggcgagcatgtgtcgtgccgccgtcgtcagagattcctagtcctagttgaggtcgaggagcttcagcagtcaccctcaccggacaaagtgagtcgaaagctgaaagtgaagaataatcatgttcttacagttttacnnnnnnnnnnnnnnnnnnnnnnnnnnnnnnnnnnnnnnnnnnnnnn

SEQ ID NO: 4314 - DNA, 596 bp, Zea mays
  Peptide Sequence Number=SeqID_10399
  Probeset Number=SeqID_18717
aactttaaatcgtacaagggtcggcagattatcggaccatttcagagattcaccgccatcattggacccatggctctggtaagtcaaatctcatggatgccatcagctttgtgttgggtgagaaaaccagcaacctgcgggtaaagaccctaagggacctgatccacggagctcctgtgggcaaaccagcagccaaccgagcctttgtcagcatggtctactctgaagagggtgctgaggaccgcacgtttgcccgtgtcattgttggaggttcctccgagtacaagatcaacaacatcgtggtcccgctacatgactacagtgaggagttagagaagttgggcatgctcatcagagctcgtaacttcctcgtcttccagggtgctgtggaatctattgccatgaagaaccccaaggagaggacagctcttatttgaagagatcagtcgctctggggagctggcccaggagtatgacaagcgaaagaacgacatggtgaaggctgaagaagacacacagtttaattatcatcgcaagaaaaatattgcagctgaacgcaaggaggccaaacaagataaggaagaggctgaccgcta

SEQ ID NO: 4315 - DNA, 605 bp, Zea mays
  Peptide Sequence Number=SeqID_10400
  Probeset Number=SeqID_18718
aaagctggagctccccgcggtggcggccgctctagaactagtggatcccccgggctgcaggcccccccccccccggcctgaatgttgcacgatagagtgaaactataagcaggagtagagagcagccgataggatctcaaatagagtgatagctacctggaatcctcacgagagagagaagatccaggcaggagaggagacgggcacgcggacaggagagatcactgaaatgacataagaggtgagcacgtattagtcacatagtcataagtatatgaaatgtgaataaatacatacacaaagagttaagacaaaaaaactgggtgatttggagaaacaggggtcaaacgctgcgataacgacattggaacgatgaattgttccataggaagtttgaaatttgaaaagaggcaagaaatgatgtggaattgagtcgatacttcatagattggtatctatgagtgagtatgagtgaagtgtgtgcttggtttgaaatttggaggagaaaatgaatttgtggcactcggctgagaaacaaacgctataaatgggaaatagtggaatacccgatccctgggatatcggataggcgtgaattttgggcc

SEQ ID NO: 4316 - DNA, 465 bp, Zea mays
  Probeset Number=SeqID_18719
agggctgcacccattgcaaggaagattctccctaaggcaaggcatcggtgtgggtggctttcaaaaaatttaccggtgccccccaaagaaatggctccccccccccacatttttgcaaaaacagtggtgttgttgcacgcaacatcctgcagcagttgcaaattatgggcatcatcgatgtcgatcccaagggtggacccctcttccccaaccagggaaggggtgatttggcccaagtggctggaagggtccctgtttaagcgtgaccagggtcatctttggtttcaagggggtcatgtttgatggttgagaagactgcgccccatttgctccttttgggttgggattttcgggttcaggggcctttaaggttttttgcctcctagctagggcgcccccctttgttccccggggccctaatgtgatatcaagaccccattctcgaatttaagatatatgtttgcc

SEQ ID NO: 4317 - DNA, 726 bp, Zea mays
  misc_feature (28)..(28): n is a, c, g, or t
  misc_feature (30)..(30): n is a, c, g, or t
  Peptide Sequence Number=SeqID_10401
  Probeset Number=SeqID_18720
gctcctgcccccccaagtcgtcgaaagncnacccggtggagaagggaggcgaggagcgtgtgaaaaggtcgcttgacatggcgataacatacagctgaactgagcccggccagaagcggagcacaaaacaaaatcaaggcgtggcgaggtgattcgtcaaattgacggtgtaaggaacgacatgaactgatgcgaaatccagtgtgcgcctctcagtttaggcttggcattgtttttccctctcaatcgatgtttaattcttcgtggtttttttgttttttttttgtttttgcttctttcctctcacctggtggagtcggcaaccagcactcaacacacggcagctgcgcttgcgcggtcaaggctccaggcaggcagtcgacggctcgcggcgggcagcagccgttcccgttcggcacccgtacctgtgtctcgcggctacctcgccggcgtctggcgacgaccacaaacactagaccgccaaggggatcggcgtttcagccgggagggctacgcgggcgtggcgtctagcggtggcgttcggtcggcggaccttaaggcgtggcgctgcgtgcagagcttcgctccgcatccatggcggtcaggggacccttggtcagcgacctcggggggggcctcatgagtcctggtagcgagtgctgttcgcgggtcgtcggcccttcccagttgccagcgcttggtttggcccgtgggcgtggtttatga

SEQ ID NO: 4318 - DNA, 396 bp, Zea mays
  misc_feature (23)..(23): n is a, c, g, or t
  misc_feature (103)..(104): n is a, c, g, or t
  misc_feature (176)..(176): n is a, c, g, or t
  misc_feature (180)..(181): n is a, c, g, or t
  misc_feature (184)..(184): n is a, c, g, or t
  misc_feature (188)..(188): n is a, c, g, or t
  misc_feature (202)..(202): n is a, c, g, or t
  misc_feature (279)..(279): n is a, c, g, or t
  misc_feature (328)..(328): n is a, c, g, or t
  misc_feature (362)..(362): n is a, c, g, or t
  misc_feature (378)..(378): n is a, c, g, or t
  Probeset Number=SeqID_18721
gccaaaacaaaagattcaaaagncgccgagagcacaaaccctcctctaatggcgtctctctccatggcttccgttaaccttagcttctctcccttacgctcgnntccaaaggtttccactcacgcttccgttcaattcgctcggttcagctcgtcgattcttgcctcagctcactncatnnctnggcntcgcgcggttcttnctcagaagatatccaccgttgtctctcagagttctcagaggcttcagactcttaccgttttcgctcataagggctanaagatgaagatccataaggcctcagcgaagaggttcagggtgacgggtngagggaagatagtgaggaggagatccgggaagcngcatttgttagctaanaagaacaacaagaggaag

SEQ ID NO: 4319 - DNA, 478 bp, Zea mays
  Peptide Sequence Number=SeqID_10402
  Probeset Number=SeqID_18722
atgcagggctccgtccattccacaacaccatccggggggttacaacagctcaacgaatcacggggagcaacaaaacagcactgaaaatgtagttggcccgaggaaaaaactgggttctaaaaattctgccttaattcaacatacaatttacacataccactactgattgaccatgggtagcttcccaaaaaatgcaaaatcaagcttgcctgcagcaggtacacagggatatcatttccctggcccattactccaaataagttgggggctcaaatccttttagcgacgagggatcccttccatcacccgtttattacttagctaccacaaaaaccatgcttaaattttatattttctgggcccttctccccacattggcttaagccatatccgccccttttgactggaagacctccatgtccctgatatcccttttaaacacattacctatcttggcaactgccttcttttgttgttt

SEQ ID NO: 4320 - DNA, 615 bp, Zea mays
  misc_feature (601)..(615): n is a, c, g, or t
  Probeset Number=SeqID_18723
acgtcgatgatgccagtagctgcagatgtcacagtaggctcgtatgggacggaactggaaatgtgtgtttggggaagcggataagagaagccttgcagaggatgtgaggtacggtttgagttcagggcagtggctgctaacattgaagatttgacgcctggaatgctaggtcgccgtcccggagaggccctcattgttaactttgcattcctgctgcaccaccttcctgatgaaagtgtctcaattatgaaccaaagggatcggcttctccgtatggtgaagggtctccgaccaaaactagtgacgttggtggagcaggacgcaaatactaacaccaccccattcccttccaggttccgggaggtctatgactactattcggcactttttgattcactggatgccacccttccaagggaaagcccagatagaatgaacgtggagcgccagtgcctcgcacgggaaatcgtcaacatcttagcttgtgaaggtcctgaccgtgtggaaaggtaaattcttaacagcactcttccatgagtcctggtctcatgcacgttgcaaactccaattaatgtttatacaccagctcattttttttttnnnnnnnnnnnnnnn

SEQ ID NO: 4321 - DNA, 2067 bp, Zea mays
  misc_feature (1)..(1): n is a, c, g, or t
  misc_feature (2052)..(2067): n is a, c, g, or t
  Peptide Sequence Number=SeqID_10403
  Probeset Number=SeqID_18724
ngctggtggctactcctgatgcattgcgatggcaagtggagtgagtgatggcgaatgtgaccgacgacgggctcatcttcttctcttttacactagagcatgatgcatgggcaggagctgtcctatgactcctatccctcctccttcctatccatggacgacatgcaccgccaactccaagcaccaccggcctgccaaagccgccgcagcagcagcagcagcatcttctttttctttttcttagcagcggccatcatctactgcgtcgtgatcatcagacgattgatcaaattccaagggaggaggagggtgaagaatgatcatgcagcagcagcagcagcaccaccaccaccaccaccgggaaggggtagccgctggtggtggtccgtcgtggagacgctggccttcctgtccgccaacagcagcggcaggggcttctaccacttcgtggaggctcgccaccgcaggtacggtcccggcccctgcttccgcacctcgctcttgggcgccacccacgtgttcgtctcgtcggccgacgccgccaggtcgctcctgggcgccgagccagccggcttctcgaagcgctacgtgcgcaccgtggcggagctcctcggcgagcacagcctgctgtgcgcctcccacgccacccaccgcgccctgcggcgcgccgtggcgcccctcttcaacgcgcaggccacggcgtccctggccgccaccttcgacggcctcacgcggaggctcatgaagcgcgactggagcagcagcactggggtccgtggtggtgctcgacgccgcgctggacctaacattcgaggccttcatgccgacatgctcatccggtaggacgctgcggggcccgatgcgaggcggcggctgccaagggacgcgccgctccctgaagcgcgacacgcggcggttcctgctcacgccagcggggccgaggctcgacccgggactccggacctggggaagacgcatggacgggctcagccgagcgatcggatcatgacatagacggacgagagccatggatggggatgaggcggggccgtggaacggggtcgactgtcgcgcgtgcctccttgttctcaggactaggccgaggaggcggatgcagcagcaagtgcacctttttgcatcgtcgtcagggcctcttcaggacgacgacgacgtcgcggtcgctgacggccagattctcgatatcgtcttgacgttcatcattgccgggcgggtgccgacagcgcgcgcaattacatggatggtcgtggatgtgtgcaggcaggcgtgctccagaggctggttcggtgtgtggcgggtgctggggagtggtagcccttcgtcccttgggcgtgaggtcggcaacgatcgccctagcgggtgtttgggtctgtgaggctgttcctgtctaggtgggttgctatggcctgcgcgggtagcccgtgtggtgtttgggtccggtgtccctcaaggatggagcaagtcttttctgctgagggctgccttggagctgagccccggattgccaaggagaaaaccttagcgaaacaagatggccccgagaaagacctgatacaggatgcctctatatccgtagttagaactggaaagtagatatgcagaggaaaacaagaagatccagaaagagctggatctcgtccggaagacacatgcatctcctggggacttctcggcgacgtctgtgctgctggtcttgttgttatcttcacttgttggatacctgatgttcggaagcaaaacttagcaagttcttagaagcaagataatgacagcacatcattctgcggctccggcacagctctatcgtcttttgtgtattgctccttttagtacaaaatatatatagttaagtagtccacaatacatgacagatactcctcccttgctagtcccgtatgaacagatactcctctcttcttgagtaggtgtttttttctttctcaagggctagtttgggagccacaaaaccggagtggattgaattgtctgaaatctccttcttaattaattttaaataaaaagtgaattttaacnnnnnnnnnnnnnnnn

SEQ ID NO: 4322 - DNA, 701 bp, Zea mays
  misc_feature (2)..(2): n is a, c, g, or t
  misc_feature (35)..(35): n is a, c, g, or t
  misc_feature (547)..(547): n is a, c, g, or t
  misc_feature (554)..(554): n is a, c, g, or t
  misc_feature (572)..(572): n is a, c, g, or t
  misc_feature (591)..(591): n is a, c, g, or t
  misc_feature (595)..(595): n is a, c, g, or t
  misc_feature (602)..(602): n is a, c, g, or t
  misc_feature (610)..(610): n is a, c, g, or t
  misc_feature (615)..(615): n is a, c, g, or t
  misc_feature (624)..(624): n is a, c, g, or t
  misc_feature (633)..(633): n is a, c, g, or t
  misc_feature (653)..(653): n is a, c, g, or t
  misc_feature (660)..(660): n is a, c, g, or t
  misc_feature (662)..(662): n is a, c, g, or t
  misc_feature (677)..(677): n is a, c, g, or t
  misc_feature (685)..(686): n is a, c, g, or t
  misc_feature (690)..(690): n is a, c, g, or t
  misc_feature (693)..(694): n is a, c, g, or t
  Peptide Sequence Number=SeqID_10404
  Probeset Number=SeqID_18725
cnattgggtaccgggccccccccgcgcgagccctngcggacaacggcaacagcaaggagttcttcatcctgatccaccaagcaggcggatgggacgtctccttgtggagcgacccgcgcaactcgcgcaagggcggatacatcggcgatcccgccacgaccgccgacgtcgactcgacgaaggtgacaggatggaaggaccagccgctcgacggcggatcagacgtcacgttccagctcttgcagcgcggtaactacgtgctcggcccggcgatgggctcgctcgcggacatgtacgatcgcttcacgctcatcaacgggctcgcgatgaacaccgtgagccacccggacggcacgtacttctcctcgacgggtcgacacctcgccggaggtcgcccggttgccgcgagcatcgacaccatgctcgccaacgagatggtcacgcagcagaacatcttgccgagcgtgtcggtgaacttcccatcgacgttcatcggcaacggcctcacgcgagcgtgtcgccgttgcgggcaccgacgtgacggggncgcaatnctcgcgcgcacgaagctntacgacagcgatcaagacnggcnacgtacnggctgttngacangaggcaaanactcgccangaccctatatccgagggccnaggcttnantcagtaaccaatgcnttttgtanncacntcnncctttta

SEQ ID NO: 4323 - DNA, 976 bp, Zea mays
  Peptide Sequence Number=SeqID_10405
  Probeset Number=SeqID_18726
ccggccgggaaatccctctcaatcttacatgcaacatacatacgatggactcgcgttcgcactactatctacactatctatctatactatcgctccatacttcgctcatactactggaacacgcactgtggcctcaagcgcgcacgagtcacgaatggtgagtgcagtcgcgaactatcatggtctcagaggccctctgatcatgggaagatctcctaagcaaacttttcctacatcattggtgagatcatctacaatggtattatgatccaaaagcacgtgacacagaactcgcgatagagagaccacgagctgaacatcgcccgacaagaggaccgacaccgtggatacggtaagagtaaggtgtaccgacaatgcccgtatgcccagccaggtcctctggatgcgccgcctccgagtcctccgccgacttttggtcaagtaccgtgccagcggagggcgcgtcgggccccccgaccccgcccggtaccacagcagcaacggtaacgccttcaagcacaagcgtgccctagttgagcacattcaccgtgccaaggctcagaaggcccgcgagaccgccctccaggaggagatggatgccaagcgtgcgaagaacaaggctgcccgtgagcgcaagcaggagcgtgcggcggcgaagcgaaatgccctccttgccgaggaataaatgtaagcctagtggacaacgacaacatttcggtcttaagaggaggctgcatacggagtctacgggttggatctttttttatgccctcctgacttcctctatcgcacaaggagttttttttttcccccccccccccccggggagggtctgaatgtatatgttgaatcggtattcaaactttctcaacatctccaggaccgcttccaccatcacatgtccgtccctcccccaggcaaagccgcagatgatctcccccttgcgactgaatccaccactccatggccgctccct

SEQ ID NO: 4324 - DNA, 481 bp, Zea mays
  Peptide Sequence Number=SeqID_10406
  Probeset Number=SeqID_18727
aggttccttaccctgaggcccccccctattttatgcgctgaatcccagaggaacccctggtggttggagccctatctttaagccaattgggatgtttcctttccctgggctgaaaagcgaccaagtcgctttcttggggccggaatcccccctttttttgccttttgatggggggatcagcatggccggtttgagcatgaggactgtgcccctttttgcaaatgccatacccgctgcagtttctcaactgaaatgaggatagtttcgcagctttcgtgaataaaacctgaatccccccccccaatgttttaagttcccagcccgtggtattttctggttgccctcctgtagtttgcgtcggaataaaaatgtttttttcctcttcgtggggcagttttgttctggtggattcataagggctctgattatggggcgttcggaacttttaataataagcccctgaaattttgcttccggggcc

SEQ ID NO: 4325 - DNA, 686 bp, Zea mays
  misc_feature (1)..(86): n is a, c, g, or t
  Peptide Sequence Number=SeqID_10407
  Probeset Number=SeqID_18728
nnnnnnnnnnnnnnnnnnnnnnnnnnnnnnnnnnnnnnnnnnnnnnnnnnnnnnnnnnnnnnnnnnnnnnnnnnnnnnnnnnnnnnctccccctcgcctttcccttctcgccagctatctccctggcgctcttcctcggctcccatgatcgagctcgtcctggcgctagccctctccagttctgtaacaccaacaccctcaagtcctatgctgacgcccctatatattttcctccctgttgtggcagctcctgctcgtccaggtacgctagctgaaaatcgtgcgaagcgaagggtgtggatcaaaacaacccacaagacgatgtcaaccgatgatcatgaagctagatggactaagcgggtgtcagaataaaagttgatcgtcaagtggccatcatctaacaacactaacgtagtgtttatcccaggttataagtttgtcctgttgtggatggtgctaagtgccggtgggctcggtcttcttatataagtatatcccatctttagcttctttattgaggactgccacttaagctagcatatattttaaaacttataaatgttttatacattcaaattgtaatctttctgaatcattttcttttgtaatcactctgatgatgtataataaaatcctgatgtaacttgtaatcattttgtaataaagaatttatttccgctgcaaaa

SEQ ID NO: 4326 - DNA, 844 bp, Zea mays
  misc_feature (4)..(4): n is a, c, g, or t
  misc_feature (8)..(10): n is a, c, g, or t
  misc_feature (12)..(16): n is a, c, g, or t
  misc_feature (24)..(25): n is a, c, g, or t
  misc_feature (27)..(27): n is a, c, g, or t
  misc_feature (30)..(30): n is a, c, g, or t
  misc_feature (33)..(33): n is a, c, g, or t
  misc_feature (38)..(38): n is a, c, g, or t
  misc_feature (41)..(42): n is a, c, g, or t
  misc_feature (46)..(47): n is a, c, g, or t
  misc_feature (53)..(53): n is a, c, g, or t
  misc_feature (57)..(58): n is a, c, g, or t
  misc_feature (60)..(60): n is a, c, g, or t
  misc_feature (69)..(70): n is a, c, g, or t
  misc_feature (75)..(75): n is a, c, g, or t
  misc_feature (77)..(77): n is a, c, g, or t
  misc_feature (81)..(84): n is a, c, g, or t
  misc_feature (87)..(88): n is a, c, g, or t
  misc_feature (91)..(93): n is a, c, g, or t
  misc_feature (96)..(96): n is a, c, g, or t
  misc_feature (99)..(99): n is a, c, g, or t
  misc_feature (101)..(101): n is a, c, g, or t
  misc_feature (103)..(104): n is a, c, g, or t
  misc_feature (110)..(113): n is a, c, g, or t
  misc_feature (118)..(118): n is a, c, g, or t
  misc_feature (121)..(122): n is a, c, g, or t
  misc_feature (124)..(124): n is a, c, g, or t
  misc_feature (130)..(130): n is a, c, g, or t
  misc_feature (132)..(132): n is a, c, g, or t
  misc_feature (134)..(135): n is a, c, g, or t
  misc_feature (138)..(140): n is a, c, g, or t
  misc_feature (142)..(142): n is a, c, g, or t
  misc_feature (146)..(147): n is a, c, g, or t
  misc_feature (149)..(149): n is a, c, g, or t
  misc_feature (161)..(161): n is a, c, g, or t
  misc_feature (164)..(165): n is a, c, g, or t
  misc_feature (169)..(169): n is a, c, g, or t
  misc_feature (171)..(171): n is a, c, g, or t
  misc_feature (173)..(175): n is a, c, g, or t
  misc_feature (178)..(178): n is a, c, g, or t
  misc_feature (181)..(181): n is a, c, g, or t
  misc_feature (186)..(187): n is a, c, g, or t
  misc_feature (189)..(189): n is a, c, g, or t
  misc_feature (191)..(193): n is a, c, g, or t
  misc_feature (197)..(197): n is a, c, g, or t
  misc_feature (199)..(199): n is a, c, g, or t
  misc_feature (201)..(202): n is a, c, g, or t
  misc_feature (204)..(206): n is a, c, g, or t
  misc_feature (209)..(210): n is a, c, g, or t
  misc_feature (214)..(215): n is a, c, g, or t
  misc_feature (217)..(218): n is a, c, g, or t
  misc_feature (220)..(222): n is a, c, g, or t
  misc_feature (227)..(227): n is a, c, g, or t
  misc_feature (229)..(229): n is a, c, g, or t
  misc_feature (231)..(231): n is a, c, g, or t
  misc_feature (233)..(233): n is a, c, g, or t
  misc_feature (235)..(235): n is a, c, g, or t
  misc_feature (237)..(237): n is a, c, g, or t
  misc_feature (240)..(240): n is a, c, g, or t
  misc_feature (242)..(242): n is a, c, g, or t
  misc_feature (246)..(246): n is a, c, g, or t
  misc_feature (248)..(251): n is a, c, g, or t
  misc_feature (254)..(254): n is a, c, g, or t
  misc_feature (260)..(260): n is a, c, g, or t
  misc_feature (262)..(263): n is a, c, g, or t
  misc_feature (265)..(266): n is a, c, g, or t
  misc_feature (269)..(269): n is a, c, g, or t
  misc_feature (274)..(274): n is a, c, g, or t
  misc_feature (279)..(281): n is a, c, g, or t
  misc_feature (283)..(283): n is a, c, g, or t
  misc_feature (289)..(289): n is a, c, g, or t
  misc_feature (291)..(291): n is a, c, g, or t
  misc_feature (294)..(294): n is a, c, g, or t
  misc_feature (298)..(299): n is a, c, g, or t
  misc_feature (301)..(301): n is a, c, g, or t
  misc_feature (304)..(304): n is a, c, g, or t
  misc_feature (307)..(307): n is a, c, g, or t
  misc_feature (309)..(310): n is a, c, g, or t
  misc_feature (313)..(313): n is a, c, g, or t
  misc_feature (317)..(318): n is a, c, g, or t
  misc_feature (329)..(329): n is a, c, g, or t
  misc_feature (331)..(333): n is a, c, g, or t
  misc_feature (335)..(335): n is a, c, g, or t
  misc_feature (337)..(337): n is a, c, g, or t
  misc_feature (339)..(339): n is a, c, g, or t
  misc_feature (341)..(342): n is a, c, g, or t
  misc_feature (348)..(348): n is a, c, g, or t
  misc_feature (353)..(353): n is a, c, g, or t
  misc_feature (356)..(358): n is a, c, g, or t
  misc_feature (361)..(362): n is a, c, g, or t
  misc_feature (365)..(365): n is a, c, g, or t
  misc_feature (368)..(368): n is a, c, g, or t
  misc_feature (372)..(372): n is a, c, g, or t
  misc_feature (375)..(376): n is a, c, g, or t
  misc_feature (382)..(382): n is a, c, g, or t
  misc_feature (388)..(390): n is a, c, g, or t
  misc_feature (392)..(392): n is a, c, g, or t
  misc_feature (394)..(397): n is a, c, g, or t
  misc_feature (402)..(403): n is a, c, g, or t
  misc_feature (406)..(406): n is a, c, g, or t
  misc_feature (408)..(408): n is a, c, g, or t
  misc_feature (410)..(410): n is a, c, g, or t
  misc_feature (414)..(414): n is a, c, g, or t
  misc_feature (416)..(416): n is a, c, g, or t
  misc_feature (419)..(419): n is a, c, g, or t
  misc_feature (425)..(426): n is a, c, g, or t
  misc_feature (429)..(429): n is a, c, g, or t
  misc_feature (431)..(431): n is a, c, g, or t
  misc_feature (436)..(438): n is a, c, g, or t
  misc_feature (441)..(441): n is a, c, g, or t
  misc_feature (444)..(445): n is a, c, g, or t
  misc_feature (447)..(447): n is a, c, g, or t
  misc_feature (454)..(454): n is a, c, g, or t
  misc_feature (456)..(456): n is a, c, g, or t
  misc_feature (458)..(460): n is a, c, g, or t
  misc_feature (466)..(466): n is a, c, g, or t
  misc_feature (468)..(468): n is a, c, g, or t
  misc_feature (470)..(471): n is a, c, g, or t
  misc_feature (475)..(475): n is a, c, g, or t
  misc_feature (482)..(482): n is a, c, g, or t
  misc_feature (486)..(488): n is a, c, g, or t
  misc_feature (490)..(490): n is a, c, g, or t
  misc_feature (498)..(499): n is a, c, g, or t
  misc_feature (507)..(507): n is a, c, g, or t
  misc_feature (512)..(512): n is a, c, g, or t
  misc_feature (515)..(516): n is a, c, g, or t
  misc_feature (520)..(520): n is a, c, g, or t
  misc_feature (525)..(525): n is a, c, g, or t
  misc_feature (530)..(530): n is a, c, g, or t
  misc_feature (536)..(536): n is a, c, g, or t
  misc_feature (538)..(539): n is a, c, g, or t
  misc_feature (541)..(541): n is a, c, g, or t
  misc_feature (544)..(544): n is a, c, g, or t
  misc_feature (546)..(546): n is a, c, g, or t
  misc_feature (553)..(553): n is a, c, g, or t
  misc_feature (561)..(561): n is a, c, g, or t
  misc_feature (564)..(565): n is a, c, g, or t
  misc_feature (569)..(569): n is a, c, g, or t
  misc_feature (572)..(573): n is a, c, g, or t
  misc_feature (582)..(582): n is a, c, g, or t
  misc_feature (585)..(585): n is a, c, g, or t
  misc_feature (589)..(589): n is a, c, g, or t
  misc_feature (735)..(735): n is a, c, g, or t
  misc_feature (759)..(759): n is a, c, g, or t
  Probeset Number=SeqID_18729
acgntgcnnngnnnnngggcccgnnantgntgnggttntannggannaggtangcgnntnttatttttnngttcnanccgnnnngtnngtnnngtnatngncnngggagnnnnggganctnntnagtctncnannacnnnantgannangaattaacaatnganngggntntnnntgnganttatnncngnnngaanantnnannntanngttnngnncnnnaaccngntnangngnagnanaatngnnnnacnattttncnntnntgngttgnccaannngnatgtcngnttntttnngngcncgngnnacntttnntgttccgcctncnnntnananannaagtcntgttngtnnngcnntgnagngtanatnntgcacnctatgnnncncnnnnggtcnntcngngnagcntncgngatcannggngncattnnnttncgnntnagctatntncnnnggagangncnnagangaccggngaannncnactaactnnaatatcgngtaanctnncggnattangtatngtacgngnnantcntncgagttntcgaaatngannggtnaanntggttcaancgngttnacgcaagtggaagacaaaggaatccagtcagaggtttaaccaaattaagagaaggtttagagatagaacagaggatagtgctagaacggggagaattaacattggaatgagcagagaaagtagagcagcacacacccgcctcgctnaagaagacgccattgttttaggantgagagagaactctaagctcgggggggtggcggggactagtgagctctctctctctctctctacctggtgccgaattccacaggc

SEQ ID NO: 4327 - DNA, 498 bp, Zea mays
  misc_feature (484)..(489): n is a, c, g, or t
  Peptide Sequence Number=SeqID_10408
  Probeset Number=SeqID_18730
gggggagcgtgccgatttctattgaggagggaattgcagtgaagtcaacaatgcctaagcaaattcacgagattaaagacttcctcctcacagcacggaggaaggatgcacgctccgtgaaaatcaaaaggagcagagatgtggtcaagttcaaggtccgatgctccaagtacctctacaccctttgtgtgtttgatcctgagaaggctgataagttgaagcagtcacttcctccaggtttgagtgtgcaagacctttgagactctatccggtaaaaggtgaactgaagatcaagttttgctttgaagttgtgttttacatatatatttttgtcttttgttgcttagttgattattggcttatgattaccattatgaagggtccaacactgtttttgtagtcttgatgaagtttcaccgttatttagctaattgattagaccttctttaagtttatattaaaaaatttccagttgcttctccgnnnnnnacaccatcc

SEQ ID NO: 4328 - DNA, 889 bp, Zea mays
  misc_feature (601)..(889): n is a, c, g, or t
  Peptide Sequence Number=SeqID_10409
  Probeset Number=SeqID_18731
tttctgaggcttcaggactcgacctcttgctacgccgccatgaccttcaagcgcagcaacggtgtgccgcaacaagcatggccgcggtcactctcagtacatccgacgatcaaactgcatcaagtgctgccccaaggacaaggcgatccagagggttcagcgtgcaggaacatcgtgtcaacacgcgcggcatcagggacggcctaggagagatgcctgtatgatgcgtaccacctcccgaagctgtacgccaaggcgcaccactgcgtctcttgcgcgatccacactcacatcatccgcgtccgatcccgtgagaagcgaaggaaccgcaagacgacggagcgcttcaggcgcagggaggataggcctgctggtgtacaaggaggcccccgccctggtcctggtgctgctgctccagctccagctccagcacctgttgctgctcgcccataggctttagcttttcgaccgtgttaagtcttctgcccactcagcttacggattgtcgcctatgggtgtgtgaagctgctatattagagttactttttgtctaaagcctgaacattttcaaagaatttgaatatctgaatatttgaatatnnnnnnnnnnnnnnnnnnnnnnnnnnnnnnnnnnnnnnnnnnnnnnnnnnnnnnnnnnnnnnnnnnnnnnnnnnnnnnnnnnnnnnnnnnnnnnnnnnnnnnnnnnnnnnnnnnnnnnnnnnnnnnnnnnnnnnnnnnnnnnnnnnnnnnnnnnnnnnnnnnnnnnnnnnnnnnnnnnnnnnnnnnnnnnnnnnnnnnnnnnnnnnnnnnnnnnnnnnnnnnnnnnnnnnnnnnnnnnnnnnnnnnnnnnnnnnnnnnnnnnnnnnnnnnnnnnnnnnnnnnnnnnnnn

SEQ ID NO: 4329 - DNA, 612 bp, Zea mays
  misc_feature (534)..(534): n is a, c, g, or t
  misc_feature (583)..(583): n is a, c, g, or t
  misc_feature (598)..(598): n is a, c, g, or t
  misc_feature (606)..(606): n is a, c, g, or t
  Peptide Sequence Number=SeqID_10410
  Probeset Number=SeqID_18732
gctggagctccccgcggtggcggccgctctagaactagtggatcccccgggctgcaggcccccccccccccccccccattgttgcccatgagttctttgctgaggtagtcaaattgcatggtatccctcgctctatagtatctgatagagataggttgttcactagcacactttggcaagaattattcagtttgttgggcaccaagctaccactctcagtcggatggacaaactgagagggtcaaccaatgcctggaagtgtttttgaggtgtgctgtgcatgacaccccaaactatgtgtgaaatggttaccttcgtctgaactatggtataattcaagttaccacacatccttaaagtgttcaccattcaaagccttatatggggtggaaccttatatggggatgttgcctctactggatccgtaccataactcagaggcactggattcagcccgcgggacccgggatttcatttacatgcgcagcccgaagttttctttcgcctagacgtgtgtgactttttgggctgatngtttctgatttcgtgaaggttgcttcgtcctctgggtttacgcaaaccngttactttttacaanattatttntttttt

SEQ ID NO: 4330 - DNA, 447 bp, Zea mays
  Peptide Sequence Number=SeqID_10411
  Probeset Number=SeqID_18733
ttttctcttttttttaatgatccaatttttgttgtttttttttttagttggttggtttttttaatgggccacaactggtggctgtatcgagaagctaccgatgtaactttaacattggttcacgcccactatgatcacctgggacaacagagttaatacataaccccccctagcgagaaccgacaggaacgcgaagggattccaatttttcacagcaccacacgatttcctaacacctatggtggaacaaggcagcagatcacacataattaccgaaaggggcagcagcgaaagctcttactccgactagggaccctccgactttgttggcatgctgcggaccttcttgaacacaacctgaatcttggatagcatcatcggcgggggggagtcccctcccgcaccggtggtgttgcccaccccgaccgggggcctttgattttcctg

SEQ ID NO: 4331 - DNA, 867 bp, Zea mays
  misc_feature (1)..(266): n is a, c, g, or t
  misc_feature (867)..(867): n is a, c, g, or t
  Probeset Number=SeqID_18734
nnnnnnnnnnnnnnnnnnnnnnnnnnnnnnnnnnnnnnnnnnnnnnnnnnnnnnnnnnnnnnnnnnnnnnnnnnnnnnnnnnnnnnnnnnnnnnnnnnnnnnnnnnnnnnnnnnnnnnnnnnnnnnnnnnnnnnnnnnnnnnnnnnnnnnnnnnnnnnnnnnnnnnnnnnnnnnnnnnnnnnnnnnnnnnnnnnnnnnnnnnnnnnnnnnnnnnnnnnnnnnnnnnnnnnnnnnnnnnnnnnnnnnnnnnnnnnnnnnnnnnnnnngtttttggcggtgcaagttcatctttactgtattttggtcgatgatgagttggttgtcaggcggatacaattttgagtctgcggacgtaggacctctcaatagctccaaacggagctatagtgtgggaataataaatatatgaacagtaggttctttgagatctgaagctgtagatcaagattggattcagactgcttgtgccgaacaaacagtagtctgattataatccataattctgaggttccccaagaagaggcaccggctccagcaatgggtggcatgggtggaatggattactaagtcaagcacaccccacgatacaacaacattaaagcagagatttttctttggcggtgcaagttcatctttactgttctgtgttcgatgacgaggtggttatcaggaggatacaattttgaggctgcggacgtaggacctctcaatatctccaagcagttgggggataataaacatgagcagtagttatttgagatctgaagctgtagatcaagattggattctgacaccttgtgctgaaccaactgtagtctgattattacacattttttggctgagtaaaatcggattgccgttctgttn

SEQ ID NO: 4332 - DNA, 433 bp, Zea mays
  Peptide Sequence Number=SeqID_10412
  Probeset Number=SeqID_18735
atctgcgtataaagtgtactagccagtctctcgtcagcagaacgcaacaaggatcggagcatcagcatcgcgacctgtgaacttgcctgcctgccaagtgccaaggccagcaacacaaggcagcggtcctcggtcgatggaccgcgcgacggacatggacgagaagcacgcgccgtcgccgtcacctgtccagaggagcctttccgccgtcacctactgctgcggcgcgtgcgggtacgacctgcgcctgcggtcgtccgaccgcaacacggcggggatcgtgggtgccggcggcgcggcgtacgggcgcgcggcccggcgcggggtcgtggcgttcgacgccatcgacgacgcgcggttcgggcacgccgacgagttccgctgcgtcgacctgcgcgcgcgtcgcctcttcgtgcgcgcacccgcctgctct

SEQ ID NO: 4333 - DNA, 471 bp, Zea mays
  misc_feature (88)..(88): n is a, c, g, or t
  misc_feature (179)..(180): n is a, c, g, or t
  Peptide Sequence Number=SeqID_10413
  Probeset Number=SeqID_18736
gaagctgttggagctggcgaagaaactctaccaaaccaaactgcaccaaattctccggtccccgcctcagcgcctccgccatcgagancccacccgcccgtcccctcgcggctcgcgccagacggcccgaggcatggcgacgcggaaccgcacgccgctctactgcaataccgcgacgnnctgcggcacgtccgcgcaccggccggggcgacgtcgtcgtcctgcgggggcgggggagggggagggccggtgatcgagatggcctcgctgctgcgctccgaccggccctacgcgcccctcagcatcgaagacccctccgcctccagtagaggtgctgtgtcagtcgggctacccccaacctgggtggatgtttctgaagagatatctgcaaacatgcagagggcaaggacaaaaatgacggattggctaaggcacatgccaaagccttgatgccgtcctttggcgatggca

SEQ ID NO: 4334 - DNA, 366 bp, Zea mays
  misc_feature (90)..(90): n is a, c, g, or t
  misc_feature (292)..(292): n is a, c, g, or t
  misc_feature (312)..(312): n is a, c, g, or t
  Peptide Sequence Number=SeqID_10414
  Probeset Number=SeqID_18737
actccctgagcctaacctaaaaacagagagagagagcgaggagaaaatgaagacgatccttttcttccgagacgatggacatccccgagngcgtcagcatcaaggttcacgccaaggtgatcgaagtcgaaggaccccgcggcaagctcgttcgcgacttcaagcatctcaacctcgatttccagctcatcaaggacgccgagactgggaagaggaagctcaagatcgactcgtggttcggatctcgcaaatcaagtgcatccatcagaaccgctcttagccacgtcgattnacctcatcactggtgtcacnagaggtttcaggtacaagatgaggtttgtctatgctcattttcccatcaacgct

SEQ ID NO: 4335 - DNA, 915 bp, Zea mays
  misc_feature (1)..(27): n is a, c, g, or t
  misc_feature (628)..(915): n is a, c, g, or t
  Peptide Sequence Number=SeqID_10415
  Probeset Number=SeqID_18738
nnnnnnnnnnnnnnnnnnnnnnnnnnnttacaaaaccagttgattgaaggatttctcgaaaaagttgctttgtctgttgaattggtactgcccggtcggtaccgtcgtgactataaggttgattagcccatttaatagcgtgtttataaatgcggttgtagaatcaattatatggtgctactacacccgttgattgaaggatttctctgttgaattttcgtacttggcatgattagcaaatgtctacagtttgttccatgtttgtcatgtattttgacagtgcctaactttgtgttggtttatgaagctgtcctggcggacaatggcaggctgaaatatattgaacgcattgcggagagatttgttgatttgactatggaacataagggggagatgaaggttgtggtcaggacagttatttcactcaccaaggaggaggagaaagaactcaagggaaccttgcaggatatccttggggaaaacaaaactattttggttgaacaaaagattgactacagcatcatgggaggattagtgatttaatttgggcaaaaggtgctttatatttcaatcaggaacagggggaagcaaaaggaggggttttttaggcaaccacttgacttttaannnnnnnnnnnnnnnnnnnnnnnnnnnnnnnnnnnnnnnnnnnnnnnnnnnnnnnnnnnnnnnnnnnnnnnnnnnnnnnnnnnnnnnnnnnnnnnnnnnnnnnnnnnnnnnnnnnnnnnnnnnnnnnnnnnnnnnnnnnnnnnnnnnnnnnnnnnnnnnnnnnnnnnnnnnnnnnnnnnnnnnnnnnnnnnnnnnnnnnnnnnnnnnnnnnnnnnnnnnnnnnnnnnnnnnnnnnnnnnnnnnnnnnnnnnnnnnnnnnnnnnnnnnnnnnnnnnnnnnnnnnnnnnn

SEQ ID NO: 4336 - DNA, 219 bp, Zea mays
  Peptide Sequence Number=SeqID_10416
  Probeset Number=SeqID_18739
gacaatcagaaaatgtttaatacgaagctaattgctcttgatatgggtgcattgattgccggtgccaaatatcgtggagagtttgaggatagacccaaggctgttctcaaagaagttacagattctgatgggcagaccattcttttcattgatgagattcacaaagttgttggagcaggtaactatgaaggatgctctgatggtggaagtttggtaaac

SEQ ID NO: 4337 - DNA, 699 bp, Zea mays
  misc_feature (33)..(33): n is a, c, g, or t
  misc_feature (45)..(45): n is a, c, g, or t
  misc_feature (62)..(62): n is a, c, g, or t
  misc_feature (69)..(69): n is a, c, g, or t
  misc_feature (78)..(78): n is a, c, g, or t
  misc_feature (104)..(105): n is a, c, g, or t
  misc_feature (109)..(109): n is a, c, g, or t
  misc_feature (113)..(113): n is a, c, g, or t
  misc_feature (119)..(119): n is a, c, g, or t
  misc_feature (131)..(131): n is a, c, g, or t
  misc_feature (133)..(133): n is a, c, g, or t
  misc_feature (146)..(146): n is a, c, g, or t
  misc_feature (163)..(163): n is a, c, g, or t
  misc_feature (166)..(166): n is a, c, g, or t
  misc_feature (170)..(170): n is a, c, g, or t
  misc_feature (174)..(174): n is a, c, g, or t
  misc_feature (180)..(180): n is a, c, g, or t
  misc_feature (204)..(204): n is a, c, g, or t
  misc_feature (244)..(245): n is a, c, g, or t
  misc_feature (401)..(401): n is a, c, g, or t
  misc_feature (699)..(699): n is a, c, g, or t
  Peptide Sequence Number=SeqID_10417
  Probeset Number=SeqID_18740
cggtttttggcaccagcggcagtaggggagttntttgggctgggngaaccccttttaaccantcaaaanaacgtcaanccgcatggggaagttttatcccggcnnttgntccnataganccagaaccattntncggttgggttggntcggagggaacatcatnatngaancggngaaaangatctgggctttctcaatctatcncggtctatcgctctcaagcagaatccaatgcggtattctnncggtaaattgatctccactggccagaaaacctctgctgttcagaaggttatcagtgccagagacgatcgagtgggagtgaggggctctggcgctaagtgtggcatgggcggcaatacggagaagcgggagattgtgggcaaaactggcaatttccntgacctacccagcggcgcggctcacgggtactcttcatgatgtgcggcgaatcggccgttcggatggcttcgctggtaacaagagctggaatgccgacgcattcctggtgatgttcgtagactgttagccgaggttagagatgcacagcgattggcgaaagcagtttccggcgatgctcgtgtttgcaacttgtgccgctctcgcggtatgcaattttgccttggccgccgatcgaaccggtacaccacacaccctgaccgatcggcttagtgcgctcgagggggggcccggaccaan

SEQ ID NO: 4338 - DNA, 1104 bp, Zea mays
  misc_feature (1)..(100): n is a, c, g, or t
  misc_feature (1041)..(1104): n is a, c, g, or t
  Probeset Number=SeqID_18741
nnnnnnnnnnnnnnnnnnnnnnnnnnnnnnnnnnnnnnnnnnnnnnnnnnnnnnnnnnnnnnnnnnnnnnnnnnnnnnnnnnnnnnnnnnnnnnnnnnnngctcgtttgtgcttctgatcttgttgccacccgaggccgaggagctgcttgttgttgtggcttctgaacttgagttggtttctgagcattcgaataagcatctgcagaacatcacagaaaaaaaaaaaaagaaactactaactattaaggggtactgtagactgcccccgctcccaccctcacgcccgcctgccagccgcagcgcacgctccatgaaccccgccgccccgcaaactccgccactaccgcacgcctgcatcctgcacggctcgccgaagaacgcggagccgcttgccgctgttgctgaacgcgagggccagcgccatctgcacgtccacgccgccggcgttggctgcgggcgccgtctgcttgcctcctcgtcctccttgtaacggcatgatggcgtgcgactcggcgacggccggcgcgtcatggcggcgcggcgtcctggtctagcaatggagctgctgctgccttgccggtgctggaagtgcagagcaaacctgaagatattgcagtctctggaagaatctgtcaccgatcccgatgtgaagtacggctatgtcccgaagttgactcctgctattggcaagacgtacaacttcactgtagaggagcttgtgaagtgggaccagctgagcctgtcagctgccatgggaccagctgcagaagaactgcttgcttcagggctaaaggcggcccgggaccaagccccccccgttttgtgtgccctttgggaagatctggcccccccccaatgtttaacaacggcgttgagagcaatagcaatgtgatttgcctggcaggctcacaatgctgcgcggaagacgctttgcttcttctttttggataatacacgaagcactcccgtgtttacgttgacttgacttgcagtgtgcatttattctgtttttttttttgtaattcaaatgatttgctgnnnnnnnnnnnnnnnnnnnnnnnnnnnnnnnnnnnnnnnnnnnnnnnnnnnnnnnnnnnnnnnn

SEQ ID NO: 4339 - DNA, 705 bp, Zea mays
  misc_feature (601)..(705): n is a, c, g, or t
  Peptide Sequence Number=SeqID_10418
  Probeset Number=SeqID_18742
ccccgaccctggccccgacatcctgggcgaaaataacctctttacattgcattataatcctctctctcgtctcatcaatctcgtcgcgatggaaaccaccggaaaagtgaagaaggccttcggaggaaggaaagccggcggcccaaaaaccaaatcggtttcgaaatcgatcaaggccggtctccaattccccgtgggaagaatcactcgtttcctgaggaagggacggtacgcgcagagactcggtggtggagctccggtttacatggccgccgtcctcgagtacctcgccgccgaagttttggagcttgctggtaacgcggcgagagacaacaagaagtcgaggatcatcccgaggcatcttctcttggcgataaggaacgatgaggagctggggaagcttctgagtggagtcacgatcgctcacggtggagtcttgcctaacatcaactctgtgcttttgcctaagaagtctgctaagtcgaccgaggatgttgtgtccaagtcaccagccaagtctcccaagaaagcttaattgatactttcgtttgtatgcgttttgttgagtttcgtgaatgcatatgtagaaatttctagtttnnnnnnnnnnnnnnnnnnnnnnnnnnnnnnnnnnnnnnnnnnnnnnnnnnnnnnnnnnnnnnnnnnnnnnnnnnnnnnnnnnnnnnnnnnnnnnnnnnnnnnnnn

SEQ ID NO: 4340 - DNA, 604 bp, Zea mays
  Peptide Sequence Number=SeqID_10419
  Probeset Number=SeqID_18743
ccaccttgccggaacctggaaggaggcaccgtcgacaatccgcacgcgccaggccacaacaaccatgtccggcctcctccggtggcgtcccctagtcagcgtcgccatgcccgccgccttcacccttacgtgaatcgagcgcttcccattggtgatgaacccagattgtcccggccagggcacgctgcttcagatccagaacctatatgagagaagtcactcacgatcgcacatttaagggtccaaggagtgcaccaggtgaacagatgaataaatggagttgcttagatcatctaaagcccccctcgcctgatgatgcactgagaagtatttcctgaaaggctacggcagacaatactgcggcacgggggttgagagctagccttgacactatgctcatcggtactgcgtaagagattacttctgcaaacactggggagtagcgaatcgatgcagtggttgttggtggaggcgcagtaggatcagtggaccaacctggctgcggagctaagagtctctacggtgatggtgctttgcaccgttatctatcccagataaaggtgtcaggagacggagtggggagcgaaatggatggggaagctga

SEQ ID NO: 4341 - DNA, 469 bp, Zea mays
  Peptide Sequence Number=SeqID_10420
  Probeset Number=SeqID_18744
aaaaccctaatccctctttctcctcctcgtcgctttttttttctctgagcttgaaagacgaagatgacggtggaagcagtgaaccctaaggcgtatccgttagctgattctcagttagcgataacgatcttggatcttgttcaacaggctacgaactacaagcagctcaagaagggagctaatgaagctaccaagacgttgaaccgtgggatctctgagttcgtcgtgatggctgctgatgctgagccgcttgagattcttctccaccttcctctccttgccgaagacaagaatgtgccgtatgtgtttgtaccgtcgaaacaagcgttgggaagagcatgtggagtgacaagacctgtgatcgcttgttcagttacatcgaacgaggcaagccagttgaagtcgcagattcaacagctcaaggatgctattgagaaactcttaatctaagggattggtgtgtcggtgt

SEQ ID NO: 4342 - DNA, 437 bp, Zea mays
  Peptide Sequence Number=SeqID_10421
  Probeset Number=SeqID_18745
gtcgtcgaggaggataaagacctaaaaggagataaaaggagaaatggttcagcgtcttgtataccgttcgcgtcacagctacgccaccaagtccaaccagcacaggatcgtcaaaaccccaggtggtaaattgacataccagaccactaagaagcgtgcaagtggacccaaatgccccgttaccggcaagcgtatccagggtatccctcacttgaggcctgctgagtacaagaggtctcgattatccagaaacaggaggaccgtgaaccgtgcttatggtggtgttttgtctgctttggctgttagggagagaatcgtccgtgctttccttgtggaagagcaaaagattgtgaagaaggtcttgaagctccaaaaggccaaggaaaaggttgctcccaagagctagagatccttttttctccttttcttaaaaaaaa

SEQ ID NO: 4343 - DNA, 1088 bp, Zea mays
  misc_feature (1)..(99): n is a, c, g, or t
  misc_feature (1088)..(1088): n is a, c, g, or t
  Peptide Sequence Number=SeqID_10422
  Probeset Number=SeqID_18746
nnnnnnnnnnnnnnnnnnnnnnnnnnnnnnnnnnnnnnnnnnnnnnnnnnnnnnnnnnnnnnnnnnnnnnnnnnnnnnnnnnnnnnnnnnnnnnnnnnntccctccaaagccccccctccccctttctcctctttccctcccaagcaaatcctctgctctccccccgcctcctcctccttcctctgccgcttgccgtgtttggttcggcaccgaaatggcattccacgacgaggcgccgctgctgctcaggatcaacaccgccagaggcggccacatgggcggaggcgagtgcgacgaggcggagaaccagcggtggccgccgtggctcaagccgctgctggcgaccagcttcttcgggcaatgcaagatgcacgccgacgcccacaagtgcgagtgcaacatgtactgcctcgactgcgtcaacggcgcgctctgctcccagtgcctcgcctaccaccacggccaccacgccatccagataaggaggtcctcgtaccacgacgtgatccgcgtgtcggagatccagaaggtgctggacatcaccggcgtgcagacctacatcatcaacagcgcgcgcgtggtgttcctcaacgagcgcccgcagcccaggcccggcaagggcgtcaccaacacctgcgacgtctgcgagcgcagcctcctcgacaccttccgcttctgctccctcggatgcaagatcgtaggcacctccggcgagttccgcggccggaagaggcacgccggcggcaagaagatgaagctgaagctgaagaaggcggcggcgtcggactcggacgactcgtccaccatcaccagcggcgggagcgacaagagcagcgtggtgcagagcttcaccccgtcgaccccgccggcgacgaccgccaacagcttccgcgccgggcaacggcgcaaggccgtgccgcaccggtcgccgttcggcagcctcgtggtggagttctaggcaaaaaggcgcgccgcccggtcccgatggacgctcaccgaaaaaacacacacacacagcggtacaccactgtagcatacgcacttcttctacataccattaccatctataggtgctgccggatcgacn

SEQ ID NO: 4344 - DNA, 2518 bp, Zea mays
  Peptide Sequence Number=SeqID_10423
  Probeset Number=SeqID_18747
tctccctccccccgccccgccttcactccgtgtctcatactgcctactcctacctcgaatggggtaccgggccccccctcgagggccgatatctgtctacatttttttttactcgtggcaagaatcactggcgcggacgaacatatctgatagatgacagagtctgtagacctcgccgactttgaccaactcggcaacggtccgcagaccagcggtgggaggtgcatgtgcattgcagctcgcgttggcgcaggatctcctgatacagaatctatgtccacaaattgcctcgccactcatgcagccggacttagcagagtcgagggcttctcggtgcatttcagctcagatagcgtggatcaccatggctccaagactcgtgctgaagtcccaagtctcggcaagctgcatggctactctaggttgccgttggtatgcgcgaacagcgaacagcgccctcgcatcaaatcacgaaatatcctccggagttgtcgagatcatcgatcgttccaacggttattgagggaaccagaccagggtatcgggaaagctacacctgattcagcggctgccgcagcaccgttttgtgttggctttctcctcagagagttcatgtttggccgatggggccctcgtgtcatgtatagtggaacaaggtcggcgaatcgatacacgtacgtgcgggtcttttgggatcagttatcaaatcagacgaacctgggtctccatcgttgccagaggaagccaaggcaaggaagactaagtggattaagatagattcaccacccctgctatgtatgtacctgctcctccagtaatcatggcgcccccaaaccaggattatttaccagccagtcctcaagaggatacatgcgcacacataaggtaggcgctgatctttgtaccagtattgggccatttggttcaagatacctttgccttggcaacttcaaggtataatatacacttgacatatgatggtcgcgttgttcttctcggcctatgctcatgcgtctccgtgatatgggatttgctcgtttgcgactgtcaagggaatgcacgtgtacgtggtcctgcaggcgactgttggctgttctgcgggtcaacggccagggccgtgggccgctggcgactaagaaaggactaattacgcggggtctcaacacggatagagctaacagacgagcggcttcatttatgggaccgctggctggccaagctccggcctcaattgcatctccagcgacctgcgtgccgacgaatacacccatttcaagcagattcttgtttgctcaacacctggccgactaatgccttggcgctagggcgctcccggaccagtttctacttatgaacaatcatatgcgggatatgttgtctgtgctccaaggttgtgcgttaacctaaccgccgctaatatagtcgtccgcagactaagcccatgaggggctcaggcgtatggagtagcatgggccagcccgggttgatgtcgtatgttgtccccatggaggagccagggttgttacatgctcctgctttatcctgatgaatcttccgtctcaagcgcaactctcttaagtaaatcaaacgtcagattcggagccaacgctcgtcattaggacctgatacaactaccgatgatttgagagcgaatgcaaccgcacattgactttctgtatccctgcaaagcgtgggtcgcgaacaggggtccttgcaggacgagcccggaagaccctccccgtctggactcctgaatcctttgcgaacgctggttcgtcccttactgccggggtctgcttgacagccaatcgccagcctttcccggggtgcaggcattcttggctgcagtgtcaagtgagttggggggggggggggggggcctccccccccgccgttccccaatttctaaaaccccccccccccccgcgccccccccctcttgcccccctttccggcgcgcccacccccgaccctccccaacaacattcaccgctccccccccccgccgctcccctcccctccccctcccaacaccaacatccaccccccccgacaaccgccccccccccccccccccgcccccccacccagctgctcttcttcccttgtctgccccgttcctctctcggccccgtaccactgtccccaacacctcgcctaccgcattcgtccaccccactcttccgcgccgggatcggtaagtgtctctctctcccgcctcccctcctccctctcctccccaccgctgccccctgccccccgcccgggcctgcggtcccacccgcccccacctccgcaaacggggccatcccccgcagcccccgaacacacgcaccaaagaagacaacgcccccaaagggccccgagtacgccccgaccgccgcacggcgcccggccggccgggcccgctttccctcctcgcccccccccccccgcaccgcactccacccccctcccgctctcatctctgcgcgggcacatagaagatccactacaagaaatgtgtatggtagagtag

SEQ ID NO: 4345 - DNA, 310 bp, Zea mays
  Probeset Number=SeqID_18748
acccacgcgtccgcccacgcgtccgcgaagccattccctcttcaagaggggatcatcagatggcgcttattattccttattactccaggcacggatcgggagttgctctgaattgactggaccatggccgcctaccatggccgtgaccaccatggtgaccaggagccagggacagctcgccgtcattgcaggccccgccggcggctttcctttggaagccacgagggtggcaagaccgtgggcctgtagctacctctgccgtcgatgttcgtcagagttagtctttacgagcgcccgttcgtcacagtct

SEQ ID NO: 4346 - DNA, 673 bp, Zea mays
  misc_feature (620)..(623): n is a, c, g, or t
  misc_feature (625)..(626): n is a, c, g, or t
  misc_feature (632)..(636): n is a, c, g, or t
  misc_feature (638)..(638): n is a, c, g, or t
  misc_feature (642)..(644): n is a, c, g, or t
  misc_feature (646)..(646): n is a, c, g, or t
  misc_feature (652)..(652): n is a, c, g, or t
  misc_feature (659)..(659): n is a, c, g, or t
  misc_feature (670)..(670): n is a, c, g, or t
  Peptide Sequence Number=SeqID_10424
  Probeset Number=SeqID_18749
aagctggagctccccgcggtggcggccgctctagaactagtggatcccccgggctgcagggagagagagagctcactagtcccccccccccccccccgggttcgggtctgggtctgggtcaatttcagctgcttttttcagccctaagtatgaccctaactatggccctaatatcagcccctaatctatactttaggctggaagttagggttatgttagggtcaaagttaggtttagggtagcgtaaagttaaatatatttattcaagacgttttcccttggattatagtaaaaagggttagggttaaataataatcagctaattgtaagctattttataagaatatatacttatctaaaaaaaattactttaacagaaattgaatcctagacttttaaaaaccttagcgttaaaaaagatataatataatactattatgctatagtatatctttactgatcttaggaaccttaagggtgtttattttaatctataatgcctctaatatagctatttttcccttttaaaaagcaaaggcctctcgttgaactgaaccctaaccttaagagttaagctataaaggcaatattaatatcctataatactgtgtcggcgacgnnnnannataccnnnnntnatgnnntngcgcantaaaaanattgattatgnttc

SEQ ID NO: 4347 - DNA, 498 bp, Zea mays
  Probeset Number=SeqID_18750
cctcgagccggcactacacagatcgttcttcacggctttggttaggcagcaaatccgaatccagtttaaataaggagacaggctgtgtagcgtagtctagtgctaccaggatcggatcagcggctgctgcgcttcagttgccgccggcggcatgagggtggtggtgacgggcgcgacggggtacctgggaggccgcctgtgcgcggcgctggccggcgcgggccacgccgtgcgcgcgctcgtccgccactccagcgacgtctccggcttgccccgcgacatcgagatgacctacggcgacgtcaccgacgccgagtccctcgccgtggccttcgacggctgcgacgtcgtgttccacgtcgccgcggccgttgagccgtggttgcccaacccctccgttttcttcaaagttaatgtaggcggacttgagaatgtgttgaaggttgtcaagagaacaccaactgtgaagaagataatctacacatcttctttctttgc

SEQ ID NO: 4348 - DNA, 376 bp, Zea mays
  Peptide Sequence Number=SeqID_10425
  Probeset Number=SeqID_18751
attcgtgggcagcgcccctcatcacacagaagactttattattgagctatccctcatttgaactcttaaggaggcaccaccaatgatcgggtggctggttgaccgctgcaggcttggtcatagcacgttggttggatggctgccattgttgcccttgggagacggtgcccggcgctaggcgcagcgggccggcagctccgccacctctggggttgtatcacgaggggcctacggttcacaccagctggctgtttcattggacctagttgctgctgctgtctctgctcctgtttggccactgctgccacttcgtttcatggaaggaactgctgggggcccgccagcagtttctggcttgaaggcacttggcggtttt

SEQ ID NO: 4349 - DNA, 409 bp, Zea mays
  Probeset Number=SeqID_18752
taccgaaatcgtgctctgaaattggtgcgaggggcacaaccagcgctggaagatccccccttggtgaacgaacgaaagaaactcctagcggggcccctaataaaaattttgcggggtggggcgatccccaaataaaaaaggcagggtgcgatgcatcggggttttttcgcctctcgagtggggtttgggttaaacacccagcccctgtgtggctagtgttccaacatttgtcaccccgcttgcgcaaggaagtgggggtgcctgccccaaaaaaagggcctggtcataggctgctgcattatgaatttctgatcatgtcttatgtctggcctttgacccccccatggatggggtctcattccctttctccccctgaatgaatgaacccttattggcctgctttgcttcc

SEQ ID NO: 4350 - DNA, 413 bp, Zea mays
  Peptide Sequence Number=SeqID_10426
  Probeset Number=SeqID_18753
agaatagcagaaagggagagagagcgatcgtcgtggacgaattgtgtgtacacctacgacggatcctcagggatcattttagatgttcgccaaagcatcccacacatatgcatggccttcccgcgtggagatgtcaactggagcacgatgaattcgtcgccgaaggccgcactacgccgcggggccacgccacgtcgtcatcaagagtctgtggcataaaccacggtcaagaacaggtaccaccgaaggagaatgatgaagatgagttcaaagaggtctaggtcatcgtctcacagtcaactatgattgcagaggatcattgtcatcatatggtttaatttatttagttattttgtacagaactcctatatataataaagatgtgacattgatttccaaaaaaaaaaaaaaaa

SEQ ID NO: 4351 - DNA, 694 bp, Zea mays
  misc_feature (116)..(116): n is a, c, g, or t
  misc_feature (135)..(136): n is a, c, g, or t
  misc_feature (141)..(141): n is a, c, g, or t
  misc_feature (153)..(153): n is a, c, g, or t
  misc_feature (165)..(165): n is a, c, g, or t
  misc_feature (168)..(168): n is a, c, g, or t
  misc_feature (172)..(172): n is a, c, g, or t
  misc_feature (177)..(178): n is a, c, g, or t
  misc_feature (193)..(193): n is a, c, g, or t
  misc_feature (211)..(211): n is a, c, g, or t
  misc_feature (213)..(213): n is a, c, g, or t
  misc_feature (215)..(215): n is a, c, g, or t
  misc_feature (267)..(267): n is a, c, g, or t
  misc_feature (280)..(280): n is a, c, g, or t
  misc_feature (287)..(287): n is a, c, g, or t
  misc_feature (293)..(293): n is a, c, g, or t
  misc_feature (313)..(313): n is a, c, g, or t
  misc_feature (324)..(324): n is a, c, g, or t
  misc_feature (359)..(359): n is a, c, g, or t
  misc_feature (371)..(371): n is a, c, g, or t
  misc_feature (376)..(376): n is a, c, g, or t
  misc_feature (379)..(379): n is a, c, g, or t
  misc_feature (381)..(381): n is a, c, g, or t
  misc_feature (384)..(384): n is a, c, g, or t
  misc_feature (390)..(390): n is a, c, g, or t
  misc_feature (398)..(398): n is a, c, g, or t
  misc_feature (400)..(400): n is a, c, g, or t
  misc_feature (405)..(405): n is a, c, g, or t
  misc_feature (408)..(408): n is a, c, g, or t
  misc_feature (419)..(419): n is a, c, g, or t
  misc_feature (426)..(427): n is a, c, g, or t
  misc_feature (432)..(432): n is a, c, g, or t
  misc_feature (456)..(456): n is a, c, g, or t
  misc_feature (468)..(468): n is a, c, g, or t
  misc_feature (480)..(480): n is a, c, g, or t
  misc_feature (512)..(512): n is a, c, g, or t
  misc_feature (543)..(543): n is a, c, g, or t
  misc_feature (546)..(546): n is a, c, g, or t
  misc_feature (555)..(555): n is a, c, g, or t
  misc_feature (568)..(568): n is a, c, g, or t
  misc_feature (571)..(571): n is a, c, g, or t
  misc_feature (581)..(582): n is a, c, g, or t
  misc_feature (588)..(588): n is a, c, g, or t
  misc_feature (610)..(610): n is a, c, g, or t
  misc_feature (617)..(618): n is a, c, g, or t
  misc_feature (625)..(625): n is a, c, g, or t
  misc_feature (639)..(640): n is a, c, g, or t
  misc_feature (656)..(656): n is a, c, g, or t
  misc_feature (660)..(660): n is a, c, g, or t
  misc_feature (670)..(670): n is a, c, g, or t
  misc_feature (674)..(674): n is a, c, g, or t
  misc_feature (687)..(687): n is a, c, g, or t
  misc_feature (689)..(690): n is a, c, g, or t
  Probeset Number=SeqID_18754
gctggagctccccgcggtggcggccgctctagaactagtggatcccccgggctgcaggaattcggcacgagctcactagtcccccccccccccccccccccccagatgttgtgggngctttgttcgtcggttttnnactgngaccatcttatntgttgttgctgnccntganaaaanngacgcaaacaacagntccagggtggttcacagnangnatccgaggttggtcctccctagatttactaaaaaccgaaaccatttaatggnggggagaaatggngagttanacaaanaaactcctttgtaaaaagangtttgcccacngggagtccgtaatccattcaattcaagggggggcntgctttcccacncctgngancnagnttgggnatcttggngntgggnaanaaggatttccncctgccnntccantttttcttccttggggttaccacncattattacaanaactaaggcccncctcctggaaaccttctttcttattcctattncccgcctattgatgggggaatccccggtatnggnagggaacangggcctccggccnggnaatggaactnngaaatngagccttttattgggaggaagntcccccnngcttaanggggtttttgggcnntggaggggcccaaaanaggngaaatttttntatngggaaacctattngnncctt

SEQ ID NO: 4352 - DNA, 364 bp, Zea mays
  Peptide Sequence Number=SeqID_10427
  Probeset Number=SeqID_18755
atataccttttctcggccatttcgttgggataaaatgtaatatttatttttatcagtttaatatctagtatgcagaatatatgttaactttgatatcaaatttgtttttatgggtattttcttgtggggaggatccaccacattggtttaccgagccttcacatgtcgtgccgtccttcactgattgtgtgttgttgcttgtgctattatattcatatcaaagtatttgtggtttcaccctacgtttttttttgagtaagttctggtaggtgctctaccgtttcattgttagggagtttgtagatacatcccctggagagtggagacatagttaaacgaagttaaaacaaaaaaaaaaaaaaaa

SEQ ID NO: 4353 - DNA, 554 bp, Zea mays
  Probeset Number=SeqID_18756
cgtccaccctgcacccctcgcgagttctccacttcgccatcgcccatggtgccctggtcatctgttcaacgtctaaggtggcccggcccctcccccccgcccccgccccgccgccccaagctggtgctgggcgccgcacgccgaccccgcacctcgtctggatccggcggcaacgggtgcgaagaaaataaaaccatttgggtcggtgacctccactactggatggatgaaaactacctacataactgcttcgggcccagcggcggcgtggtttcaataaaagttatccgcaataggcatacacgacagtcagaggcgtatggatttggtgagttcgtttctcatgcatctgcagagaacagctcttcagatattttaactggtcatgtgatgccaaacactgaccggccttttaaattgaactgggcattgtttagcgtgggtgaaatgcgttctgctgtggcttctgatgcctcggtttttgttggcgttcttgctgctgctgtttttgttgttgtgcttttgtttctgttccttctgttgtttcttttggg

SEQ ID NO: 4354 - DNA, 483 bp, Zea mays
  Peptide Sequence Number=SeqID_10428
  Probeset Number=SeqID_18757
atttagatttagttcaactttgttgcttcgtctctagcaggagagttttgtgcggctgccacttcgatttcaagtgtttgagctttgaaagatggtgagaatcagtgtgcttaacgatgctctgaagagtatgttcaatgcggagaagagaggcaagaggcaggtcatgatcaggccttcgtctaaggtcatcatcaagtttctcattgtcatgcagaaacacggttacattggcgagttcgagtacgttgatgaccacaggtctggtaagattgtcgttgagctcaatggaagactgaacaaatgtggtgtcatcagtccccgtttcgatgtcggagttaaggagatcgaaggttggaccgctcgtcttcttccttccagacagtttggctacattgttctcacaacctctgccggtatcatggaccacgaagaggccaggaggaagaatgttggtggaaaggtccttggattcttttactg

SEQ ID NO: 4355 - DNA, 820 bp, Zea mays
  misc_feature (802)..(802): n is a, c, g, or t
  misc_feature (806)..(806): n is a, c, g, or t
  Peptide Sequence Number=SeqID_10429
  Probeset Number=SeqID_18758
gtctgacttcgtttcggacctccccagtttttcccctccggccgccgcacggagaagcagaagccatgcaggccgccgccgcgcgcgcccgccgcctcctcgccttaccggcggcctcggggatccccggaatactctccgggccgatcccagggcgcgcatcatacgccgagggcgttctcctttaccatctcaatggcgctcccgcttcgccgtcttctccgcagcataccaggggcttctcctcctcctgcttcgcctcccgatcacactgtaacctcccatcgcctaccatatcttttcaatgggtgaatgagaaatcagacactatatatgacgaagcacacttttatcacaggcaggtgacgatcgtcaccaccctacagaatggtgagaggagatccaccagaaagtgataaaatctgatgaagctgaccaccattcctacaaatgcctggttgtggacaatgattgatagctgctccaagagggacgacatcaaacttctttttcaaattgagctcgcgatctagaacctcagagtatttagcctatcaaatcttcgcatcagagcaaacttcaatgagcatctctgcagaaaagtacctgaggcttgtgctcgtgtaggtgccgtcgactatgggtagaaggctttatggacacataatgttaatgggaaaaccccaacggatggggtctgctcattaactactgcgacatgctacagagcagagccactcgttggtgttattccataaacattatgtttcctcagccgattccgagcttcgacgcggcatgntcantgatcatgaggcgg

SEQ ID NO: 4356 - DNA, 631 bp, Zea mays
  misc_feature (1)..(30): n is a, c, g, or t
  misc_feature (631)..(631): n is a, c, g, or t
  Peptide Sequence Number=SeqID_10430
  Probeset Number=SeqID_18759
nnnnnnnnnnnnnnnnnnnnnnnnnnnnnncccccccccccccccgggcttcgacgtagtggtgacctggcagaacctgacacgtccaacggtcctaatgaagatgtggataacagctgttagatacatcgcgatttggttcgctgcacctctcggtcaataggtgatggtgaaaacaagactacaaaagattgcacagacggtaagtttggtgatttttaaggcgaagaagttgtttatacaaacttagatacccgcctgtgccacgacactggtgaaggtggtgctcgtgctggcctggtcgtccggaatgcatacccccgcgccgccagcggtgcaagtggtggggataacatgtgttgctcatcttgaggcgagggtaggtctcagcctttttcaggcgtcgctcttgctgccaccactcctcctgatcgcacgggctgagctgttggtaatctctgaggaagtacagaaagtcaaaaatgaggagaaacttggtccgtgtacacaccccgaagtaacaattgtggatctggatggtgattgtcctaaagatttgaatgatgttattctacaaaatgatgactttgcagacccagaagaatcaaacatgcctaatgtatttgaggtn

SEQ ID NO: 4357 - DNA, 843 bp, Zea mays
  misc_feature (806)..(806): n is a, c, g, or t
  Peptide Sequence Number=SeqID_10431
  Probeset Number=SeqID_18760
accgtaatccacttccacacccacaaacaattccacgctccatctgtgcaagcaaagatggcacgagtgctgctcctcgtcgtcctggccgcctcgctcgctgcgctggcgtcgtccaaaggtcttccggtgctcgctccggtcaccaaggacaccgccacctccctctacacaatccccttccacgacggcgccaacctcgtcctcgacatcgccggcccgctcgtctggtccacgtgcgacggcggccagccgcctgcggagatctcgtgcagcagccccacctgcctcctcgccaacgcctaccccgccccgggctgccccgcgcccagctgcggcagcgacaggcaccacaagccctgcacggcgtacccatacaacccggtcaccggcgcgtgcgccgccgggagcctcttccacaccaggttcgaagccaacaccaccgatgggaataaaccggtgagcgaggtgaacgtccgggtcctggcggcctgcgcgccgagcaagctcttggcgtcgctgccccggggctccacgggcgtggccgggctcgcgggctccggcctagcgctgccggcgcaggtggcgtccgcgcagaaggtcgccaacaggttcctcctctgcctccccaccggcggacttggcgtggccatcttcggcggcggcccgctcccgtggccgcaattcacacagtccatggactacaccccgctcgtcgccaagggaggtagccccgcgcactacatctccctcaagtccatcaaagtggagaacacccgcgtcccgctatcggagcgggcgctcgncaccgggcggcgtgatgctcagcacgaggctgcccta

SEQ ID NO: 4358 - DNA, 927 bp, Zea mays
  Peptide Sequence Number=SeqID_10432
  Probeset Number=SeqID_18761
ttacaaccaaatcatactgaatgcaagaccgcaaggtgtcaacaacaatggccctccaaaactaagcatgttcggagtaacataccttcgtctatcagatgatctactgcaaaaatcaaattttaatatattcaaaaaatttgtgctaaagatgcatgcagatcaggattactgtgcaaaccctcaaaagtataatcacgccataacaccattgaagccatctgcaccaaagattcccattgaggttcttctggaagcaactaaaccaacactgccattcccctggcttccagagacagacatgaaagttgatggttgatttcccaatttggtgccatgagtaattaaataatctgctggaaataatatctaccaatataaataaagcatccagccactgtaatctgcaatgctgataataatgccatgaagtagcactgcctaaacatctacaaagtactctcgtgtactttttatgtgtgtattcctatcacgaagttaataaactattttatcaaaaaaaaaaaaaaaaaaaaaaaaaaaaaaaaaaaaaaaaaaaaaaaaaaaaaaaaaatttttaaaaaaaaataaaaaaaaaaaaaaacgggggcccccccccactaaggactaaccaaaccggaaaaaaaacccaaacaatatctcaacgacgcccaacgtttcccttacagcaagatacctcacccttcgaacaccaaacggaaaaatatctttcatcacaaaataattcatccacccccaccccaaaaaaaattcaacccaaccgcaaccgttgtaaacctgggtccccacccatgaccaaccaccaccccctcattactggcccaaaattccccacctccataccaaataactccgttcccatattccactataaatcccttccaccccatccaaccccatttaact

SEQ ID NO: 4359 - DNA, 812 bp, Zea mays
  misc_feature (1)..(1): n is a, c, g, or t
  Peptide Sequence Number=SeqID_10433
  Probeset Number=SeqID_18762
naaggctgctggcgatgggcacaccggacagtccggtgcgccatcggatagtgtctggtgcgccgccatgtcaccctgtcgttagggtctggagctggtcgaccgttggaggctttgtcctcatgcggcagcagacagtccgggcccacaccggacagtccggtgccacaccggatagtccggtgccacaccggacagtccggtgcccctctgaccttctgctctgacttctgccgcgttactgtggtgcactgttcatccatcagagttgaccattgcgcgcagatagccattgctccactggtgcaccagacagtccggtgaattaaagcggagctgtgcctgggaaacccgaacttaagcacacactacacgggaatgtgtacaaccccatgggaaagcggacacgagaggtgctcacgagtgaataagagcggatgacacggtgatttgttttaccgaggttcggttcttgcaaacctactccccgttgaggtggtcacaaagaccgggtctctttcaaccctttccctctctcaaacagtcacttagaccgagtgagcttttctcttcaataaaatgggacactaagtccactacaaggaccaccacaacttggtgtctcttgttttgattacaagtgagttgaacacaagaaagaaggaagaagaaaagcaatccaagcgcaagagctcaaatgaacacaaatgtctctctctctagtcactaatttggttggagtgattccggacttgggagaggatttgatctctttgattgtgtctttgaatgaagtctagagtcgacctgca

SEQ ID NO: 4360 - DNA, 716 bp, Zea mays
  misc_feature (1)..(109): n is a, c, g, or t
  misc_feature (687)..(687): n is a, c, g, or t
  misc_feature (699)..(699): n is a, c, g, or t
  Probeset Number=SeqID_18763
nnnnnnnnnnnnnnnnnnnnnnnnnnnnnnnnnnnnnnnnnnnnnnnnnnnnnnnnnnnnnnnnnnnnnnnnnnnnnnnnnnnnnnnnnnnnnnnnnnnnnnnnnnnnngtccctgctcacgtctccctcgtttggttcacccttcactgctcacgccaacgccggtagatccatgcccacgtcgcagccaatagatcccatgtccctactattgtctcctatccctggccctactttctctgtctagggtcagttcgtcgcggtcgtcgtgcagacccgccgcaaaaccagtcgttgaggtcagccagcgaacagattcgtccaagatccgtgcgatgtgccttactccaaccttcccttttccattcgatggcaaacaagggagatgcccttttgtgatttcttctctcagggggttgtcttttatgtaaacaacaaaaatgccaaagaactacccctctttcgtctttagtttgcccgcaaatcatcctcaacgggaaaggtcgtggaaaatcctaacctcaactctttaggatgacacatttccctcccttggttcctactcggggattactccaacccgaagctgggttacataagaaggggctccccctttgcccccagtaggtagatctcggcatgcctcctttcatctacctagattgaccactggcacaggctggtcnccccccttgtcnctcccagtgttaaatag

SEQ ID NO: 4361 - DNA, 709 bp, Zea mays
  misc_feature (1)..(67): n is a, c, g, or t
  misc_feature (668)..(709): n is a, c, g, or t
  Peptide Sequence Number=SeqID_10434
  Probeset Number=SeqID_18764
nnnnnnnnnnnnnnnnnnnnnnnnnnnnnnnnnnnnnnnnnnnnnnnnnnnnnnnnnnnnnnnnnnntcttaccttgagtgttttctcagatgaaagaaaatggtctattcttttatttcttagttgaatctggtttcctgggttttgagtctctgctatcctgtctctgtttaatattcagttctggtgtacgtgatacattttctttgaaacagggcgaaacttttgttccagagagcattgtcaggtttggaaagagaacagaaggcagagatggagttgtaacaataatggcggaagatgaacggatcaagtatcaaggtcttcatcatggatccagctacttggagcacctcaatttcttgtctgctataagggctcaaggtgcatccggaccatctgtgaacttaagtgacggcctactatctgttgccgtcggtgtggctgggcaattatcaatcgagcagggccggtttgtaaccatggaagaggtcttaggtttgtagcctggtgataatccaggcatcctaatgtactgtaaaaccttttgtgtattattaggtacatggacttaagagtgctgcggactgacgagtttatgcaaagttaggataacattatataacatgatgcatttgaaatagaggaatatgatgattatcttcannnnnnnnnnnnnnnnnnnnnnnnnnnnnnnnnnnnnnnnnn

SEQ ID NO: 4362 - DNA, 515 bp, Zea mays
  misc_feature (81)..(81): n is a, c, g, or t
  misc_feature (179)..(179): n is a, c, g, or t
  misc_feature (446)..(446): n is a, c, g, or t
  misc_feature (455)..(455): n is a, c, g, or t
  misc_feature (469)..(469): n is a, c, g, or t
  misc_feature (488)..(488): n is a, c, g, or t
  Peptide Sequence Number=SeqID_10435
  Probeset Number=SeqID_18765
gggagcaaaggtgggtaaactgttccccactcatctgcaggtggagctggctcgaccacacagcctggtggctgcagcagntgagcggtgccagcaagtcacacaatcacaagggttctctctgcagtatcgtgatgtttgcctatagctggccccgaatgatttgttctttcagccancacgtttcaatccacgaacaaacccgcttcagggtttgttggctttctaacttgtgcgatctttctgtaaagccaatcattcacgattgctaacgtatgtgctttctgtaaccaaattgaaatcagttctatggtataaaaaaaaaaaaaaaaaaaaaaaaaaaagtactctgcgttgttaccactgctaaaaaggaagaacgataataggggatcaaagattaacgaacgcgtgcatgacaacgaaatagctacttatataggggnacctaaaanaaaaaaaaaagggncaaaagagggaaaattttntttattttttttgttttttgttttttt

SEQ ID NO: 4363 - DNA, 1106 bp, Zea mays
  misc_feature (1)..(350): n is a, c, g, or t
  misc_feature (1106)..(1106): n is a, c, g, or t
  Probeset Number=SeqID_18766
nnnnnnnnnnnnnnnnnnnnnnnnnnnnnnnnnnnnnnnnnnnnnnnnnnnnnnnnnnnnnnnnnnnnnnnnnnnnnnnnnnnnnnnnnnnnnnnnnnnnnnnnnnnnnnnnnnnnnnnnnnnnnnnnnnnnnnnnnnnnnnnnnnnnnnnnnnnnnnnnnnnnnnnnnnnnnnnnnnnnnnnnnnnnnnnnnnnnnnnnnnnnnnnnnnnnnnnnnnnnnnnnnnnnnnnnnnnnnnnnnnnnnnnnnnnnnnnnnnnnnnnnnnnnnnnnnnnnnnnnnnnnnnnnnnnnnnnnnnnnnnnnnnnnnnnnnnnnnnnnnnnnnnnnnnnnnnnnnnnnnnnnnnnnnntggaaaggatacttcaatgttgcctcttatactccatatttcaatgttgatactgatgtcgttgttgacagacttatcagttcagtttatccaatggaggggtttttcaggaagatagatgctaatcctgacatgtatgggcccttatggatcaccactacactgatatttatgctggctgcattcggaaactttgccacttatctaatgcaaaggaaaagtgatctgaatatatggaactttgatgtcagctatttcagtttggcagcatcagtcatgtatagttatgctatcattgtgcccgtcgtgttctttttcctgtttcagtattttggatcacgcccaagtcttgttcgattttggtgtatgtggggctattctctgtttatcttcatacctgcatctgtaagtattcgatttccatctgtttgtttcgttatttatatcactggcaagaatacacagacattcaattttaacatgatgtacattcataggaattttcagttctctaggttgcaattatatataacggtcctaaaaattgattcacttaatgtaaagaatccatgacgttatcatggttgtgagcgcttggaactcacttctgttcttgaagatgaatgttgccattatgctaacatgagctgccctcctattttgtctggttaaggtacttttgcttattcctgtgggatttcttcaatgggtcatcatagctcttgctggtggtgcattatcttggttcataacttn

SEQ ID NO: 4364 - DNA, 932 bp, Zea mays
  Peptide Sequence Number=SeqID_10436
  Probeset Number=SeqID_18767
cattgggtacctcgaagccggccgggccgggagtagaggttgtacttgagacagacaggacggacgtgcacatccgccatattcaggcatgcaagcaccggatgcgaagcgcgtcctccgagtggtcgacatcaaaggatccattcgcaaggtctcctgacacagtgtactcatccgggccggtacgtacgactgttcttttctcgctgaaacagcatatgataagaatggcctacactagcttgtcaattatatccagccgcgcaggtgtgaaaggacatgacatccctggggctgcgcgtccgaccacctcgacgtacgcgacctgccgatgctcaacaccgtacctcgatgacgaacggcggcacgcttcttgccgcccgccgccgagagcgatgcgagtcaaggtccgccacgccgactgcttcctcttcacctcgcccgaatacaagtactcgcatcaccagcccactgaagaacccccttgactgggcttctagaggagtgaactgctgggcagacaagccggccgccatcgtcagcgcggtaggcaacttcggcggcggcaggtccagcttccatctgcgccaggtacggggtgttcttggacatccatttcatcaacaagccggaactgttcgtcttcgccttcttcgagccggccaagtttttcgacagcgacgggaacctcatcgacgccgacaccagggagcgcctcaagcaggtgctcctgtcccttgaggccttcacgcgcaggctccagaactacaaggactgcagccgcacctcccgcggatcgccgggcctaataataactatctctacttccttccttcaaaccttcccttcctacttagaacaatgaggtagtcttagtccacaccaaagtatatgtgctcgaacctataatacaaaacatggagaacttcgct

SEQ ID NO: 4365 - DNA, 352 bp, Zea mays
  misc_feature (122)..(122): n is a, c, g, or t
  misc_feature (197)..(197): n is a, c, g, or t
  misc_feature (203)..(203): n is a, c, g, or t
  misc_feature (234)..(234): n is a, c, g, or t
  misc_feature (266)..(266): n is a, c, g, or t
  misc_feature (268)..(268): n is a, c, g, or t
  misc_feature (272)..(272): n is a, c, g, or t
  misc_feature (323)..(323): n is a, c, g, or t
  misc_feature (348)..(348): n is a, c, g, or t
  Peptide Sequence Number=SeqID_10437
  Probeset Number=SeqID_18768
gctggagctccccgcggtggcggccgctctagaactagtggatcccccgggctgcaggaattcggcacgaggagagagagctcactagtcccccccccccattcccagtcatctccactctncagcagtcctcacgttccttctctctctcccccccgctttaggtttgcctgtgttgggtagagtcgtatagcgangagaanaggcttggtgcccagaaactggcatttcganttgggggagggggttaaattcggcgctggggnancatnggttctggaggcggacccaaatctggtaaaaatggggtggggaaaaagggnttgacttccacaaacctttaaaaancctt

SEQ ID NO: 4366 - DNA, 218 bp, Zea mays
  Probeset Number=SeqID_18769
ctgcagttcgcgcagacagccgccatcatggaggtcagcttttacatacttgatgaacagcttgagctcttgagcaaggtgctgaatgcaggggatgacatgattggtgttgagtgcttagaagaagattgtgatggcaaggttctatttgggagttcaagattctcaatctattggaattcaatagcaaaagaaaacgaatgactgtaattctgcag

SEQ ID NO: 4367 - DNA, 896 bp, Zea mays
  misc_feature (1)..(96): n is a, c, g, or t
  misc_feature (857)..(859): n is a, c, g, or t
  misc_feature (861)..(861): n is a, c, g, or t
  misc_feature (864)..(864): n is a, c, g, or t
  Peptide Sequence Number=SeqID_10438
  Probeset Number=SeqID_18770
nnnnnnnnnnnnnnnnnnnnnnnnnnnnnnnnnnnnnnnnnnnnnnnnnnnnnnnnnnnnnnnnnnnnnnnnnnnnnnnnnnnnnnnnnnnnnnnntaaatcccagtcaaattgaacgagagcgccactcccctctgctaatcccagtcaaatcgaagcaagcatggccatggcggccgtgggcgtgggcggcgcagtggcgttcctcctcccgcagcgccgccagggcgccgtcccctggagcggcgggcggcggcgggcgcccgtggcggtgcgcgcgtcgtacgaggccggggtgggcgtgatggcgaccaaggtggggatgatgacctacttccgccacctgcaggagttccggctcaccgccgtcgacgccttcgagccccggccagcccctcgacttcgccgacctcttcaaggagggcgacctcatcgacgtctccggcaactccatcggcatggggttccaagggggcatcaagaggcacaacttcaagcgcgggctgatgacgcacggttccaaaagccaccggcagctgggttccatcggagccgggacgaccccggcccgggtgtccaaggggaagaagatgcccggaaggatgggaggaaccaagaaccaaaatcaggaggctcaaaatcgtcaaaatcgacaacaacctccgggggctcatgatcaagggggccgggccagggaagcccggaaacctcctccgattaacgccggccaaaatcgtcggcaagaccatccccaaaacctagactttttttttaaggggggggaaggtgaagggttggggttggtaacctggttccaaccggaaggtattctttggccaatttcagttttgaaccannnanaanaaaaaaaaaaaaaaaaaaaaaaaaaagggggg

SEQ ID NO: 4368 - DNA, 538 bp, Zea mays
  Peptide Sequence Number=SeqID_10439
  Probeset Number=SeqID_18771
gacaacaaggtaaggtggccatggggggattcaagcactttgtgattgttaagttcaaggcaggtgtggaagtggaagagctaacaaaagggatggagaagttggtctcagagattgatgctgtcaagtcgtttgaatggggacaggatattgaaagcctagatgtgctgagacaaggtttcactcatgctttcttgatgacattcaacaagaaagaagacttcactgcatttcagagccacccaaatcatattgagttctcagcaacattttcagcagctattgagaagattgtggtgctggattttccttcgactcttgtcaaggcaccagcttgatcatgaagatatttcaagcaataaagattccatctttaaaagttaaatctgttgattgcatgtatgtgcttgtgtctccactatttatagtttggttatggattgttttgctattgcttctcgtgccatttgaatgggctctgtgacttatgaatgataaagataaacttttgttgccttctaattgatggatagtttct

SEQ ID NO: 4369 - DNA, 447 bp, Zea mays
  Peptide Sequence Number=SeqID_10440
  Probeset Number=SeqID_18772
aaaagggttaaaaagttgtttttgactcatgaccgggcaaatgttgttgagctcaaaaatatggagaaagaaatcgggaaacaagtaaatgccgctattggtaaagcaaaggaaagttctatgcctgaaacgtgggacctcctcccaaatgtttatacaaagggcttcagcgtggagtcatttgggccagccaggaaggggatgagagcttctctcccgtaggttggcagcataataaggcagcccccctaccatggtgtgaaagccaggaaaaataaattttgctgaaggcccccggcattattggaaaattttgtcgggaaatgaacctgtataaaaatgggttgtctggaggaacaggttggttgtttcgcccctttttcatttttacaattcagttttaagtgctgctggctggcttctttttgaagctaatttccccctccc

SEQ ID NO: 4370 - DNA, 823 bp, Zea mays
  misc_feature (585)..(585): n is a, c, g, or t
  misc_feature (590)..(590): n is a, c, g, or t
  misc_feature (592)..(592): n is a, c, g, or t
  misc_feature (595)..(596): n is a, c, g, or t
  misc_feature (600)..(823): n is a, c, g, or t
  Peptide Sequence Number=SeqID_10441
  Probeset Number=SeqID_18773
agcctggagcacccggcgcgagcggccacggcagcaacgagcggctcccccccgctcccccacccccaaagcttcagaggaagaataataagagagtgagaaacaatggcgtgggacgactggtgtgaatcgcaacaacaatccgctcctcttctcctctcacttccgcttccactcatcacttcctttccaaacccaccgcaatcgaattcccatttcgtctcagctcttcttctagccaccgtgcaatcaacctccgtcctatctccgccgtcgaagctccggagaaaatcgagaagatcggatcctgaaatctcatccctaaccctcgaagaagctcgtatcctcgtcgactatctccaagacaaattcggtgtctccccactctctttagcccccgcagcagcggcggttgctgctccagccgacggtggcgccggtggctgtagcggaggagccaacgccggcccctgcccgctctcttttgccccccccgccgcggcccgcgccgctccggccgacgctggcgcggccgctgctggggaagagcatgcacggttcactgcgggtctcaatcgactgcanggccnanganntgcnnnnnnnnnnnnnnnnnnnnnnnnnnnnnnnnnnnnnnnnnnnnnnnnnnnnnnnnnnnnnnnnnnnnnnnnnnnnnnnnnnnnnnnnnnnnnnnnnnnnnnnnnnnnnnnnnnnnnnnnnnnnnnnnnnnnnnnnnnnnnnnnnnnnnnnnnnnnnnnnnnnnnnnnnnnnnnnnnnnnnnnnnnnnnnnnnnnnnnnnnnnnnnnnnnnnnnnnnnnnnnnn

SEQ ID NO: 4371 - DNA, 704 bp, Zea mays
  misc_feature (2)..(2): n is a, c, g, or t
  misc_feature (4)..(4): n is a, c, g, or t
  misc_feature (9)..(9): n is a, c, g, or t
  misc_feature (14)..(14): n is a, c, g, or t
  misc_feature (16)..(16): n is a, c, g, or t
  misc_feature (18)..(20): n is a, c, g, or t
  misc_feature (22)..(22): n is a, c, g, or t
  misc_feature (31)..(31): n is a, c, g, or t
  misc_feature (45)..(45): n is a, c, g, or t
  misc_feature (50)..(50): n is a, c, g, or t
  misc_feature (58)..(59): n is a, c, g, or t
  misc_feature (70)..(70): n is a, c, g, or t
  misc_feature (79)..(79): n is a, c, g, or t
  misc_feature (87)..(87): n is a, c, g, or t
  misc_feature (90)..(92): n is a, c, g, or t
  misc_feature (95)..(95): n is a, c, g, or t
  misc_feature (97)..(97): n is a, c, g, or t
  misc_feature (110)..(110): n is a, c, g, or t
  misc_feature (115)..(117): n is a, c, g, or t
  misc_feature (119)..(120): n is a, c, g, or t
  misc_feature (123)..(124): n is a, c, g, or t
  misc_feature (126)..(126): n is a, c, g, or t
  misc_feature (128)..(131): n is a, c, g, or t
  misc_feature (134)..(134): n is a, c, g, or t
  misc_feature (137)..(138): n is a, c, g, or t
  misc_feature (140)..(140): n is a, c, g, or t
  misc_feature (142)..(143): n is a, c, g, or t
  misc_feature (149)..(149): n is a, c, g, or t
  misc_feature (154)..(154): n is a, c, g, or t
  misc_feature (156)..(156): n is a, c, g, or t
  misc_feature (167)..(167): n is a, c, g, or t
  misc_feature (176)..(176): n is a, c, g, or t
  misc_feature (189)..(191): n is a, c, g, or t
  misc_feature (194)..(195): n is a, c, g, or t
  misc_feature (197)..(200): n is a, c, g, or t
  misc_feature (202)..(202): n is a, c, g, or t
  misc_feature (205)..(205): n is a, c, g, or t
  misc_feature (207)..(208): n is a, c, g, or t
  misc_feature (211)..(211): n is a, c, g, or t
  misc_feature (213)..(213): n is a, c, g, or t
  misc_feature (215)..(216): n is a, c, g, or t
  misc_feature (221)..(221): n is a, c, g, or t
  misc_feature (223)..(223): n is a, c, g, or t
  misc_feature (231)..(231): n is a, c, g, or t
  misc_feature (238)..(238): n is a, c, g, or t
  misc_feature (241)..(241): n is a, c, g, or t
  misc_feature (245)..(245): n is a, c, g, or t
  misc_feature (249)..(249): n is a, c, g, or t
  misc_feature (257)..(257): n is a, c, g, or t
  misc_feature (270)..(272): n is a, c, g, or t
  misc_feature (274)..(274): n is a, c, g, or t
  misc_feature (276)..(277): n is a, c, g, or t
  misc_feature (280)..(280): n is a, c, g, or t
  misc_feature (282)..(284): n is a, c, g, or t
  misc_feature (287)..(287): n is a, c, g, or t
  misc_feature (293)..(294): n is a, c, g, or t
  misc_feature (298)..(298): n is a, c, g, or t
  misc_feature (300)..(300): n is a, c, g, or t
  misc_feature (304)..(304): n is a, c, g, or t
  misc_feature (306)..(306): n is a, c, g, or t
  misc_feature (309)..(309): n is a, c, g, or t
  misc_feature (313)..(316): n is a, c, g, or t
  misc_feature (319)..(319): n is a, c, g, or t
  misc_feature (322)..(322): n is a, c, g, or t
  misc_feature (324)..(324): n is a, c, g, or t
  misc_feature (326)..(327): n is a, c, g, or t
  misc_feature (329)..(329): n is a, c, g, or t
  misc_feature (331)..(331): n is a, c, g, or t
  misc_feature (333)..(333): n is a, c, g, or t
  misc_feature (336)..(336): n is a, c, g, or t
  misc_feature (342)..(343): n is a, c, g, or t
  misc_feature (352)..(352): n is a, c, g, or t
  misc_feature (357)..(357): n is a, c, g, or t
  misc_feature (362)..(362): n is a, c, g, or t
  misc_feature (382)..(383): n is a, c, g, or t
  misc_feature (385)..(385): n is a, c, g, or t
  misc_feature (395)..(395): n is a, c, g, or t
  misc_feature (409)..(409): n is a, c, g, or t
  misc_feature (420)..(420): n is a, c, g, or t
  misc_feature (439)..(439): n is a, c, g, or t
  misc_feature (443)..(443): n is a, c, g, or t
  misc_feature (446)..(446): n is a, c, g, or t
  misc_feature (452)..(452): n is a, c, g, or t
  misc_feature (470)..(470): n is a, c, g, or t
  misc_feature (519)..(519): n is a, c, g, or t
  misc_feature (561)..(561): n is a, c, g, or t
  misc_feature (619)..(619): n is a, c, g, or t
  misc_feature (673)..(673): n is a, c, g, or t
  Peptide Sequence Number=SeqID_10442
  Probeset Number=SeqID_18774
cnancacgnggcgncncnnncnagccgaacnaaaacggaagttcncccgngcgcccanntccgggtcgcntatcccggncctgtctngcnnnacncncaaacgaggatgnaaaannnanngcnnangnnnncanggnnananngacccnatcangngtggaagcganaaacgaganacaaccaatgcgnnnaanncnnnnanagngnnacngngnnaagtncnagagaggncgaaacncgnggtnaccngagcgcantctccgacatagnnnancnngtngnnnggncaaatnngagntnaagncnggntccnnnngancgncnanngngngngtnaagttnngtatgttgngtagntgtcncctgtcttgccgctcaccanntngaactgtaanatgtacttgtagtnccttgaaagtntgcatcacttatttgttgncaanatnccatgnaggtcttggtctcttcgnatttgctaagccttgcactcacatagcatcattgcctcagctatttttnaagcagcagatctcatcccggtgaccaattcatttgcgtttnaggtagatcgtaattgcggaagcagacatggaagtctttagcggggggggggggggantagtgagctctctctctctctcgtgccgaattcctgcagcccgggggatccacngttctagagcggccgccaccgcggggaggct

SEQ ID NO: 4372 - DNA, 1086 bp, Zea mays
  misc_feature (1)..(3): n is a, c, g, or t
  misc_feature (1086)..(1086): n is a, c, g, or t
  Probeset Number=SeqID_18775
nnnatttgaacaacccctgcatctccctcgccccgctcccctctctctagcgcctccctgccctcgggcacgaccaacccttttcggcggcgcagctccgcccttggctctcctgcgcgcagctcggcgtggcgtggcccggctccggcgagcggtcgaagaaacccggacgccaagcaccttccccaccggagcttcgctgacctgctgtccatgttttccctcgccgttcttcatcgtgatggtctggtgagttcgtgcatgcgcagcagacgagggagaagagaattgtgaaggagtgagcagttggtggagagaaaggagatgctagccacaccagatcccacatctaaagattttctgtggctgcacctcgtgtgaccctttttgtgactgtgatccgtttccgagcttcgagggatcgatgatcaagcttcggcgaccaagtgatcgaactcttcgagttctacgaggctgaagaccctgagcatctgtttggtgaaggttgtcagcattgcaaccactgctcaggagaagatgaagtcgtggaaggagactttcaggagttccaagattacgacgagttctaggcgtgggttagcggcaacccccagtcggctgcctgtgaaggccgcatgtatctacgttttgttttcgcactttgattattgtaaatactatgtggatgtctcagacatatgatgtaatcgactattattcccctgttatgttgttatttgagcactgtgtgatgatgtcttcgtggagtctgagggaattgcaggagaggaccctgagcagcagcagcttggtgaaggttgtccacattgcaaccactgctcaggagaagacgaagtcgtggaaggagacttccaggagttccaagactacgacgagttttaggtgtgggttggcggcaacccccagtcagctgcttgtgaaggccttatctttactgcgtttcactagtactttgatttaactgttaagttgatgactatgtggatgtctatgactctgtgatgtaataagtccccactcttttatgaaattatcccagcactgtgcgatgatgttcatttatgn

SEQ ID NO: 4373 - DNA, 455 bp, Zea mays
  misc_feature (74)..(75): n is a, c, g, or t
  misc_feature (379)..(380): n is a, c, g, or t
  Peptide Sequence Number=SeqID_10443
  Probeset Number=SeqID_18776
atggcctgtgagatatgtttcaaaaattttagggatcacttattagcatactgatgtgggtttatatttttttnngcaacatttttttccctaacgtccccaataacaggttttggggaacattttcttagtggtctcttggagttgctcttagcggtacaattctttcaagtagaaagcaagaaggcaaaaatggaggggggaaacaccacatcatggtcctagctggaataaacagaatactagcctccaacaagtcggttccccccacaaagacgacggcggaagagaccaaattgcaagcaccacccaaagggctaactgacaggtaagcccaattcggtgcaagaaccccaaatttcagtgaagccagcacgcnnactgcacagggaaccgcaatcacaggacacgaaccaaggaaccgcagctacgtggcgtgagcactacgccaagga

SEQ ID NO: 4374 - DNA, 864 bp, Zea mays
  Probeset Number=SeqID_18777
gctctctttctttctctgagaacccagaaaaaaaaaacaaaaaatcgcgattcgctcttctcttcaaaaaacctaaagatcgagaagaagagcgattactggtggtgaagatggggttgacgttcacgaagctgttcagtaggctatttgcgaagaaggaaatgaggattttgatggtaggtctcgatgctgctggtaaaacaaccattttgtacaagcttaagcttggagaaatcgtcaccactatccctaccattggatttaatgttgagaccgtggagtacaaaaacatcagcttcactgtgtgggatgttggtggtcaggacaagatccgtccattgtggaggcactatttccagaacactcagggtcttatttttgtagttgatagcaatgatagagatcgagtggttgaggcaagggatgagttgcacaggatgttgaatgaggatgaactgaggggtgctgttttgcttgtttttgccaacaaacaagatcttcccaatgcgatgaatgctgcagaaatcactgacaagcttggactccattcacttcgccaacgccactggtatatccagagcacttgtgcaacttctggagagggtctctacgagggtctggactggctttctaacaacattgccagcaaggcgtgagacatttgaaaaattttggtgtgatctggtcatgtcatgcgagtctggtagttcttggagaaggatgcttttcctttcaagtgaatgttgtaatagcagaatgtttgttagaaatattaaccttttccgtgtaacttggttttgtatgattgcttaaatctgctaatacttttagctataatcggaactcttgcaatctccttttgcg

SEQ ID NO: 4375 - DNA, 558 bp, Zea mays
  misc_feature (525)..(525): n is a, c, g, or t
  Peptide Sequence Number=SeqID_10444
  Probeset Number=SeqID_18778
ttttttttttttttttgggatgacatccaacgaaaacccaggttataaaggcttatacacaagtgtgtgaaatgaaattgcatcttcagttaacatctgagcaaaaatagggcttattgaataagagctatatgcctagtaatattagtcacctttgagcacatcactaataagctgcttgaacagtcaccttcgagcataccaccctgttactggcaattcttttggagcagcatctgaattagcatccttatgaaagaactaactagcttatgtggttaacgaaactactagttttataactctgcttacaatctagaactataaagctgatgtgtcgaacatggtctccaaagtaactcgatctatgaggcccttcagaaaaacaagattgccagtttttgtagctatgtcaacctcataatgaacccgaagatgcatcctcagtcctcaccaatgtcggccacggccaggtttctccttcacgacgtgccgcaccttggtgtccaggaacacgcgtagcantcggaactgaagcctctcggtcgcagatagcgc

SEQ ID NO: 4376 - DNA, 479 bp, Zea mays
  misc_feature (39)..(39): n is a, c, g, or t
  misc_feature (71)..(71): n is a, c, g, or t
  misc_feature (96)..(96): n is a, c, g, or t
  misc_feature (102)..(102): n is a, c, g, or t
  misc_feature (120)..(120): n is a, c, g, or t
  misc_feature (123)..(123): n is a, c, g, or t
  misc_feature (189)..(189): n is a, c, g, or t
  misc_feature (192)..(192): n is a, c, g, or t
  misc_feature (204)..(204): n is a, c, g, or t
  misc_feature (218)..(218): n is a, c, g, or t
  misc_feature (237)..(237): n is a, c, g, or t
  misc_feature (461)..(461): n is a, c, g, or t
  Probeset Number=SeqID_18779
aaaaaaagaaaaaaccctaaaagaaatcatttgacggcncctctccccactctacaaccatgccgcctaanttggacccaagccagatcgtcgacntctacntccgtgtaaccggagganaantcggagccgccagttccctcgctcccaagatcggtcccctcggtctcgcccccaagaagatcgganaanacatcgccaaanagaccgccaaggantggaaagggctccgcgtcnccgtcaagctaacggttcagaatcgtcaggctaaggtcacggtggttccatctgctgcggcgcttgtcatcaaggccttgaaggagccggagagggaccgcaagaaggtgaagaacatcaagcacaatggtaacatttcgtttgatgatgtgattgagattgctaggatcatgaggcctagatctattgccaaggagcttagtgggactgtgagggagattctngggacctgtgtctctgtt

SEQ ID NO: 4377 - DNA, 527 bp, Zea mays
  Peptide Sequence Number=SeqID_10445
  Probeset Number=SeqID_18780
gttcaagccctagcagtgagcgcaacaaaagcgttcattattcctcagtggacacttgctccacgcgccaaggcccacagttcctacctccagaagcttcaatgggattggagcatccaacagtgcaagcatataggctacagctagcgcgttcggcgagcagccttccagcaggccaatggcccatattgcagcgggcaatccttggcacatcatagccctgcaaaccatcgcaacgcagcaacaacaacattttctgccaccactgagccacctagcagtggtgaaccctgtcgcctacttgcagcagcagctgcttgcatccaacccacttgctctggcgaacgtagctgcataccagcaacagcaacagctgcaacagtttatgccagcgctcagtcaactagccatggtgaaccctgccgtctacctacaactgcttccatctagcccgctcgctgtgggcaatgcggatacatacctgcaacagcagatgatacaacagatcgtacgtcgccggcggcccg

SEQ ID NO: 4378 - DNA, 1204 bp, Zea mays
  misc_feature (679)..(679): n is a, c, g, or t
  misc_feature (739)..(739): n is a, c, g, or t
  misc_feature (793)..(793): n is a, c, g, or t
  misc_feature (799)..(799): n is a, c, g, or t
  misc_feature (811)..(811): n is a, c, g, or t
  misc_feature (821)..(821): n is a, c, g, or t
  misc_feature (841)..(841): n is a, c, g, or t
  misc_feature (844)..(844): n is a, c, g, or t
  misc_feature (869)..(869): n is a, c, g, or t
  misc_feature (885)..(885): n is a, c, g, or t
  misc_feature (924)..(924): n is a, c, g, or t
  misc_feature (945)..(945): n is a, c, g, or t
  misc_feature (967)..(967): n is a, c, g, or t
  misc_feature (977)..(977): n is a, c, g, or t
  misc_feature (997)..(997): n is a, c, g, or t
  misc_feature (999)..(999): n is a, c, g, or t
  misc_feature (1003)..(1003): n is a, c, g, or t
  misc_feature (1009)..(1009): n is a, c, g, or t
  misc_feature (1018)..(1018): n is a, c, g, or t
  misc_feature (1021)..(1021): n is a, c, g, or t
  misc_feature (1028)..(1028): n is a, c, g, or t
  misc_feature (1031)..(1031): n is a, c, g, or t
  misc_feature (1035)..(1035): n is a, c, g, or t
  misc_feature (1040)..(1041): n is a, c, g, or t
  misc_feature (1054)..(1054): n is a, c, g, or t
  misc_feature (1079)..(1079): n is a, c, g, or t
  misc_feature (1094)..(1094): n is a, c, g, or t
  misc_feature (1098)..(1098): n is a, c, g, or t
  misc_feature (1100)..(1100): n is a, c, g, or t
  misc_feature (1109)..(1109): n is a, c, g, or t
  misc_feature (1117)..(1117): n is a, c, g, or t
  misc_feature (1120)..(1120): n is a, c, g, or t
  misc_feature (1128)..(1128): n is a, c, g, or t
  misc_feature (1141)..(1142): n is a, c, g, or t
  misc_feature (1155)..(1156): n is a, c, g, or t
  misc_feature (1163)..(1163): n is a, c, g, or t
  misc_feature (1167)..(1168): n is a, c, g, or t
  misc_feature (1175)..(1175): n is a, c, g, or t
  misc_feature (1192)..(1193): n is a, c, g, or t
  misc_feature (1195)..(1195): n is a, c, g, or t
  Peptide Sequence Number=SeqID_10446
  Probeset Number=SeqID_18781
aaggggtatcgggacgcaccaccaactgtacctgacccacgagggatccgcagatgaagatcatttcgggcccttgcctggatgacatctatggcctactttaagtgcgtgggacagagtagcatcgcaagaccaggcatgcgggctcgcttggacgctctgattggatacctggcagaaagtgggtcgtcctaggctcggctcgagcggaagggtccggcggacctaccgtcagactgacgttctcacacacccatgaccactgtgatcatgctggtggcaatgagaagatgacgctgcaggtgccatgagataaaggtatttggaggatccctggacaatgtgaaaggctgcactgatcaggtggagaatggaatgaaggtgtcacttgctaaggacattgagatactatgcctacacacgccttgccacactataggtcatatcagctactatgttactagtaaggagggtgaagatacaacggacttcaccggagataccttgttcattgctgggtgtgagaagttctttgacggttctgctgagcacattgttcagtcccttattgatacactgggttacgctgccaaagacaacccgagcttactgtggtcatgagtacactgtgaagaacttaatattcatgctgacactggagccagagaatgagaagacnaaacagaaactggaatgggctgaaaagcagcgcgaagcgaatcaaccaacagtgccctcnactataggagatgagtttgagataaatactttcatgcgtgttgatctaccatanatacangcgaaattcagngtcaactctncagttgaagcaatgagagangtnaggaagaccaacgataattggagangttgaggacacccatngccgccactaatctgttgaaccagattcaaagtgaactnatgcagaaccttgccctgtangtgggaatgaggtttctggcgncaatgctttnagaaatgtgttgttgtgaangngaanactctncaatatctngcnttaatantantacnatacnntcttgtactgtgnctgttgccatataatgaccaacgtntgctatcttgaaacngaanantttatgggntacctgcngcnttatattnttagggacatcanntcggttaatactnnaaaaacnctcnnggttaanttacccttttgactttnncnaatcttttg

SEQ ID NO: 4379 - DNA, 768 bp, Zea mays
  Peptide Sequence Number=SeqID_10447
  Probeset Number=SeqID_18782
atggatccgctgtcgccgccgctctgcacgctgccgccgggccccgagccgccccgcttcgtgtgctactgcgaaggggaggaaagcgcggagggggaccgcggcggcttcaacctctacgtgaccgacgccgcggagctttggagcacctgcttcacgccggacagcctggcggccctcggcagcctgtgagcagcaagctgtggctctgactctgcaggaggacagagcatccctgacgctttcaggggggccctcggcactggccctttgacctctccaaggtaccaggccccgaaggcagcccccaggtctgccggcgctgtacactgggccctggcaaaaacgcgtgcggtgccccgggccccgccgggctgccgccctgcacacagctgtcaccccgtgcagccccccccggcctgcccccccgcgccttcctcgggcccgccccccttcccccgtgccgcgcccccccgctcgcccccgcaggcggggtgggacccttgtgaccctggaaactcacaggaaggtggccgcaccacagcaaaagcccccctccatcaaacccccgggttctcccgagagcgaccatatactccgcctttgttgggtgatgggaccctcccatggagcacccttcacgggctgctactataaaaggggcacgcccccccacacgcggattttccgcccctactcatcgcctataagcagaagacccttgcacggacccaccccaccaaataacacccccccgctcaacctgcc

SEQ ID NO: 4380 - DNA, 529 bp, Zea mays
  Peptide Sequence Number=SeqID_10448
  Probeset Number=SeqID_18783
ccgcagccataccggattcccggattctccttgctcatgcgtacttctcctcagcgccgcccgcccagttctaggacccgcgcgccgcctggcctcgtcctcctcgttgcagactctcacgcccggtcccccacctcgtcgtggtcagccaccacgccggtgctcgcccgctcctggctgaccgtcgaccgagccgctcgccctgatcactgctcccagttcgtccatatctcacatcacgtccaacactacgctgctgctactcctatcccacacgcatagcactagcacctgacagatcgaagggatccacattctagctcttggagcatgctgccataggctacagctacggttattacattatagccggaagtgctccagctccaggactgattcaacagtttaaagaaggtactgctaccattgaagtcgatgctcttgatttgtgtatagtgatctggctgtgtttgttcgtgtgaatcacagtttgtggttggcaaagatggctagatggtgtatgatgtga

SEQ ID NO: 4381 - DNA, 411 bp, Zea mays
  Probeset Number=SeqID_18784
tttggggttgttttttttttagaaagggatgcgtgcacgggcttccattctcaaagttaaactatggggccagattggaaaacgattgtttacaaaacttgttccggaaaaaactctttacaacttgggtgcacggattacggacaaaggttatctagtcacgtattctgtaatcagagaaaggctaaaaatgctcatgatacgctgggtggagactgcacgggtcaaaccagttcgggtaccgcctgcatgtaatgacgtttgttttcaccattcatgccagtgaggagcttgattgcctctcttgcttgaaggccttttccaggaagaagggcattacaagctgcgccccgaggttggttcggccttaatatagacagacgatgcttacaaccagcagaatcccgatcg

SEQ ID NO: 4382 - DNA, 222 bp, Zea mays
  Peptide Sequence Number=SeqID_10449
  Probeset Number=SeqID_18785
ctgcagaaaaaagtgtcttcacaatggttatcgtgaaatttctcggatagcacaaagaagctacgtttgatggattagtgcttagtatcctacaatgacttaattcagtatcctatatttccatgggtattggctgattacacctcttaaaagcttgatttcaacaaatcatcgacttttaaggatctttcaaaatcagttggtgcgttggatgaaaaccga

SEQ ID NO: 4383 - DNA, 335 bp, Zea mays
  Peptide Sequence Number=SeqID_10450
  Probeset Number=SeqID_18786
gtaaattcattttaactccaaattgaggcgttcctgtttctataattccgtttttttaccgtccatcaactagtaacactgtttagccatgaaacttgaattaaaattgttcattgaattaatctgttctatgtgctaaataacttcagaaatccataacttggtaaccgtaactccgaatttaatgattcttgtttccacgatttcgtagcaacatgtagattattattatgtattttgtctatatgtttggtgtgatgttaattttgcctataccatggttgcctgtattgctacctttagcgtgtggatacgtgccatcccgaagagcaagt

SEQ ID NO: 4384 - DNA, 234 bp, Zea mays
  Probeset Number=SeqID_18787
tgcggggaaggtgttatgatctggctgcttgccattatctacttcatatctggtgcgcctggggcttatgtgctatgaactgagagcgctctgcagtttgggtggcttctcctatcttacatgattcatataatcattctgtgtgcgggcagctgtggctcctccatttcctttcaaaggaaaatcctgtggccgcgattttaccagcatcttgatgtcataagtaagaatgct

SEQ ID NO: 4385 - DNA, 881 bp, Zea mays
  misc_feature (2)..(6): n is a, c, g, or t
  misc_feature (13)..(13): n is a, c, g, or t
  misc_feature (16)..(17): n is a, c, g, or t
  misc_feature (592)..(592): n is a, c, g, or t
  misc_feature (638)..(638): n is a, c, g, or t
  misc_feature (669)..(669): n is a, c, g, or t
  misc_feature (674)..(674): n is a, c, g, or t
  misc_feature (754)..(754): n is a, c, g, or t
  misc_feature (762)..(762): n is a, c, g, or t
  misc_feature (773)..(773): n is a, c, g, or t
  misc_feature (775)..(775): n is a, c, g, or t
  misc_feature (783)..(783): n is a, c, g, or t
  misc_feature (788)..(788): n is a, c, g, or t
  misc_feature (790)..(790): n is a, c, g, or t
  misc_feature (793)..(793): n is a, c, g, or t
  misc_feature (796)..(796): n is a, c, g, or t
  misc_feature (798)..(798): n is a, c, g, or t
  misc_feature (808)..(808): n is a, c, g, or t
  misc_feature (821)..(821): n is a, c, g, or t
  misc_feature (823)..(824): n is a, c, g, or t
  misc_feature (827)..(828): n is a, c, g, or t
  misc_feature (830)..(831): n is a, c, g, or t
  misc_feature (834)..(834): n is a, c, g, or t
  misc_feature (840)..(841): n is a, c, g, or t
  misc_feature (843)..(846): n is a, c, g, or t
  misc_feature (856)..(856): n is a, c, g, or t
  misc_feature (859)..(859): n is a, c, g, or t
  misc_feature (864)..(864): n is a, c, g, or t
  misc_feature (870)..(871): n is a, c, g, or t
  misc_feature (873)..(873): n is a, c, g, or t
  misc_feature (880)..(881): n is a, c, g, or t
  Peptide Sequence Number=SeqID_10451
  Probeset Number=SeqID_18788
gnnnnnatgttgnccnnttggtccgggcccccccctttgataataacaatgatggtctgccggatttaggcatggctcccgaaaatcatgatggggaaaaacactttgctgaaattgtgaaagatttcggcgaaaccagtatgaatgataacgggctggatactggcgagcaggcaaaagctttcgcattgggaaaagtccgcgacgcgcttagtcaacaggttaatcagcacgtagagtcctggctatcaccgtggggaaatgccagtgttgacgtcaaagtggataacgaaggacatttcaccggcagtcgtggaagctggtttgtgccgttacaagataatgatcgttatctcacctggagccagcttggtcttactcagcaggataatgggttggtgagcaatgtgggcgttgggcaacgctgggcgcgcggcaactggctggtgggttataacactttttatgacaacttgctggacgaaaatcttcagcgagcggctttggtgccgaagcgtggggcgaatatttgcgattatcggcaaacttttatcagccgtttgctgcatggcatgaacagacagccacgcangaacaacggatggcgcgcgggtccacctgcagctcggatgcgcatncgtctatcaacacctcataccatgcacctanacagntttggtgatcgtgttgattgttaactctggtcggtatccatccgcgcgttagttggataaatacaccctgtccttatctngcgccacntacaggggaangnaaaaaaanacctngntgnttntnccttgggccnaaaaaattttggngnncannannttnggtttnnannnnaattcctttncanaaaantggttnncntttatcnn

SEQ ID NO: 4386 - DNA, 409 bp, Zea mays
  Peptide Sequence Number=SeqID_10452
  Probeset Number=SeqID_18789
aagcccgtcccagaatacgttgccggacatggcacccgaagagcaaccgccggaaccggcgccaccccaaaacggggaaggaaaggccaactaggaggaagggacccccccccaatatatattatagagacacacacccactcccccattttcacactcaagttggggtttcccatttttcttttctttttctcaacgacttggttattcccccctttcatctatctccccgtaaactcggttttttgtccagctggctgtaagtgacccaaaacccttcgttacgtttaatgaggctcatgacaatggcgattttggcatggagttgtgttaccctcccggaaaaactgtaactgtgtaagcagaactgttataaattgttccaaacaaggttgtccttaatcccccc

SEQ ID NO: 4387 - DNA, 493 bp, Zea mays
  Probeset Number=SeqID_18790
cacctctgcgatctcagatcccatcgctactgagaggaagaagcacactgcacgcagcgcaccgagtctagcagctaatcctacgacatggaccacctgccgctgacctcgcccgccgcgccagccgattgcggcgtcgctgctcccgtcgcacggcggcgggagggtgctcgacccgtacaagacggcgctggccaccgcggcctcgcccgcggcgtacgccgtgatggcgcgaagcatggcgcgcgagctgctgcccgacgagctgcgcgccgcggggcggtgccgcgcggcttccgcgcgcgcccggctcggtcgcggcgagaaggagcgcgcacaccttcgccatccgcgacctggtcgacaccggctacagggagaaccggctcatcaacgacgggcgcgcctacggggccctcgggaacgagcccaaggctgaccccacgtatctggctgcgtgcaccacgacaacacactggccccctacggcatc

SEQ ID NO: 4388 - DNA, 1171 bp, Zea mays
  misc_feature (1)..(157): n is a, c, g, or t
  Peptide Sequence Number=SeqID_10453
  Probeset Number=SeqID_18791
nnnnnnnnnnnnnnnnnnnnnnnnnnnnnnnnnnnnnnnnnnnnnnnnnnnnnnnnnnnnnnnnnnnnnnnnnnnnnnnnnnnnnnnnnnnnnnnnnnnnnnnnnnnnnnnnnnnnnnnnnnnnnnnnnnnnnnnnnnnnnnnnnnnnnnnnnnnnngttggttggttgggtcgcgggcatgtccacgacggtggcgcggccgacgcacggtggattcctgcggtcggggagcgggaagccggatccggacgaggcggacaggatgatgcggagcactaacgggtacttggtccaagaagaggaggaggaagagcatggcgatgaggcggcgacgaggagagaggatgaggacgaggcggaggcagtgtcggaggcctcgtcgatcggggcggcggcgtccgacagctcctcctctatcggggagaactctgcatccgacaaggaggaggaggaggaggtggagagcaaggcgcaggggctcggcatgatggggctggccatgctcgaatccttggatgatgccctgccatccaagtaagctgctacttctctgctaatccctggcgtcgtcgaggacggggtcgtcccagatggcgtcggtgaagtagcgcgagaagtttgtgtggcagtactcggccgtggcgacgaccgcagtgctgggcagctgcgtctaccagagccgcctcacgtcagtgacgaggtatatcgcgcgcagcactctgcgcggtatccgtaacgcgaggttatccctgttccattactcgggcgtttcggcgggcctcgccagatcatcgaacctgtcaggcggtgccgccggcaggtgtggcggattctcttgtcacgtcttcagcctcccagagagaagttttcttgtcagtcttggaaacagttttcaggacggcgtcaggcgtctcattgacgttcatggtgaccttctgttccatgatgtgtacgttgtaggacttgactccttccatcttgcccaggacatgtccaccttgagcacaacagtctgggccatagcgcgagaggggaggagggtcggggcggtccggcggtggtggtggaaatctcctgccggtgaaggcgaaggcgaaggcgagggaggacgggggaaagatatatctgagctcccggccggcctcgaggaacccaatcgccctatggagt

SEQ ID NO: 4389 - DNA, 692 bp, Zea mays
  misc_feature (3)..(5): n is a, c, g, or t
  misc_feature (7)..(7): n is a, c, g, or t
  misc_feature (9)..(15): n is a, c, g, or t
  misc_feature (17)..(20): n is a, c, g, or t
  misc_feature (531)..(531): n is a, c, g, or t
  misc_feature (542)..(542): n is a, c, g, or t
  misc_feature (544)..(544): n is a, c, g, or t
  misc_feature (549)..(549): n is a, c, g, or t
  misc_feature (560)..(560): n is a, c, g, or t
  misc_feature (566)..(567): n is a, c, g, or t
  misc_feature (578)..(578): n is a, c, g, or t
  misc_feature (581)..(582): n is a, c, g, or t
  misc_feature (586)..(586): n is a, c, g, or t
  misc_feature (593)..(594): n is a, c, g, or t
  misc_feature (605)..(605): n is a, c, g, or t
  misc_feature (618)..(619): n is a, c, g, or t
  misc_feature (625)..(625): n is a, c, g, or t
  misc_feature (630)..(630): n is a, c, g, or t
  misc_feature (632)..(635): n is a, c, g, or t
  misc_feature (639)..(639): n is a, c, g, or t
  misc_feature (642)..(642): n is a, c, g, or t
  misc_feature (645)..(646): n is a, c, g, or t
  misc_feature (655)..(655): n is a, c, g, or t
  misc_feature (657)..(658): n is a, c, g, or t
  misc_feature (662)..(663): n is a, c, g, or t
  misc_feature (665)..(665): n is a, c, g, or t
  misc_feature (667)..(667): n is a, c, g, or t
  misc_feature (676)..(676): n is a, c, g, or t
  misc_feature (679)..(679): n is a, c, g, or t
  misc_feature (681)..(683): n is a, c, g, or t
  misc_feature (685)..(685): n is a, c, g, or t
  misc_feature (690)..(690): n is a, c, g, or t
  Peptide Sequence Number=SeqID_10454
  Probeset Number=SeqID_18792
agnnnangnnnnnnntnnnncattgggtaccgggccccccctcgaggtcgagcggatccatcccagcggcgtgcccgcatcggtgccatccgcgtaatatacgcggatggttaccagacgttttttcctcggagcctccgggctcactgcaccgctgcttgccggcgcaacgggaggcggctcttccgtgaacaaaccacttgttgtgtctacgtgggatttcggtgtgcctgcgaacaaggcggcgtgggttgttcttgccgccggcggcagatccgttgatgccgtggaagcgggcgtacgagtacccgaagcggacatgaagaatcacactgtcggccgcgcgggctaccccgatcgcgacggccatgtgacgctggatgcgagcatcatggacgagtttggaaattgtggtgccgtggcggcaatggagtttattgcgcatcctatctcggtggcccgtgctgtcatggacaagacaccgcacgtgcttctggtcggtgaaggtgccacccaattccggtggagcangggtttacgcncnaacanttgtgactccngaatcnnccaagcctgcncanngctnaaaactnncaaggttacancctgtcccaatcnnaaaatnttttngnnnnctcnggnggnncggcaacananncatnngntnctggccttnatnannngnaactngc

SEQ ID NO: 4390 - DNA, 421 bp, Zea mays
  Peptide Sequence Number=SeqID_10455
  Probeset Number=SeqID_18793
atgggtttattgtcggcgctatcttattgttgggggggccttctgtggaaggcccatgaacacctatgtggcattgggccttctgtcgtgagctggtcttggaccccccgctggatctcatgggctgggcctctcatgggtggtggagtcgctggccttgtttccgaggttgtgtttatcagccggactcctcgagcagcttcccaccgcgtgctactagaggggggataatgcaaataataaaaaggattgtgtatgatagagtttctcacgaatcttaataaagagtatggttctcgtttcctcgtgtgttcatcgctacatcgctttcgagggctgtgcttgttcctttcgtcttaaatcgttggatggttgatgatcatgaagttctctttaaagttatattattatcaatttgtgc

SEQ ID NO: 4391 - DNA, 577 bp, Zea mays
  misc_feature (577)..(577): n is a, c, g, or t
  Peptide Sequence Number=SeqID_10456
  Probeset Number=SeqID_18794
ttttttttttttttttacttactgttttttgtttttatttatacttttcaatttattaataataataattaataataattatatattacacttaaaatcacgatttcactatttatatgttcatttgcattcattcatatctttctttaattaatttttaaattaaatttatcttaagataaactgtccctacaattatagaaatattttcctgtagatggcgttgactttgtcgtcgtgtttcatcctttttagaaccagtacagatcctttgaggaatcctgaacctgggcttccaatccagacattgtagggtaagatgaatacggtgactcaattgaaggatgttgccaatccatagctttgcagggggcatgcgagctcatgtggtgcaaccttgaaccgggtaaaagtaaaccgccatattgagccgccatattgtggtggtgataatcatgcacagctctgtgatgatgttgactatactgatgataccaggcatcgcctggatggtagtgttccgagtacagatcggcggcggaggcgccatggtggccaacatttccattaccaccgn

SEQ ID NO: 4392 - DNA, 507 bp, Zea mays
  Peptide Sequence Number=SeqID_10457
  Probeset Number=SeqID_18795
aaactagcattttcattgaatccgccacctagcttttttttcagcggcgatacgaagacgaaggagagggagctatctacacaagtgaagcaacaatggtgaagttcttgaagcagaacaaggcagtgatcctcctccaaggccgatacgccgggaagaaggcggtgatcatccgctccttcgacgacggaaaccgtgagcgtccttacggccactgcctcgtcgccggactcaagaagtacccgagcaaggtcatccgcaaggactcggcgaagaagacggccaagaaatctagggttaagtgtttcatcaaggtcgtcaactaccagcatttgatgcctacgcgttacaccctcgacgtggatctcaaggaagtcgcgaccctcgaggctctggcttcaaaggacaagaaggtcgctgctctcaaggaggcgaaggctaagctcgaggaacggttcaagaccgggaagaacaggtggttctttaccaaactcaggttctgaagac

SEQ ID NO: 4393 - DNA, 932 bp, Zea mays
  misc_feature (1)..(325): n is a, c, g, or t
  misc_feature (926)..(932): n is a, c, g, or t
  Peptide Sequence Number=SeqID_10458
  Probeset Number=SeqID_18796
nnnnnnnnnnnnnnnnnnnnnnnnnnnnnnnnnnnnnnnnnnnnnnnnnnnnnnnnnnnnnnnnnnnnnnnnnnnnnnnnnnnnnnnnnnnnnnnnnnnnnnnnnnnnnnnnnnnnnnnnnnnnnnnnnnnnnnnnnnnnnnnnnnnnnnnnnnnnnnnnnnnnnnnnnnnnnnnnnnnnnnnnnnnnnnnnnnnnnnnnnnnnnnnnnnnnnnnnnnnnnnnnnnnnnnnnnnnnnnnnnnnnnnnnnnnnnnnnnnnnnnnnnnnnnnnnnnnnnnnnnnnnnnnnnnnnnnnnnnnnnnnnnnnnnnnnnnnnnnnnnnnnncggcatcatcatgcacggtgatctaccccaaggcgaagccctactacctctttgatggctacgaccacctttcgtcgcgggttgcctgtggtctcgctgggcttgcagctggcatggccatcggcattgtcggtgatgctggagtcagggcaaatgcgcaacagccaaagcttttcgtcggcatgatcctcatcctcattttcgcagaagcgcttgctctctatggtctaattgttggaattatcctttcgtctcgcgctggtcaatcccgggcggattaagtgcaccaccattctgtgattaccgcatcgtttattatgctattctgagaggattggaactctattcccttgtctagtttattcttgttaccatgtattaatgtaacaatctgtagctgatggaaggtgacttccagtcatgttttggttttggtggtgtcgagcagaggttatttatttttgggttaaggtcggagtcggacggatgctcttgggctaagtggatttaattttatccttgctgaataaagaacacggaattgtagccaaataagaacgtgatatataaatatttctttcccaaaaaaaaaaaaaaaaannnnnnn

SEQ ID NO: 4394 - DNA, 459 bp, Zea mays
  Peptide Sequence Number=SeqID_10459
  Probeset Number=SeqID_18797
agacgccgagacgcgggcggcgggacgccacacgccagagccgctcaggctccagggccgccaccgcccaggctccaggccgccagcgggccgccaggcgcgtcttccgcgcggagccgcggacgcgcggtctactggcgactggcgagcagcgagcagcgagctagccgctagcgagctgactgctgcgagcagcgagctggcgagctgactgctgaggcctgaggcccgaccggcgagtcggcgaccgcgctggcgcctggcgagctgagcaggctgcacctgcaggcgagccgcgagcaggcagagcagagcggtgagccggtgagcactaagcagctattgggcgagcagagcagcgattagcacttagcagagcagcgagcagccggaaaaagatggataaatttctcatcaagaaccagaagaaagatgattctatttctaaaacaattagga

SEQ ID NO: 4395 - DNA, 529 bp, Zea mays
  Probeset Number=SeqID_18798
tgcgcgagcgccgcaaggccggcgcctgcaacaaacggcgggggcggcggggaggagtaggagcccacggccacgacgacgacgcccgcgtacctgcggcaggtgtacccgccggtggtggagccggtggagatgcttttggccaggctgccggccgggcccagcccgaagggccccggtccctagcgtacgtacgtatcgtcgtattggccaagcattagcgaccagatggtggcgtacccccgtcgtacgtatggagcttttgtatagatattgtctctctgctagctgtgatgatagtataaatatgattgtactaaagtgctaattaagagcacgcccttatcccctagatatgattctttcatacctttgtcgtcgtcgtcgtccctagatcgacacgtactgctagctagtagctagtgtatatatatgttagcctgtgtaggcgcaaacgcgttggtgtgtcctttcttttaccctattctttcctctgaggttctgttatgaaagttagtattgttctgct

SEQ ID NO: 4396 - DNA, 603 bp, Zea mays
  Peptide Sequence Number=SeqID_10460
  Probeset Number=SeqID_18799
ccggccgggacaagacccacacttctcggcctacattatctctcctcccctctttgaccgctgttgtgatctcttcgctaaaacctaacctaccttagaccgcgacggcttcgccgctcctcggagagatagacttgctcatcacagggtgtgcgatgggcaacaataacaagcgcggctataacgacttctgctactactgcgaccgcaagttcgactgccagaacatcctctgccagcaccagaaggacgagcacttcacgtggcacgtatgacacaagaagctctccaccgtctctggaatggccatacacgtcctccaggtacacaagggagtctgtgaccaaggttcctaatgcaaagcctgatagggagtcaacggagatagagatatttggaatgcagggaattcctgcgcatgtattggctgctcattatggagaagaggaagacccttcaacaaaggtacccaaagtagaagtgcctcaggtaaggcctgttattatgcctaattcgctaggcatggcatttcctccgcgaccagcttatggggtggcacctccaatctataatcctgcactcaatcctttgatgggccggcct

SEQ ID NO: 4397 - DNA, 630 bp, Zea mays
  misc_feature (134)..(134): n is a, c, g, or t
  misc_feature (165)..(165): n is a, c, g, or t
  misc_feature (601)..(630): n is a, c, g, or t
  Peptide Sequence Number=SeqID_10461
  Probeset Number=SeqID_18800
acccaggaaacagttatcaccatgattacttatagcgcgcaattagccctccgtccaaggaacaaaaactaaaggttgagggacgcggacctcttattttttttttttttttttttttttttttttttaggggnctttttttttttttttttttagatgtagatnctcgacgcatggatttgctatggaaaatcccgaaacatgggaacagagggagacgtacgtacaacagcccgccgctgctcacaggcacactactagaccgacgatcgaacgcttcaacacacgacgaggatacaatttggcatcacaaaccgcgcacacccttgttattcatgcatggagccatgggctggtcgcgacgacgatcgacggcgacgccgcggcggccgctgggcgagtgagcgaatcagtggaagtgtgaggtgaagaagcagcggaggaggaagccggggaacctgccgccggcgacaccctcggtcctgcccaccctgccccaacctcgcccgcccgccgccacggggccccccacccctcgcggcccctgccgaactggccacgtcccgcgcctctcccgcccacccgcccccccggacccgannnnnnnnnnnnnnnnnnnnnnnnnnnnnn

SEQ ID NO: 4398 - DNA, 671 bp, Zea mays
  misc_feature (419)..(419): n is a, c, g, or t
  Probeset Number=SeqID_18801
ttttttttttttttttttttttttttttttttttttttttttttttttggagaaaaagatagaacccccccctagcctatataccccctcgcagggtttttttttataccaaggccaagcatctgctcgagcaagagggcacaaaaccgatcgccatttctcccggcccggcatccaaccagctatctaccggcgtcggcgagcatccaaaattagatccagagacgcacgccaggtcgacgaaggagccagagccacgcttccgcggaagaggccattgggggagcgcacggccagacacgttcacgtcgccgatccgcatcgctggcaagtccggcggtcaattgggcgccaccagtgcctgactttcacgtggccctgggcccactaccagtgacatacaggttgtcctttactcntgcctcgctcagctcagctccgctcttcctctaaatcctttacgcaattctgcactggagtccaaacgcaacccaggcgctgagcttgactgggttccgacccagattattacaattgttaattgttattaggttggggaattgccaaaaattagggttggttaaaacccggtttaacaaaatttgcggaaaagccctttctttatcgttcggaattcttttattcgttattctggacgcgtgctcgacccg

SEQ ID NO: 4399 - DNA, 480 bp, Zea mays
  Peptide Sequence Number=SeqID_10462
  Probeset Number=SeqID_18802
acagccgtcgccactctttctacccctttctctctcctcccttttccctagccaccgacgctccctgcatgctccagcccgacgcagccgccttaagccgagcagccgccacgcacccgagcacccctgctccgcgccctacagcgccagtccaccgccaagatagcgatctggccccaaccgcgactctgagcagccccaccgaggaccgcgcaccttgcgcccaggcgcccagccacccgatccaaccacgcccagcctgcgctaggccgccgagcgcccaggacttgagcacacgacccgaccgccccgacttccccgcagccgagccacaaaccgacgcccgagccgaccgttcttctctgctctgcgttattgggaccttcattgcgtccgtttctcccccattactcatgaaccgacgccattgatggtcgattgaagacaccggtcgtcgtttctctcccctctcgctctata

SEQ ID NO: 4400 - DNA, 433 bp, Zea mays
  Probeset Number=SeqID_18803
tttcatcatataatatttatttcatttcaaatcttcggcttgacagaaggtaaaagtcaaagtgtgacgcacgagtgaatacaagtcagcgtgaacagtacggtggtactgttcatctattcataggcacagagcatagcctgtgtaaaattacattcatgcccttcatgttgacaattgacttaaggacaatctatcccggccgggacaaccttttcccctttaagccggtttcattttccaccgctaagccgaagcttctccacacatagcttcagaactgattcatccttcttctgaaccacgcttttcatatcgtgtacagcttcatcccaatctctgaaggttcctatgaatatactacactgggaaaacatgtgagtcgtgttttaggggaccttcggaagacgaagcccccagcagtagcccctcg

SEQ ID NO: 4401 - DNA, 570 bp, Zea mays
  Peptide Sequence Number=SeqID_10463
  Probeset Number=SeqID_18804
gtcaaaccgctccggtgcgaggaggcgacaacatcttcttgctctgatccacctctcgtccaacccgctaggccgtcgctgccgagagcgagcagaggcctccctcctccgacgaaggaggaagatgctcacgaagtttgaaactaagagcaactgggtcaagggcttcgccttccactcgtgtcgtcgatggatccagtctagcctccacagcagcgtcattcagatgcgggactaccgcatgggcaccgtcctcaaccgcttcgatgagcacgacgagcccatcaggggcatccacttccatgccacatagtcgctctatgtccgaaggtagtatcgctccccttcctgactggatcgtactcctagcccactagcgtcggtcttgagcccgcacggaggtgacttcttagccgagtcagttgctctacgtctattgcttccctttctcaagttatttctagatacaaattggtctccttgttgatgacaatatgatgacggttatttcttagaaaaaagatttgttcatttctactccctgaaaaaaaataagctgaaatagcatgc

SEQ ID NO: 4402 - DNA, 538 bp, Zea mays
  Peptide Sequence Number=SeqID_10464
  Probeset Number=SeqID_18805
gccggccgggtccgggaacttcacgatccgaaccaacgactcgtcgacccattaccgtcaagatgccttccgaagtttccgacatcaagcagttcatcgagatctgcaggcgcaaggatgccaagtccgcctgcataaagaagaacaagaaggtcaacaacatcaagttcaaggtccgatgctcaaccaacctgtacacccttgtccttaaggacaccgacaaggccgagaagctcaagcagagtctgcctccgggtcttaccatctccgacgttggcaagaagaaccccaagggcaagcgcaccgcataaacggatcgaaaggcatgaggaactgaggacggaagtgtgcaaggacatcaatgcacgatgcgcacgaagcatgaaggcatgggcggacggcgtcacaacggataaaccttgttcaatgacactacggaacccttcacattgggttaccaccaggaatgaaaaatgtcaaactcctccccgaatcacgacttgtttcccccccgaaaaaaaaaaaaaaaaaagcggcc

SEQ ID NO: 4403 - DNA, 2747 bp, Zea mays
  misc_feature (1)..(30): n is a, c, g, or t
  misc_feature (2747)..(2747): n is a, c, g, or t
  Peptide Sequence Number=SeqID_10465
  Probeset Number=SeqID_18806
nnnnnnnnnnnnnnnnnnnnnnnnnnnnnnagcttcccttccccgtcgtctatccgcgtcagtttcgactttcgattcccctcgccctcgccgacggccagacgccgaacgtctcgccctctcccgacgctccccgcctcccccttgatccgccgagcgcggcggccgccgccgccgccgaacccgatctccccccctcccgcgtgacaggcacggcctcccctcggttggaagggtttgctgtatcatgcattttttgtggataatcttcattttctcttgagtcaccgattcttttgttgtcttcaaaatgtcgggcttgctgaactcaaaccttaatagttcggcatcaaatctttcagactcagctggaaggccatttacagcatccttttcgggtcaatctggatcaattccaggttttcatcattctggcttgcataacactcatggaagttacaatcttccgagtatgcctggatcacttgcacaaaaggaatgctgccatgagtggccttccgtcctctggggttcaacaacctggaggtagcattcctgggagattcccttcaaacaaccttccagttggcatgcctcagattcctcatgcacattcaggtgtcagtggtagagggatgaattttggcgcaggtccggcatttagtagcagcatgaatattggtggtaacatccaaggcttatcctcgggcttgggctccggtggtaatcgcaattctgttcatgggatgccagtatcttcatctataggaaactcgggtcaacggataagttctgtaggaaatatggtaagtgcaagcaatattggaagaaatataggcactggtggtttgtccgtgccaagtattgcatcacgaatcccacgggtccggtgtgctgtttattacgtatctgtttatcagagtgcatgtctcatccagcttttttaatctctgaaaccagcaactcctcagttgataaatatgcttggaagttcatatccaacatctggaggttcattatcacagagccaaattcaagcaggaaataattcttttagttctatggggatgttgcatgatgccagtgacactgctccatttgacataaatgattttccccaattgtctggtcgacctagttctgctggtggtccgcaaggacaatatggatcactgcgcaagcaaggagttggtgttaatacccttgtgcaacaaaaccaggaattcagcattcaaaatgaagacttcccggctttgcctggatataaaggtaacccttcggattataatgctatagagttgcatcacaaggaacaactccacgataatgtacctgtaattcaagcacagcagtatcctatggcaaggtcaggcttaggaagtagctacctacccaatcgacaacaacaccagcaaggtgctaattcagtccagaatggcggatcccacaatattttactgagaccacccagtcaaacttctagtttgggatcatatgatccatttctgcagcaataccagcagcctcagcctcaaaatcatttcagattgcagcagatgtcttcagctgcacattcatatcgggatcagattcaaaagattcaggcgggaccgacaccacctgatccatatggcttgttaggatttttgggtgttataaggatgaatgatgctgatttagcatctcttgctttaggaatagatttgacagcattgggtttgaacttgaactcgccagataatctatacaagacatttggctcaccctggtcgaatgacccagcaaaaggagatactgattttcgaattccagcttgttacctctttgacaaaactcctccactacagaccttactttttcagaggtttcacatagtaacactatttttcgtcttctatagcatgccaaaagatgaagctcagctgtactctgccaatgaactgtataatcggggatggttttaccataaagaagtgcacttatggctcaccagaatttcaaatgtggaacctctagtaaaaactcacctctatgaacgtggatcttactattgctttgacccagaatcctgggacacaatacgcaaggacaactttgttctccactatgagatggtagagaaaaggccagttctgccttcaacatcaccaaaccttagatgaaaagaaaatctaggacggggagaggaacaaagaaacatataacgatctgcaggaaggactaaggaggcaggaagtcgcagaacagaattggggatgtccaattaacaccccttgtaattactaaaactgtgagcgaatgttgcgtttttcttgcactccccccttcgccctcctaattaaactgcctaatgttcaggattagtttttctccagcttcaaaataacaacgcatagatggttttgatgttctgtcctctgtccaaccatatcatgtcgatgctcagcgaaagataaaatcataccatgtcgatgatcacaaaaaaaaaaaaaaaaaaaaaaaaaaaaaaaaaaaaaaaaaactcgagagggggcgccgggtaggggagaaggctaatcgatggtgaagatggaagagatgagagggttagggatagcaaatgggctagcgtaggtgcgaaggcggaaagggtgttaagagggcgaaagagtataggaagaaagggcaggagggcaagcgtaggaagggagaaccgttgtatggcgagtagaggagggagagaggacggaattattgcggtgtgcacn

SEQ ID NO: 4404 - DNA, 551 bp, Zea mays
  Peptide Sequence Number=SeqID_10466
  Probeset Number=SeqID_18807
ttccctattatcagcaacaacaattttttcctttcaaccacctatttaccttgaaccctgctgtttatttgcggcaccacctattccctttcagccggttaggttttgcctactttcatcaacaacaactttttccttttaaccaattggccgccctgaaccccgctgtttatttgcagcagcaaatttttctcccttttagccagctagttgcagcaagccgtgcttcttttttgacccagcaacagttgttgcctttttaccagcggtttggggctaaccccgcacccctttttcaattacaccaattgttgccctttgtccaccttgttttgacaaacccagcagcctcctcccaccaacccatcattgggggggccctcttttagattgctttttggttgtaattcaataataaagttttttggatgaggtatggggcccccccgaaataagaggttccttttcccgttttttaaaaaaaaaaaaaaaaaaaaaaaaaaaaaaaaaaaaaaaaaaaaaaaaaaaaaaaaaaaaaaaaagcttactcg

SEQ ID NO: 4405 - DNA, 439 bp, Zea mays
  Peptide Sequence Number=SeqID_10467
  Probeset Number=SeqID_18808
caccccaacttggtttaacttatccttagtcttgttgaccatcttccagcacatggtctttgtcccagagctcaatgctaaagactcattggataacattgataatgatataatatagataggtcatgacagatagatccggcagagtcaaccatgcccatgggtgccttacaactgattcaaacggaaagatcctggggctgctcccgagagagattcactcaactactacttgcatttttttacccccccgacagaccaaaacgaaacgaccctgctagtactactgatagatagtttggtccgacgacttcacgcaagagtcggccgagcgatacctttagaggggtactttggaggggtagggaagcggcgagaggcgacatgggactccgccggatccgacccgacagtggcgccgcgcctaacgcataataat

SEQ ID NO: 4406 - DNA, 373 bp, Zea mays
  Probeset Number=SeqID_18809
atcctctcctgtacaccggtatcgggtccgccatcgagtacgccgtgtgcgcgctcaaggtgcaggtccctcgtggtcattggccacagctgctgcggtggcatcagggcgctcctctccctccaggacgacgcacctgacaccttatttttttccgaaaaatggctaaaatacaaaaaattcggccgaagcgatcgagacagcacaactacgtagagtattcatcttccttggatatatcagtaccaagtaatcaacaatttaaagcaaattaagctacgtatagctcaataataagatggctctccttccaaaccaaagggttagtttaggaacatcattatttaaagggacttttattttctcaggtaaa

SEQ ID NO: 4407 - DNA, 490 bp, Zea mays
  Peptide Sequence Number=SeqID_10468
  Probeset Number=SeqID_18810
aacacaacaatattggttaaaaatctccactcattcattttgatatctctctctcttttaaatcaaaactccaaaaaagaactatggaacgtaactccctcttaacggttgcattgctctgcattgtcgtcgccggtgtcggtggccagtctcctgcctcctctccaactagctctcccgccgctccttctgctccaactacttcccctgccaaccctcccgccgacaccagttcccgagagctctccaccgtctccttcacccaaggcttccgctccggtgagctctccaccggctccaacaccagaagcagttactcctcctgctccagtagccgctccagccgctgatgtaccggctccggctccaaaaaaagcataagaagtccaagaagcatcaagcaccggccccggctcctgaacttgacagtccacctgcaccaccgacagaagcttcccgggcctaggttccgaagaagcaaggtgctccg

SEQ ID NO: 4408 - DNA, 593 bp, Zea mays
  misc_feature (113)..(113): n is a, c, g, or t
  misc_feature (124)..(126): n is a, c, g, or t
  misc_feature (164)..(164): n is a, c, g, or t
  misc_feature (181)..(181): n is a, c, g, or t
  misc_feature (188)..(189): n is a, c, g, or t
  misc_feature (198)..(198): n is a, c, g, or t
  misc_feature (202)..(202): n is a, c, g, or t
  misc_feature (209)..(210): n is a, c, g, or t
  misc_feature (225)..(226): n is a, c, g, or t
  misc_feature (228)..(228): n is a, c, g, or t
  misc_feature (236)..(237): n is a, c, g, or t
  misc_feature (252)..(252): n is a, c, g, or t
  misc_feature (264)..(264): n is a, c, g, or t
  misc_feature (266)..(266): n is a, c, g, or t
  misc_feature (281)..(281): n is a, c, g, or t
  misc_feature (303)..(303): n is a, c, g, or t
  misc_feature (344)..(344): n is a, c, g, or t
  misc_feature (359)..(359): n is a, c, g, or t
  misc_feature (411)..(411): n is a, c, g, or t
  misc_feature (449)..(449): n is a, c, g, or t
  misc_feature (455)..(455): n is a, c, g, or t
  misc_feature (457)..(457): n is a, c, g, or t
  misc_feature (463)..(463): n is a, c, g, or t
  misc_feature (467)..(468): n is a, c, g, or t
  misc_feature (470)..(470): n is a, c, g, or t
  misc_feature (477)..(478): n is a, c, g, or t
  misc_feature (481)..(481): n is a, c, g, or t
  misc_feature (492)..(492): n is a, c, g, or t
  misc_feature (501)..(501): n is a, c, g, or t
  misc_feature (513)..(513): n is a, c, g, or t
  misc_feature (519)..(519): n is a, c, g, or t
  misc_feature (522)..(522): n is a, c, g, or t
  misc_feature (557)..(557): n is a, c, g, or t
  misc_feature (561)..(561): n is a, c, g, or t
  misc_feature (563)..(563): n is a, c, g, or t
  misc_feature (574)..(574): n is a, c, g, or t
  misc_feature (579)..(582): n is a, c, g, or t
  Probeset Number=SeqID_18811
aagctggagctccccgcggtggcggccgctctagaactagtggatcccccgggctgcaggagagagagagagctcactagtcccccccccccccccccctcccccgcctttgntagggcagggnnngaaaagattaaagaggggatttgatgctattggcttcnaatgccctgattaccantacccgnngcgagggcnagangaacagnngaagattgccgtttnngncaccctcnntgagccgaagagcanaaaggggaaggntntgacccaccggccgngttatattaaactggatgtagnatctaaatttggcgtaaagtcctctttagctaccgaagcangaacaaactgttccnaatgcagagcgctgaagagacgattgtagtgccgaaggtgcctacagtcganccaaccttatctaaagatgataatgcctaacagctacngtcggncnaaacantgannangccagannttntgagcccttcnacggaggcnaaactgacgaangtacanatngcttctgccgcgactcccaagaggagaagagtggncatngngctgtacgccntgctnnnnactaccaaagg

SEQ ID NO: 4409 - DNA, 600 bp, Zea mays
  misc_feature (527)..(534): n is a, c, g, or t
  Peptide Sequence Number=SeqID_10469
  Probeset Number=SeqID_18812
ataaaataaactgatttatgtaaaatctttttgtctttcaaacagacactcaataaataaataaatgacaaattaagcttacaggaagagtatatatgtatatgtatatgaatctaattgtggtattgtgcgccgccattgtcttgtcactcatggttccttgaacataactttgtccgtaggatgaatcagagaacgaatacgagtcggtagaaaagaacacggttctacattaaacaaccttgcaatccaagctggtctcgttatatataccattgggatgctcgattgacgccgggtactgagtgcgagctgaccatgcctttgagacttcaagtgggcaacgtttctcgcctctcagcgcaaaaagatagatcctctgctctaccggcctaccacgttcgtctcccgcgccggccacccaccgctgccaccgagggtaaaaccgtcaacccgccttgccccggcgcctataagaagttccctctccatttcttcaaactttagttccagagccctccagagcnnnnnnnntatattatcgaatactaaagcattttcctcgtcgatagaatatagaattttaaaaagggagcgaaa

SEQ ID NO: 4410 - DNA, 1049 bp, Zea mays
  misc_feature (1)..(1): n is a, c, g, or t
  Peptide Sequence Number=SeqID_10481
  Probeset Number=SeqID_18813
nagcttatggagtatcatatatatagacgcgcctgcagatcacaggaggatcgaacccatgcatgccgctcgagtgaccatgcattttccatgctccagattgcgggtgtacgtgttccacgcacagcagacagcaccctcaatgcaaggaattaattaacctttatctaccctgcaaactactccatgtacggtctcttagccatgtctggaggagataagctcgtagcagcaatcaacgacatgcacacggatagatcagctatcacaatagatcgaccacaagatcgagtctctctctcccacgaacaacaacgacggttccggaattagccagctaattaattaaagttcactagtatatctcacgtttctctggatcactcaaaacctcataggcttgtgcgagctccttgaacttctcggggtcaccgcccttgtcggggtggttcttgacacacggatagatcagctatcacaatcgatcgaccacaaaatcgagtctgtgtatcccacgaacaacaacgacggttccggaattagccagctaattaattaaagttcactagtatatcttgcctccggcggtgccgccgccgctcgccgatgtggggtacgacctcgccgccgccgccgccgctcctgcgggggagtggggtggggaggagcagtagcggaggggaagggaggcggcggtcaaagctggtcacgtttctctggatcactcaaaacctcataggcttgtgcgagctccttgaacttctcggggtcaccgcccttgtcggggtggttcttgatagcagccttgcggtaggccttcttgagatcgtcctgggacgccgacttgggcaccccgaggatctcgtagtacttggtgttgtcgctcttcttcggcgcgcgcccgaacatcttgcctttgcctccggcggtgccgccgccgctcgccgatgtggggtacgacctcgccgccgccgccgccgctcctgcgggggagtggggtggggaggagcagtagcggaggggaagggaggcggcggtcaaagctggtg

SEQ ID NO: 4411 - DNA, 590 bp, Zea mays
  Peptide Sequence Number=SeqID_10482
  Probeset Number=SeqID_18814
gaatagttttaaattcggggggggccccttttttttttttttttttttttttttttttttttttttttttttttttttttttttttttttttttttttttttcctctttttttttttttttttttattaaaggagcaccatcctttattatcaagtattcggtgtcgacaaaacagaagacggcatgagtggacagagttttttccgaccatccatttcttgagggggggccattgcaggcccttgggtgtcttatgagggagggctcggtttatttcagttggctttgcagaatactgataactagaaaaagtagtaggacctcaccttcgtgtattatgatgatgcacatacaattttctgagtagaatggatgttgaatcatagaactaatgaataatatgaacactcgccttcgccccaaaaaaatatgaaaacgggaccctgattgagaacatgataaaagaaggaaaagatgtcgctcggcaagtgactatgaagctagttcacgaagccatgattgcaaagtaaaaatgacttatttctggatcgccggaattacattgaatgaacgggaatttaaataattg

SEQ ID NO: 4412 - DNA, 751 bp, Zea mays
  Probeset Number=SeqID_18815
aattgtttatatcttgcggactctgcatcagtcaagccaacgtatatccgggatgacgacccatctgatttctcattctacttcgacaccggaggaagacgaagatgctatctagcacctgaaagattctacgaacacggtggtgagtcccaagttgcagcggatgcacctagtgaaccatctatgtggcatggcacacttgggtatctttgggcaaccttgatccttgtcgtcgactgaatggcactaatatttccagcagcgtgtccttggatgtcataaagactccttttcttttggcaaatcactatattctggttttgctctacatgcatctgctgcaaatagctccttttatgatggcttatctaaaggaataccatcatattctttttgtattgataaccggggtttaggagaaacacacatggtccctgattcatcagtgtataaagcttcgataaggctaccttggttggaaccgaatcgtcctggcatgcagactagagatgatcatttcagtagcaagcggcgagatttaagcatcaatgactctttgaagagcaattcttctttgcaaggggatagcatttcaaactctgatactggaggattgccgttctccagatcagcagtgaacctggagactggatggaagcctcgaggaattctagtggcacatctccaggaacatcgcttttctgtcaatgacattgccgtgtcgaatgacaataccttttttgtgactgct

SEQ ID NO: 4413 - DNA, 459 bp, Zea mays
  Peptide Sequence Number=SeqID_10483
  Probeset Number=SeqID_18816
agttttgctgaggaacacggagcagcagcatcagactctgaaggagagtgcagacggtgttttgatgttttgtgaacaaccctaacttatgtggtcctggcaccacaaaaccttgtcctgatgctcctcccttttctccacctcctccatacaaccctacaaccccgatgcaatcaccaggaagtagctcttccactactggagcaattgttggtggagtggctgctggcgcagccttgctatttgctgttcctgctatcagttttgcctattggcggcacaggaaaccacaagagcaagcatttttttcaatgtatctggcttcaaagttagtctttgattattatctttctcgcaacataagggcaaacaatgtttatatgtagcaaacaaatacggtttgcaaacgttttaggaacatgtttttacaataaagatatacttatagtttcaccaaaa

SEQ ID NO: 4414 - DNA, 549 bp, Zea mays
  Probeset Number=SeqID_18817
ccctgcaaacctggcttccagctagctctaatctcccacctgtgttccattagctattatttgatcgatcttccaattgcatcctttctgcagggaggaagtgtacctcctgcttttaattctcggatgtcagcacttcctcatgaaccagctggcttctacaatgatcgtggtgcttcagtggacatacctcttgattcaacgaaggacctaagtaaaaaggagaaagaactgcaggcaaaggaagctgagctaaacaaacgggaaagggtaattcaggatcccttccagcattgttgcctgaccaggtccgaaagctaaagcaactcagtgtgctaactctggcagagtcaactaagatactaccatatgatcagctcatgcaagagttggatgtttccaacgtaagagaactcgaagattttctaatcaatgagtgcatgtattcaggcattgtcagaggcaaactagatcagctgagaagatgctttgaagtacaatttgcagctggaagagatcttacacctgatcagctaaacaacatgatag

SEQ ID NO: 4415 - DNA, 954 bp, Zea mays
  misc_feature (686)..(686): n is a, c, g, or t
  Peptide Sequence Number=SeqID_10484
  Probeset Number=SeqID_18818
cagagcgagcgaaaggaagccacgacagcaagggaggaggagaggcagccgtcgccgacactgatcccccgagcggattagagaactcgcctccatcgaagatctgaatcccctcctcctgctttcggaactcggatcattccttccttcattcccgatcgatgcggatacagcctcctccggatccgcggatctagccttctgtgctgctgcagcagctgccgctgctcgattgattggcgggggagatgaggttctggagggacggcggcgcgagcgggagcgggcgggacctcaacggcgggatgccctacggccaggtgcgcgtcctcgtcgtcggcgattcaggtgtggggaaatcttcattggcacgtctcattcttcatggttctgcgattgctcgaccgacccaaacaattggatgtacagttgatgtaaaacatattacttacggaagcccagggagttcatctaatagcgtcgtcggtgatgctgaaaggaacttctttgttgagctttggaatgtttcagggcacgatcgctacagagattgccgttcacttttttattcacaaattaatggtgtcatatttgtttatgacctatctcagaggaagacaaagacaaatttgagcaagtgggcagttgaggttgctgagtctgggaccttttcagctcctcttggngtctggtggtcccggtggccttccagttccttacctagttattgccaacaaagtggatattgctccaagagatggtagaagagtgagcagtggtaatcttgttgatgttgctcgtcaatgggttgaaaaacaaggtctgcttccatccagtgaagtgcttccacttgcagataactttcctggcaattctggtttgctcacggtaaagcttctctatagtctatgtaccaatatttgctgtctgatgtcttgctttaactgactgcag

SEQ ID NO: 4416 - DNA, 540 bp, Zea mays
  Peptide Sequence Number=SeqID_10485
  Probeset Number=SeqID_18819
gccgatgcgcgcgttcgtcaccgaggagggcgccggcgcatacaagacggtggtgcagtggggcgacacggcggacacggccgggtcctggggcaggcccatgggcacgttcggctccgccacgttcgccgtcaactccatgttcttcgtggccaagaacatcaccttcaagcagaacacggcccctgtgccgcggcccggcgctctgggcaagcagggggtggcgctgcggatatcggcggacaacgcggcgttcgtggggtgcaacttcctgggcgcgcaggacacgctgtacgaccacctcggccgccactactaccgcgactgctacatcgagggctccgtcgacttcatcttcggcaacgcgctctccctctacgaggcgtgtaggttgtataggacacaggcactgttaaacccgggagcacccgcccattctgggactgggacaagacgccattccgcggcggcgggttcactgcatcacgtcctcccgtgctctgccctcccctctccgtttggactgatcttgggactggc

SEQ ID NO: 4417 - DNA, 267 bp, Zea mays
  Peptide Sequence Number=SeqID_10486
  Probeset Number=SeqID_18820
ctgcagccgcagcaggagtacgtacgtgtgcgcgcctgcgcggtaacaaaaaagctgtcaacaacctgtcttttttggcagggtaaaatcatgccaaatggcacaagagatagtacactggaacttcttctgggtgataatggatgggttgcccattatgaaaatggcatctgctattcacttgatgcaacaaaatgcatgttttcttctggtaatcgttcagagaaacttcgcatgggacagctaaactgcaggtcgactctaaag

SEQ ID NO: 4418 - DNA, 704 bp, Zea mays
  misc_feature (704)..(704): n is a, c, g, or t
  Peptide Sequence Number=SeqID_10487
  Probeset Number=SeqID_18821
ccggccgggactccgcgcccggccgcctttgcctgccttcccacttcccatctcctctggtcttccgccatggcccagcccgtattcctctcctctctccgctcccgcctctgctccgcgccgccgtcgccgcaccatcacctccagcccagccgcggctaccacgtcgagctcggcgctcgcgagaaaacgcttttggaggaggatgttgctttgaagaggttcaaatcatacaagaacagtgtgaaacaggtctccaagattgggaatgttctcactttagctgttgtatttggttgtagctacgagcttggtttgttggcggcaagcatgaagtgaaggaaaacacagtcattattccgggaagtgatccatcagcgtagactgtcattctatcagctcgtgtttttagcctgtctgtctcttttattttgtcgtgcaccatgtataaaataaaactaaactaggttaaccttgatttgcgaataacgttttctgtttctaaaaaaaaaaaaaaaaaagcggctagtgccctctctgttattatggcctagttgcaaacaaagtgacagaaacattcattccgtggtgaatcatgaagaatgagcgccgactgctttctttaccacctgcgagtgtatcctgctgcacattgtaacagacgtgcatttactgaactaagtttaatactatcaccgttcttn

SEQ ID NO: 4419 - DNA, 534 bp, Zea mays
  Peptide Sequence Number=SeqID_10488
  Probeset Number=SeqID_18822
cggccgtgggtcggcctctctctctctctcactctcttttttctccggacacgctcgttcgttcgtgaaggcgccccttcctgccctcacatccgctcctccctccccggcaccgaccgaccccctcgtccgctcggctccctccccgatccccgccgccatggccgccgccgccgccgcgtcctcctcttcctcctccgaggttccgatcgccgcccgcacctgcgtctccgtcggcgaggtggcggtgggagcggtggctacaagcagcggcgaccgggtggcggcggattgcggggtgtgcgccatctgcctcgacaggatagcgctccaggagacggccctcgtcaagggttgcgaccacgcctactggttcgctgatatcccttaccccctacccctttctccagatgattacagcataacgtactttgatgcgcggtggaattacgattctttgtctaggttgttggttattccccacctccaatagcaatttaatccctagatttgggagactacacgccccccgcc

SEQ ID NO: 4420 - DNA, 469 bp, Zea mays
  Peptide Sequence Number=SeqID_10489
  Probeset Number=SeqID_18823
gaattcggcacgaggttgagagcagcatatgaaaaataaagagagagagagaggatcgagtgacgatggagggtatggggcacctgctgctgttcgccttcctcttctggttctccaccttcatggtcgccccggtgatgaccgacgtcaccatggcggctctctgccccggccgcgacgagtgctccctcgccatctacctcaccgggctccagcaggcggtaacatatataagctacctacctggctcatagctagcgccgacgtctcttcatccttctcctccctggtagctgctttccccaaattcactgcgtcgtctgcatgcttgctcactgctgcgtcgtcgtgcgtgcccgtgcatgcatgcgcctatttttggtttggtttggtttccttcctcttcaataatggctttaataactagtgcactagttcaacggttcaacctaaaaaaaaaaaaaaaaaa

SEQ ID NO: 4421 - DNA, 579 bp, Zea mays
  Peptide Sequence Number=SeqID_10490
  Probeset Number=SeqID_18824
caatcacaaagcaaaatgtgccttctattttaaagaggtcctgactttcgatagtttaatcgcagcacggttgcatgtaacgcttaattgcacgtcagcttttgcctttggattagaattcctaatccttttcttttaaatagagttcgcatgtttacaataccaagcacttctacagcaaccacatgtaacttgaaaaagaagtattcttgcaatattgctgctccaaaatatcgattgtttctgggacctaggggacatcaggaacaagaaatggctattcccgcttgtcctcctcagcctcatcttctaagccgaaagcactgccgacaccagcattttctgtccttgtcaatttttaccatccctacttcaccatctcctttcgtcagagattgagattcctcatcgcaaagatatgcatattctggtgaagctgctgacgatgacgatgaggaatctcaatctctgacgaaaggagatggtgaagtagggatggtaaaaattgacaaggacagaaatgctggtgtcagcagtgctttcggcttagaagatgaggctgaggaggacaagcgggaa

SEQ ID NO: 4422 - DNA, 1321 bp, Zea mays
  misc_feature (1)..(6): n is a, c, g, or t
  misc_feature (1321)..(1321): n is a, c, g, or t
  Peptide Sequence Number=SeqID_10491
  Probeset Number=SeqID_18825
nnnnnncccacaacgctacgggcagggcagacaatccgcatcgatccccaccgcaaattgcccctatctatccctccctacaaatcgaaacaaagaaagaaaaaatcgagaggacgccagggccgattctctgcgtgacttggggcgtcgtcgccgagttttctccggccgagggcggcgcgaccggacaaccagcgtgagcgcgaccggcgacatgactcatatccttcccaaaccccgattatggatctgcgcatagggaaactcttgctctaatccatcttttgcttgtatacgatctcgatctgtttcgttgtttcgattccctgttcctccttccttaacttgcgcgcacgcggcaaccagcgtgaccgcgaccgtgagcgcgcggcggcgcggaagcccaacgccaagaactcccaggacgggctcaccccggagcagcgccgcgagagggacaagaaagctctggaggagaaggcggccaagaaggcgcagcaggcagcggccggcggcaccggtacctccacggacaacaacaagaacaaggcaggtggcaagaagtaggaggcagtggcgcgccgccacctctgtacgattaatcgatgccttgagcttgtaacttgttcgcatccttgtaggtgcgatgcttgttgggtcataaactctgatgatatcgagatttggtgatcagaataatgcgtggttttctggcctacgtggtgttctggttttgtgggttaaaaaaaaaaaaaaaaaaaaaaagaccagcagcggctcatctttgctgggaagcagcttgaggacgggcgcacgcttgccgactacaacatccagaaggagagcaccctccacttggtgctgcgcctcaggggaggcatgcagatcttcgtgaagaccctgaccggcaagactatcaccctcgaggtggagtcttcagacaccatcgacaacgtcaaggccaagatccaggacaaggagggcattcccccagaccagcagcggctcatctttgctggaaagcagcttgaggacgggcgcacgcttgccgactacaacatccagaaggagagcaccctccacttggtgctgcgcctcaggggaggcatgcagatcttcgtgaagaccctgaccggcaagactatcaccctcgaggtggagtcttcagacaccatcgacaatgtcaaggccaagatccaggacaaggagggcatcccaccggaccagcagcgtttgatcttcgctggcaagcagctggaggatggccgcacccttgcggattacaacatccagaaggagagcaccctccacctggtgctcn

SEQ ID NO: 4423 - DNA, 659 bp, Zea mays
  misc_feature (601)..(659): n is a, c, g, or t
  Peptide Sequence Number=SeqID_10492
  Probeset Number=SeqID_18826
tgaataaatgcatttattcatcactggttcatatattacaaatcaccaaatccgagcggtagctctcctaattaacgagacgtaagcacgacgggttgatctgtcttgtcccataccctttctaccactcaacaactgggccacccaccttagcgacccactccataccactacccaggcaacggatcctcttaagcccgccattgcttccctccgtcaagcggggttaacatcctctctctcccaccatctcaaaacgagacgccccccgacgggttgatccttccccaggctggcgtagttgggagttaattaccgcacggacaccctcttccaagatggacggggcggtaaggtggcgggcttacccccaccctcccaacccgtcaaaacggggggggggggggttccccctcagggggggggcccaattgccaagcggccccttgccgggggctgtggctttttcgctgaaacaggaaggccatggcgaggcgccccttgtccgccaggtgcagccgctccttttggcccccaggcaggtcccccggtcccggcgttgcttttcgccacggtgggcggttttccccgtaaaggtttnnnnnnnnnnnnnnnnnnnnnnnnnnnnnnnnnnnnnnnnnnnnnnnnnnnnnnnnnnn

SEQ ID NO: 4424 - DNA, 805 bp, Zea mays
  misc_feature (1)..(24): n is a, c, g, or t
  misc_feature (805)..(805): n is a, c, g, or t
  Probeset Number=SeqID_18827
nnnnnnnnnnnnnnnnnnnnnnnnaccccaagttgccttcacacctctctgcctgccttccaccgcactgcgctgcacttccttccttccttcccgtctcttctcttcccccttccttccacttcttggccctgctcctgttggttttagcatcctgctcggccgaatgctggatcagaggttgcagcaaaggtagtaagtcgcttctcgtatttcccgttgagagagggacaggtggggagaacggataacccaaccgagacgctgcaagttccccacggccggggcgggcttctcttgcgggaacatgaggaagctgctgttcatctccttcatcctctcgctgtccgctgcagcagttcacggtgaagacggcgcgtacattggcgtgaacattggcacggccatgtcgtcggtgccagcgccgacgcagatcaccacgctgctccggtcgcagaacatccgccacgtgcgcctctacgacgcggacccggcgatgctggcggcgctgtccaacaccggcatccgcgtcatcgtgtccgtgcccaacgagcagctgctggccatcggcaactcgaacgcgacggcggccaactgggtggcgcgcaacgtggccgcgcacttccccgccgtgaacatcacggccatcgccgtggggtccgaggtgctctcggcgcagccgagcgcggcgccgctgctcatgcccgccatgcgctacctccagaacgcgctggtggccgcggcgctggaccggtacatcaaggtctcgacgccgcacttcgtcgtcatcatcctcgactcgttn

SEQ ID NO: 4425 - DNA, 400 bp, Zea mays
  Peptide Sequence Number=SeqID_10493
  Probeset Number=SeqID_18828
cgtgccgaattcggcacgagggtttccttccttttcgctgggggcgactcgtccgtttcttttttctgacagcaatgaaatcccattcttatgttaattacagtcttacgtcagggaggagaaagcagagggacccatccacagcagaagcagatggaagcactggagcagcaccaggcaagagatcgcattcacctcgcatggcgccaaccacagcgaaacaagagaggagagggggccacaacaactcactagactaccggacaggaaagaaccaaagctgctgcattcaagtgccaggtgccaaccgggacacggtggacgcatgctggtcctgggctcgagagctggaacggtagccagggggctggctccgattctagccttgttagggcggggc

SEQ ID NO: 4426 - DNA, 600 bp, Zea mays
  Peptide Sequence Number=SeqID_10494
  Probeset Number=SeqID_18829
ctaccagcgggcggccgagcaacgccgagagagctggcatgaagcgaatctaccttttcatacgacttaccatcccacacataggtctgtctacatgtcactatctcccgatccaattgaaaacataccacagagtgcggtgtacacacaagctgtaaagaggggctgctactgctattagatagcgaagcgaaggaagtccaatgctatctagtaattgttctacctacctacctactattggatttgaaccaatgactcccgccgtatgaaagcaatactctaaccactgagttaagtagagcaatttatcaccacaaaagaagccccattacttcgatcgattatagattgaatacttttaataaagcagtaccgatccattattggtatgtttatgttatatagtaaacggatcaaagggatatcctctggcattagagaatattcatcttgacaagaaattatctatatgttaagatatctctgacaagggctatagctcagttcggtagagcaactcgtttacacgtgcgccaatgcttttcaagggaacctttttatgcaatgaacataattgaccttgttgcaaaatcaatg

SEQ ID NO: 4427 - DNA, 544 bp, Zea mays
  Probeset Number=SeqID_18830
ccgggcaacacgccctctagctccctaactgcctccgccgccacaccaccccgaccggacccggcggcgcaatggccaccgtcctgggcagcccccgcgcgtgggccttcttcttttcttcgtcctccctccgcgccgcgccggcgcctaccgcggtggcgctgcctgcggccaaggcgggcatcttgggccgtaccgccagcaggatgagcaggctgcgcgcgcaggccacctaccccgtgaagctgatcgcgccggagggggaggtggagctgcaggtgcccgacgacgtgcacatcctggaccagggcgaggaggacgacatcgacctgccctactcctgccgcgcggcgtcctgctcatcctgcgacaactctgtcgacagcatgatccagtgattgcttgatgagaagatccgtcctgaaaataagcacaaccatttgggaacaccagattttgccgaattttcctttccttttgatgaatatttgagcacgcccatgtcaataccaaacatctggccttttcttaaaaaaaataaaaa

SEQ ID NO: 4428 - DNA, 556 bp, Zea mays
  Peptide Sequence Number=SeqID_10495
  Probeset Number=SeqID_18831
gcgtcaagtctaggtgcaaaaaagcgggaaacaaagcgaagttggggcggcgagacgcgagacgcgagacgcgagaaatggcggagccgcctttggccgccggctgcacgacaaactggaggagggaggcggatgagcggctgcggcgcctccactccctcctcttcggcgccgacgccgcactcgagcacggggacgccacggcggcgcaggcgctcgcgctccgcctcctcggtttcctcgactctcaggcgctagccgcaggtgctctcccccccgccccttccccccctattcgcccggttggtgcggacggccaccgctggggccagatagcccccccccgccggtcccggtttgcccccccgccgctccatacccccccagacgccgccaccacgcctgtccccccccgcccccccccccaaaaatagaaatataccgaccccccgccgccggccgccctttttgagccgacgccccccccgtccccccgtccccttccccgcccctttttttcccccggggaccgaaacggcgggcgccgccccccctc

SEQ ID NO: 4429 - DNA, 2687 bp, Zea mays
  misc_feature (1)..(13): n is a, c, g, or t
  misc_feature (953)..(953): n is a, c, g, or t
  Probeset Number=SeqID_18832
nnnnnnnnnnnnngcgatatgtcaaagaagccgacaaggatatcatcaatgctgttaaggataaaggaagactcattagtaaagggagtattgagcactcttatccattttgttggcgatcgggcactcctcttatttatcgggctgttccaagctggtttgtcaaggttgagaagattaaagaccagttgctggaatgtaacaaggagacttactgggtgcctgactatgttaaggaaaatagatttcacaactggcttgaaggtgctcgtgattgggctgttagcagaagtagattctggggtactccacttccactgtggataagtcaagatggtgaagaaattgttgttatggattctatagagaagcttgaaaaattatctggagtcaaggtcactgatcttcaccgacactatgttgatgatattacaattccctctaagagaggacctgagtttggggtgctcaaacgtgttgatgatgttttcgactgctggttcgagagtgggtcaatgccatatgcctacattcactatccatttgagaatcgggaactatttgaaaagaactttcctggcaattttgtggcagagggtttagatcaaacccgtggatggttctatactctgatggttctctcaacagcactgtttgggaagcctgcatttaagaatcttatatgcaatgggcttgtcttggctgaggatggtaagaaaatgagcaagagtaaaaagaactatcctccacccaaggatctcattgatgagtttggagcggatgctctgcgactatatttggtaaactccccagttgtacgtgcagagtctctacgattcaaacgtactggtgtctttgctgttgtgaaagatgtcttcctcccatggtataacgcgtacagattctttgtccaaaatgcaaagagactggaagtcgagggtcttgtctcattntctccgatggaacaagcggtacttctgaagtcatccaatgtgttggatcactggataaactcagcaactgaaagtctagttagctttgttcaccaggagatggatgcatatcggctttacacggttgtgccgtatttggtaaaatacattgactatcttactaacatatatgtgcgtttgaaccgcaaacggttcaaagggcgtactggagaagaagactgcagaatttctctttcaacactctaccatgttcttgtaacaacttgcgtggtgatggctccatttacaccattctttactgaagttctttatcaaaatttgcggaaggtatcaagtaattctgaggagagcatccacttttgcaagttcccttccacaactggcgagagagatgagcgtgttgagcaaagtgtaaggaggatggtgaccataattgatcttgcacgtaatattcgtgagcggcataacaaagctctcaaaacaccactcaaggaaatggtggttgtgcatccagacaatgacttccttgaagacatcactggcaaactaaaggagtatgtcatggaggaaatcaatgttaagaatgtcactccatgtaatgaccccttgatgtatgcttctctgcgagccgagcctaatttcagcgtgctaggaaaaagacttggaaaagacatgggaaaagtatcaaatgtggtgaagaagatgactcatgagcagatcttagcttttgaaaaaagtggagagttctcattcttcgggcattgctttagtcattttagatctacgagctgaccagtcattgtttgaagctggagtggctcgagaggttgtgaacaggatccaaaaattacggaagactgctcagcttgaacctgctgatccagttgatgtgtattacgaatctgtgggcagtgacaaaaacacactggaagagattttgaagtcacaggataagtatattagggacgcacttggttcgccaattatgcccaagtaatggcaccaacagatgatgtaatacttggcgaggagtctaaccatgtacatgacatgtcatttgtcatatgcattgcaaggtccacccctattcttgcaccagatcttctttctcatgcctcaggcaaaagcaatcatgtggaggcgttgagagtatatgttctggcaaagacactttcgattttgtaaaaccagttccaagctggaaaggtcatgaatccagctgaaagggcaggaacccgattgattgcttcgatggttatcaatcgatcactttaacgccagtaaaacatgggttcctgattgccaggggatttttatctggctagtcgatcctagtttcgtttgaagcatcccaattttgactagtgcgcccattgttttgccgcaatcagcttaaacagcttggttccatttatgtatctccccaaagtcatgtattcccgctcatcagtaaaggtgaaagtctcaaatgtatgctaatatgctatagcatgatattaaagcgttctgggttgtttattattagagtgaaacctgtagtcgctgagcttgtctcccattcttaagttatggagctggtttgcgggcaccaatcagacacacccatttcaaggttttcttagttttcactaaaattatggttcatcattggtggggggtgactacatttactttatttcatgtagtatgtgatgggggaagacaatgttaagaatgtcactccatgtcatgacc

SEQ ID NO: 4430 - DNA, 648 bp, Zea mays
  misc_feature (1)..(16): n is a, c, g, or t
  misc_feature (127)..(127): n is a, c, g, or t
  misc_feature (141)..(142): n is a, c, g, or t
  misc_feature (144)..(144): n is a, c, g, or t
  misc_feature (147)..(147): n is a, c, g, or t
  misc_feature (180)..(180): n is a, c, g, or t
  misc_feature (254)..(255): n is a, c, g, or t
  misc_feature (648)..(648): n is a, c, g, or t
  Peptide Sequence Number=SeqID_10496
  Probeset Number=SeqID_18833
nnnnnnnnnnnnnnnnatccctcccggctcccgtgctctctctctctctctcggatccgaatggccagcgcaccagtcgagctcgcgggacctcgccggcaccggcgatggcctccgccctactggnccggacagggcggnntntcnccaccgcgcttgtccgtcttctattccacgcantaggcggaaagactctgcccgcagcctcaccctgcactgcagccagcgacggcgcgagtccttgcgtgcgtctnncaccgtcccaccctcacgcgaagctctaatcaaacctctctcgtctttctccggccgggaaaagatccagacggcagcggcaccgcgccatctatttttgtggggtacctgcacggctgcacgcctgcacgcaggcatgacagacgatggtgccgaaagaggcgccatggctgcctaactcgtcgcagtcgttcatcggggtcaactacgggacgatcgcggacaacctgccgccgccggcgtcgacggccagcctcctcatgtcgacgtccatcgccaagctccgcctgtacgagccacagccggacctggtcgcggcgctcgcgggctccaacatctccatcctgctgggcatacccaacggcgccgtcccgaacctcgcgtcctccccgn

SEQ ID NO: 4431 - DNA, 1444 bp, Zea mays
  misc_feature (742)..(742): n is a, c, g, or t
  Peptide Sequence Number=SeqID_10497
  Probeset Number=SeqID_18834
cctcgaggtctcgtgccgggttttgatttcaccgcatacatggataacccgttactatgtggctctcactgcccaataactgtgggactgggactgggatgaagcaccggaaacgattgcgtgtgcctgtcataatcgccattgttgctgcagccctgatacttgttggaatatgcattgtttgcgcgttaaacatcaaggcttacacacgtaagggcacagatggggacgggaaggaagaggaagaggttcttgtgtccgagagcacccctccagctgcctctccaggctcgaatgcaatcatcgggaaactggtgcttttcagcaagagcttgccttcaaggtatgaagactgggaaactgggaccaaggcgctacttgataaagactgtctcatcggtggtgggtcgattggtacggtgtacaaggccacttttgagaacggcctgtccattgctgtgaagaaactggagacagtagggagggtgagaggccaggatgagttcgagcatcagatgagccagcttggtaatctcagccaccccaacctggtcgcttttcagggctactactggtcatcctcgatgcgggtgcttctgtcagaattcatggccaacgggagcttgtacgaccacctccacggctaccgtcctcctcctcgcgctctctctgagagcagcagcagcagcagaggtggtggaggtgaactgttctgggaacggaggttcaacattgcgctcgngacagcccgtgcactcgcttaccttcaccatgattgctggccacagatcctgcacctcaacatcaagtcctccaacatcatgttagatgggagatacgaagctagactgtctgactacgggttggggaagctgctgccgatactaggaagcattgagctgagcagaactcacaccgcaatcgggtacattgcgccggagctggcatctccgacactgggatatagcgacaagagtgacgtgtttagctttggggtggttttgcttgagatcgtgacggggaggaaacctgtagacagccctgggataggagctacagctgtggttctccgtgactacgtgagagggatattggaggacggaactgcgtcggactgcttcgatcgaagcctgagggggtttgtcgaagctgagctggttcaagtgctccaactgggcctggtgtgcccttccaacaccccgtcaagccgacctagcatggcagaagtggtacagttcttggagtccgttagggttagctcttgaccttctgctggcgggacatagcagcagaatttggatgtttacagggaaaggatttttttatttttccacaaatgaaggtccccttctctttttttttaaaatttgggtctttactgtggcgcagcttcctttgtaaattggatttaaatttgttactgaataagtgattgttttggtcc

SEQ ID NO: 4432 - DNA, 1252 bp, Zea mays
  misc_feature (1)..(49): n is a, c, g, or t
  misc_feature (1250)..(1252): n is a, c, g, or t
  Peptide Sequence Number=SeqID_10498
  Probeset Number=SeqID_18835
nnnnnnnnnnnnnnnnnnnnnnnnnnnnnnnnnnnnnnnnnnnnnnnnnccccttggtaggtttgctgtccgcgacatgaggcagacagttgctgttggagtcatcaagagtgtggagaagaaggacccgaccgacgccaaggttaccaaggcagctgccaaaaagaaatgatgcaacctgtcgttaatcctgtaattcattttgcaatacctgacttgtcactccatcccgaagttttgtatgcggttgttactgttattgtgtactgttaagctctgctgcggcgtgccctgttgtttgggtagcgtcaacgtcgagcgccacttgcgggtgtgcctttgtctgctatcagtagcggcaaaaattgaaagctctcgagactaaaaaaaaaaaaaaaaaaaaaaaaaaaaaaaaaaaaaatccaacaagcaaacctgcagtcatctcctccatcaccaccaaactcaacaacagccagctcgcgaaaataatgaagagccgcagcatggcatcatcggccgcgctcttggtgctagccctcgcgctagtggcggccaccgccccacaggtagcggaggcaaagaaaaaaagagcggcggaaagcggcgaggcggcggaggcgaaaaagatccaggacgacttctgctcgacgctgtgcgagggcaagaaggggacggacctggtcgtgtgcaaggagtcctgcgcgctctcccagcagtccaacctggtgctgtacggcaggatccagtgcaagggcaagtgcaccgagcagaagggcatcacggcgccggccatgaaggtctgccaggaggagtgcgacaaggcgtacgtggtgaaggcggccgaggtcaccaaggcctgcagcgtcacctgcgccaaggagaagaacccgcgcctcagcgagaactgcaagaggtcctgcacccctcctcctttctgaagcgaagccccttgaaatgaaatgaaccatgcatgcatgcatgtatgcatgcgcccggggtgacgtggccgttcagctcaggcgctgagcgagtctatacgtacgtcgtcaccggctggccacgcatgcgataaccatctgatatggacggaactatatattggattcctaattaatctggcattttctaagctaattgttttttttcccaatataccgtcgatggaactcccaaatgtatgtcacgccaaatgtgtgttttcatccgatggatgggatataataaaaaggcatgctgccagttactannn

SEQ ID NO: 4433 - DNA, 1527 bp, Zea mays
  misc_feature (1)..(14): n is a, c, g, or t
  misc_feature (1487)..(1527): n is a, c, g, or t
  Probeset Number=SeqID_18836
nnnnnnnnnnnnnnccgtgcacctcgactgctcgccgcgcacgcgccatcgccaatccgacaccgccaatccgtagccccgatctctactatctaccgccgccttccttggtcgccgcgcgcggccttcctcgccgcccaagccccaacctcgccgacgcgcctcgcgtcgtcgtcccgcctcggtcctcttctcgccctgccgatggatccggccgcccccgagcctgtccccgcacccgccactgacaccgatgccgagaccaatggttacgaggatgcctctgaattcgaggacgcggaggctgggggcgagggcgctggggccgggaccgagaccgggaccgggaccgggaccgggaccgggtccgggtccggaacgatgccggcgggcggtgtagcggagatgaaggagctgcccgaggagcttgccaagggggtggtgtgcctcgaatgcgagacatcggccgaagcggcggtgtcgggtgttggcgggacctgccgcgtctacgtcgtcggcaccgctcatgtgtcgcaggaatcatgtgatcaagtgaaggccatcatcaactacctcaaacctcaggctgttttcttggagctctgtatgagcagggttgcaattttgacaccacaaaaccttcaggttcctactatgaatgaaatgattgacatgtggaagaaaaataagatgaacacttttggaattatctacagctggtttcttgcaaaggttgctagccaacttgaggtgttacctggagctgagttccgggtggcatttgaggaagcaatgagctacggtggcaaagttctcctaggagaccgccctgtccagatcactttgaggaggacctgggggaaaatgtcactatggcacagggcaaaatttctgtactacatcattttccagtctgtatttttaccaagcccagaggaactgaataagatgttaaaggacatggatgatgttgacatgctaacacttgttattcaagagatgagcaaggcatttcctagtttgatggacacacttctacatgagcgagatatgtatatgtcttcaacgttgttgaagtcggccagggaatattcttcagtggttgcagttgtgggaaaggggcatgtttctggaataaagaaaaattggcaacagccaattcaggtaaactgcttattagaattacctgatgctaaccaaggtccttcaaagctgaagattttggcatccattggagcattaaccggagtaataatagcatccggaatatatgtatggggtagaaagtaacagacgtgagtgcaatgtgttcaatgagcctttaaatctcgaaaaaaagtatttagtttatttacctataatctgtttcatttgttctaaatataaatagatgtaatttctgaaattgaaattaaacaaatgaaaggacaggtgcagcagataatgaaacatgtttttcccctaaaaaaaaaaaaaaagtgcacggnnnnnnnnnnnnnnnnnnnnnnnnnnnnnnnnnnnnnnnnn

SEQ ID NO: 4434 - DNA, 631 bp, Zea mays
  misc_feature (289)..(289): n is a, c, g, or t
  misc_feature (601)..(631): n is a, c, g, or t
  Peptide Sequence Number=SeqID_10499
  Probeset Number=SeqID_18837
aatgttcggtttcatgaacgccattcagcaaggcagcaccatgtatgatgcaatggacctgttaaagaacgaacgtgatcgcttcaaaaaagttgtccagcatgcaagccatatggcagcagcagtgcagctgttcaatgatgtttacagtcgtattcacagtgctattcagaatgtcaacccctcagcagaaattgacctgttcaaggaggcttttgcccatgtttgaagtataacgcacaatggccagatggcatcggctgtggagtccggttctgtgacgcaacanatgcagatggaatgcctattgaagagatgaatgaagactatctctgtgccaaactacacttagtagatcttggctggatcagaacgggctaagagaactggttcagatggcctgcgcttcaaggaaggtgttcacatcaaccgaggacttctcgctctcggcaatgtcataagtgctcttggagatgagaaaaaaagaaaagaaggtgctcacgttccttatcgggacagcaagctcacccgtcttttgcaggactccctaggtggaaatagtaagactgtcatgataggtaatttatcttcacctgacttnnnnnnnnnnnnnnnnnnnnnnnnnnnnnnn

SEQ ID NO: 4435 - DNA, 774 bp, Zea mays
  misc_feature (601)..(774): n is a, c, g, or t
  Peptide Sequence Number=SeqID_10500
  Probeset Number=SeqID_18838
tgctcggaattcggctcgagctctcctgacgctcggccttatctcttcccctctgctcactagcgcagttcgctgctcctccctcctcttcttcttccccgtgcacccagccattccggtgtccggtccagctcgctcgctcatcctcgagtccggccgggttctcgcgcacgctccttctgctcgccggccgtgagctcgtccatggcagctcccatcgtcgcgtcccggccaagtcctcagctcggccctgcctttctttccccctcggctcgccccgatgacgctcggccgagctccctggcgcatgtcccggtcgcagttcggatctccgtggcgccgcgtctttttctctgccccgcaatccatggcacccggttggagcttcttcctgcccggcgcgcgcccgcctccctgctctccgcgtcgcgccgagctgcctgctctggtgtccggctgagcttctccccgagcccggctctgccccaggtggccgcttgctccaatcgcacgcccctggtccaagctctgcgcgcgcggtcctctgccccctgcgcgcagccggtttctctgttcgccgcgaagtcctgcgcgtcctgcnnnnnnnnnnnnnnnnnnnnnnnnnnnnnnnnnnnnnnnnnnnnnnnnnnnnnnnnnnnnnnnnnnnnnnnnnnnnnnnnnnnnnnnnnnnnnnnnnnnnnnnnnnnnnnnnnnnnnnnnnnnnnnnnnnnnnnnnnnnnnnnnnnnnnnnnnnnnnnnnnnnnnnnnnnnnnn

SEQ ID NO: 4436 - DNA, 222 bp, Zea mays
  Peptide Sequence Number=SeqID_10501
  Probeset Number=SeqID_18839
aacaagttccctgctggatacctgcttcggtcactggcggacacctcgtccagccctggtggcgaatacagcaaggcacccagcgttagtgaagctagaagtttggaaagggatcaagtagagagcgacctaacatttgctggctttgcggtcttcaactgccctataaggggtgactctggtgctgttttacaagaaaacggacaatcttcccatgacttg

SEQ ID NO: 4437 - DNA, 235 bp, Zea mays
  Peptide Sequence Number=SeqID_10502
  Probeset Number=SeqID_18840
ctgcagcacaggggacgccatggggatgaacatggtctcaaagggcgtgcagaacgtgctggattttcttcaggatgacttccctgacatggatgtcattagcatatcaggttcattttgctctctcgtagttacgactaggttttcttggacatcatccatactactaaaacgatcaggagacggcagtccatacttcaaaaaaaaaccaagaggtgactggtcaccaacttcc

SEQ ID NO: 4438 - DNA, 1008 bp, Zea mays
  misc_feature (1)..(408): n is a, c, g, or t
  Peptide Sequence Number=SeqID_10503
  Probeset Number=SeqID_18841
nnnnnnnnnnnnnnnnnnnnnnnnnnnnnnnnnnnnnnnnnnnnnnnnnnnnnnnnnnnnnnnnnnnnnnnnnnnnnnnnnnnnnnnnnnnnnnnnnnnnnnnnnnnnnnnnnnnnnnnnnnnnnnnnnnnnnnnnnnnnnnnnnnnnnnnnnnnnnnnnnnnnnnnnnnnnnnnnnnnnnnnnnnnnnnnnnnnnnnnnnnnnnnnnnnnnnnnnnnnnnnnnnnnnnnnnnnnnnnnnnnnnnnnnnnnnnnnnnnnnnnnnnnnnnnnnnnnnnnnnnnnnnnnnnnnnnnnnnnnnnnnnnnnnnnnnnnnnnnnnnnnnnnnnnnnnnnnnnnnnnnnnnnnnnnnnnnnnnnnnnnnnnnnnnnnnnnnnnnnnnnnnnnnnnnnnnnnnnnnnnnnnnnnncccctcgtgacagagatcgtcctgcgcgacgtggtagaatcgagcaggtcctgtcgacgctgggggagaagatgaagcgggacgtggacgtcggcctagttgccgacttcaggaggtttagccgggagaaggcagcagcgttcagggccacgccgacgctgggcgtggaggcatcggacagagacgaagcctctgagtctgaatcctagcgtggtgtgtgtgtggtcagtggactgcagcttcccttggtctgtgcacagagagtagtgaacatgatacatttacatctggtttatgccgcgaacagatctgagaccagaacacccggaaacacggtggagtccggtccattgtggaggtaaaaaaaaaaaaaaaaagcgggacgtggacgtcggcctcgtcgccgacttcaggaggtttcgccgggagaaggcagcagcgtccagggccacgccgacgctgggcgcgacggcatcggacagagacgaagcctctgagtctgaatcctagcgtggtgtgtgtgtggtcagtggactgcagcttcccttggtctgtgcacagagagtagtgaacatgatacatttacatctggtttctgcc

SEQ ID NO: 4439 - DNA, 336 bp, Zea mays
  Probeset Number=SeqID_18842
atgtctgtcactccactcacacccactgttgctgccactggcagctgcgggtactgcgggtacgcgctgaacctgagctcctcggcgcgggacacagagggcatcgagaccaagtaccgcaagcagatcaggaagggcgtcatcgccttcgtcgcggtcgacgagagccggttcacgctggcccacgagctcacctgcacgctacttctgctccgcctgctcctggggcctcttcaggaggcggtcgcgcctgctctaccgaaagtgcgggggcacatcggtagcgcctacggggaggaggaggacgccagggacgccgactcctccagcctctaa

SEQ ID NO: 4440 - DNA, 1387 bp, Zea mays
  misc_feature (1)..(11): n is a, c, g, or t
  misc_feature (1387)..(1387): n is a, c, g, or t
  Peptide Sequence Number=SeqID_10504
  Probeset Number=SeqID_18843
nnnnnnnnnnncaaaactgattgtggaagtcagtttaccaacaagctggagggaatgttcaaggacattgaattatccaaagaaataaatgattcattcagacaatcatctcaagctaggacaaagcttccctctggcattgaaatgagtgtccatgtgcttacaacaggctattggcctacatatccgccaatggacgtgaaactcccacacgaactgaatgtgtatcaggatatatttaaagagttctatttaagcaagtacagtggaaggcgtttaatgtggcagaattctttgggacactgtgtcttgaaagcagactttcccaaaggcaaaaaggaacttgcagtatcattgttccagagcgtggttttgatgttgttcaatgacgcacaaaagttaagcttcattgacatcaaagattccactggtatcgaggataaagaattgagacgaacattgcaatctcttgcatgtggtaaagttcgggttctccaaaagataccaaaagggagagatgtagaagataaggatgaatttgtattcaatgaagattttagtgctcccctctaccgcataaaggtaaatgcaattcaaatgaaagagacggtagaagaaaacacgagcaccactgagagagtgttccaggatcggcagtatcaggttgacgcggccatagttcgaataatgaagacgcggaaggtcctcagccacacccttctaataaccgagctttaccagcagctcaagttccctgttaagccagctgatatcaagaaaagaatagagagcttgatcgaccgggagtacctggagcgcgacaggagtaacccccagatctacaactatctggcttgacaacgttttggcggaccgtgaaagagatcgttcccatttcattactatcagaaaaaggcactgtaaattaatttattttccggtttcttgttctttcctgcttttcttctctgggaggaagttgtagttgtagctgctgcaacgtgtttatatagaacgattttttcggcatcagtataaaatcaggttccttaaggcccgtataagcataatgcaaaaaaaaaaaaaaaaaaaaaaaaaaaaaaaaaaaaaaaaaaaaaaaaaaaaaaaaaaaaaagggaggacgataaaaaaaaaataagagtacataacacaaaaaaaaaagaaaaaaaaattttcaatggggggacatgaaataaacttcgttggccgccagattaacaccgttggactgaaaaaaccctgggttaacccacctaatagccctggggccctatcccattttcgtaaccaacagaaagaccgaataggtctccactgagcccccttctcaaaaattgcaaagcctcaaggaaaagtgggactcccn

SEQ ID NO: 4441 - DNA, 658 bp, Zea mays
  misc_feature (615)..(615): n is a, c, g, or t
  Peptide Sequence Number=SeqID_10505
  Probeset Number=SeqID_18844
tcagggttccttgtagagcaggcacatgcacaactcctatcaagtcacatcgtctcagttggtgtcaaacgagatattcccaccagctgtgtgaaggccatgctctaccctggagctatcgtgagcagcctaactaaaagcaaggcatttccgagttggagtgacctgtttgacatgtacaacctgacagaagccaaaaatgcttctgctgtagttgatctccagcgtctagagatacttgcgggaagctacttctgtgttgctggagggcctcttggcatcataaatcctgggaggatgactttgtttggcacgcgtttggctatcgggggtctcgtgaaggaagcgccatgggggcagccagtgcccagcgatccgcctgaatccacttatgtcgacccaaccattttgattgcacgtacagtgcgccttcacggcaagaacgcccaaggtaaagaagacagcagcaagtagccccccctctctcccgaagccgctgaaaagttccgccaagtcaaaactgaagtagaccctgttacaactttaatccttgtaactcattccaaagatttatttatccttgtaactttcaatcctacagcacccagttttttnccttgtaaaaaacccccccccccccgcgccgtctgagaggtcc

SEQ ID NO: 4442 - DNA, 1342 bp, Zea mays
  misc_feature (1)..(21): n is a, c, g, or t
  misc_feature (772)..(772): n is a, c, g, or t
  misc_feature (1335)..(1342): n is a, c, g, or t
  Peptide Sequence Number=SeqID_10506
  Probeset Number=SeqID_18845
nnnnnnnnnnnnnnnnnnnnngtctctcgctcactcgctcgttctctccatccgtgagaactgccacgcgaacatctcgtgtcgatccagtcgaaccagcgccccgcgttcgaactaacctgcttcgtgccgtcgcagagatcggagcgctcggttcggataggggcgtctcggaggtgaaggcgggcgcgtcagccatggcggacgaggagcacccggagaggagggaggaggcctccgagcttgccccctttgatccaaccaagaagaagaagaagaagaaggttgtcatccaagagccttctgatgaagtggacaagcttgcagagaagacagaatcactagcagtcgcagaacctgctgaacttaacttcactggaatgaagaagaaaaagaagaagcaggtggatcttgattcatctattgatgaccttggagatggggaggacactcaaggtgatcaagttgtagaggaacaaggggacggtattgtgcttggagctggccctacatatccttgggaaggaactgaccgggattataaatacgaagagctgctggacagggtgttcaacattcttcgtgagaacaacccagatcttgctggtgataggcggagaaccgttatgaggccacctcaagttcttagggagggaacaaagaagacagtttttgttaattttatggatttgtgtaaaacgatgcataggcaacctgagcatgtaatgatgtttttacttgctgaaatgggaacaagtgggtcacttgatgngcagcaaaggttggtgatcaagggaagccggccggggagcctatgatgagttgcagacttatttgcctacattgtttgagtaaaagagtgatagcatctgcaaagttctgaggctattcttttaaatcatactggaagactcatatttggttccaactataatgtgccatttcttttatttagtgtggatcttcaaggtccgttgctccaatcaaagctggattcgttgctcaagtcggtcgtcggaaggcatgagcatctatatgtggatgggtgttggggtcaataccaactcaacaatagttgattatttgttgactagagattctgcggcgcaatgttgagcaagatatatcaacgatgccctttgtctgcattcaaaggattcatctattgatgtcacaagcctatgaaaactggcgagtgtgaatcctgatctacgactccctgcgatcataatcctgtgactgctggttagtgtcaaatgcagtctgttaaacttcttgatgcggtcactaatacaagttcatcaaagttttgtccaaaaaaaaaaaaaaaaaacnnnnnnnn

SEQ ID NO: 4443 - DNA, 1128 bp, Zea mays
  Peptide Sequence Number=SeqID_10507
  Probeset Number=SeqID_18846
agcatatatgaccactttcaattcaagggatcacggcgaggtattggctgatgcgctgaagacacttctttgggaaggcaaaccacaggatatgctaagagttgttgctttcatcaaacatttagccacatttgctctctcatttggctctgcagaagcaataacaggtttgttttgaggtatggttttgtttgcccattctttttgagctaatgcctgcaaaacttctataacatcaaagatgattgatagtaataagggtgatatgttcccataaccctatatcgacattttgtatttatttgatcatgttattcctaatcttttatccataaatacaaccccaaaactacagatccattatctgagtggtacactatcttcagtcctttaggagctcagcctcctagagaagcattacaatatctcagtttcctcgatggctttgaatatcttgagtatggcaaacttgaaccccacctagagcctcgttcctatcttgaacgtgaaccctcttgaagcgtacagagacttgtcaatagaaagggaactgttaaaaccagctagcaaagcattgccactaaatctcaaaaggaagcggcgtggtaaggagtttgttgtgtaagcctagatgtacttgagaaggcagattgctcagttgacaaagacgagctcggagagaagccgcagagcatttcgcgttgcgaagaggcatctctgagaatgagaggctgaaggcagagctgaaccacacactgtcctccatagacatgtacaaggagtacaagaagcacaaaaaacatgaaagttaagtcgaaaggaataaaacagctttagggctttaagtcgtcttatctattctggagatctttgcactcctctggtggatgggtgtaattttcagtttttatcatattacccaatggcttctatagtgcagtttttttgccatccgtgtaccgtttgtacacatggtacttcattgaaagaattgtttgatacaatctcatgagcttgagtcatgcaaatatgattgttggcattaacaatggtataaacatgtcgttatagttgatattctttcaaaaaaaaaaaaaaaaaaaaaactcagactagttctcctggtgc

SEQ ID NO: 4444 - DNA, 655 bp, Zea mays
  misc_feature (601)..(655): n is a, c, g, or t
  Peptide Sequence Number=SeqID_10508
  Probeset Number=SeqID_18847
gcctcctctctcttctcgtcctcatccaactgggtgcgggggcggcgacgctcggcctccctcagacggcctccaccagcggcgcctagccctctgactcaccagctgcgcccgactcccctcggcttccagagatctctagcctccacgagcggcgcccgaccctttgattccactggcgggtcccctcggcatccactggtggtgcccgggtttctaggtgacagtcttagttgaggaacacacttgtacttccagtgctagaaggaagaccacgagtgctactagctctcgggcagcatcaaaggctggctacttctctgcacaggttgaggacatcacaaacactcacaacagacatgtagtgaagtcatatttgcatgagtgtacatgcctcgagtggcagcacaccggcaaaccttgcccacatgcattggccttgattataacacaggagagtgtggatgtggaattggaggattttgtgcatgagtactactcagtacagaggttcaaaaatgcatacaagagaataattgagccactgccagataggtctcaatggccacaagtggacccgccctatgtggttggtgcaccnnnnnnnnnnnnnnnnnnnnnnnnnnnnnnnnnnnnnnnnnnnnnnnnnnnnnnn

SEQ ID NO: 4445 - DNA, 1119 bp, Zea mays
  misc_feature (1096)..(1119): n is a, c, g, or t
  Peptide Sequence Number=SeqID_10509
  Probeset Number=SeqID_18848
gtacttattgacggtccagtgctggtcagattatacaccgccagtgctaaacatattcataagctacactaatccgttgccgccgtgtaaccatgtgctccaggattcaatcgcttgggtccatgaggttatgcgtggtagcatacaagtctctcttcagaaggagtatggcctcaccagagaccatatcaaggctatcttgatagacatgttcgaggccggaaccgacacctcgtacatgacgttggagttcgccatgacggagctcatacggaagccacacctgatgaagaagctgcaggaagaagtgcggcggaacgtgccggcggggcaggagatggtcaccgaggacaacctccccggcatgacctacctcaaggccgtcatcaaggagacgctccgcctgcacccgccggtcccgctcctcctcccgcactactccctggacgcctgcgaggtcgccggctacaccatcccggccaacacccgcgtcgtcgtcaacgcctgggcgctcggccgccacagcggctactgggagcgcgagaacgagttcgtcccggagaggttcctcagcggggacgtggccggcggcgtcgacctcaagcccaacgagttccagttcctggcgttcgggtccggccggaggatgtgccccgggggtcactcggcgtccgcgaacatcgaggcgatgctgtccaacctcatgttccggttcgactggcagctgccggcggggatgaagccggaggacgtggacatgaccgaggtgtttgggatcacggtctcgaggaaggagaagctgctcctagtcccccaggctgcgtcatggtgatgatcatactagtccaatgcaaaatccagggtttatttagtaccaccaaagcctgtgttactggcccttaattaataattaataaatgcgctgctgctatagccaggcttcccagtaacacatacttttattgcccatgctacatatatgtgttcttatttacatccccaataagtgttattgtgttgtatcacatttacctatatatatatcaaatggaacatttctcccaagtgctaaaaaaaaaaaaaaaaaaaaaaaaannnnnnnnnnnnnnnnnnnnnnnn

SEQ ID NO: 4446 - DNA, 460 bp, Zea mays
  Peptide Sequence Number=SeqID_10510
  Probeset Number=SeqID_18849
ttgtagagcaaccatgatgacctccgccttcctgcgacatattttttctattatggcgccaaataaaaataaactgctcgccgttgtacaacaacgtgactactaaaacaaccctgtcaccacacatattaatcttgttgcacatcatccttttttcagctggtgtcataataaagaggagggcaccaatggtcgttcttaacaacagctgagcatgcttgatgaatgatgcgacccgtgctgcagcgcatcattaaccgcggctgttgtggttactcccagcatgaccactactatagtcagcagcctactagcggctgcttctgttgttttccttcccttctttgtcacgacggtcggcttttttccttaagatgttaataatgggctgcttcctggagggcgacttagtagtgctctacagctcctccaccacaaactagttgaggaggatgatgga

SEQ ID NO: 4447 - DNA, 707 bp, Zea mays
  misc_feature (1)..(6): n is a, c, g, or t
  Probeset Number=SeqID_18850
nnnnnncctgaacgtggagcaagtgttcttctccatggcacgtgacatcaagcagaggcttgcagtgactgattcaaagccagaggtagaaataactgtgcctagttttgctttggcactccattgttcatcgacttccgtgttctgagcaacatatcctggaactgtgtaggacaaggcaatcaaaattaacaagccagaccagggttcccaggccccagctgcccagcgatctgcatgctgcggttcataagcagacgcccgatagccataatcattggttattcgaccctatttatttcccgcttggctttcataggaagaatttgaggaagccccttatgatatactgctgatgcggttggactcttgtttgcttcccctcttcgaagcaagcccctcgttgctggtgacccagctattgcccttctggacatccgttggaacaacctctttcctccctacagtttacagtgtgtgatgggcgaattccatgccgttgggtttgccttatcgatccatgcatggattaacggatcgcccctgtgtggattgttgtgttttttttttcccatggtgctgttcccttagattgaatttgttgggaagggaaaaaaattttcctctttcccccccccccccggggcctttttatcttttggacctggaatgtatggacccccggaaagcgtgaatcttccatttag

SEQ ID NO: 4448 - DNA, 964 bp, Zea mays
  misc_feature (1)..(49): n is a, c, g, or t
  misc_feature (964)..(964): n is a, c, g, or t
  Peptide Sequence Number=SeqID_10511
  Probeset Number=SeqID_18851
nnnnnnnnnnnnnnnnnnnnnnnnnnnnnnnnnnnnnnnnnnnnnnnnnagtcaagagagattgtgatccattatgattctaggttattaccaatttcagagataaactcaaatatatcatagaagcaggtaaattagttttcgttcagtgtcatctgtaattctgcataccattgatacactgttcctaataatgataggtcctacataggacttactgttaaggtcaaaaggggaagaagagattgtacaattaagaaagcgtcttgctgattactctacgaaggtaaaacattttttatatgtaaagatcactttactgtattttccttcttgagcttttgtttaccctaaacaactcttgataggaatcacaaatactcgatgataaatacaagttaaggattatttttgggctccaagctgcagctaccctccccatccccattctgattccaagaaaagcaccggtggccatgaggaggaagggcattgccaactggcacgctaagaagctagctaagcagcacagggtggaccttgccaaggttactagcaccgggacgtatgatcgaattacgccgacaggtattgaggggccaaagctctcaaaaccatgaaaaggcaaagaaggtgctccttatagtaaagccacattatggatttggtgagaagggtagaccaacagttggagaggaaggtgttgtgatgagcatcatcttgttctacatcatcactaatgaactggttgaacttttggttgctttggtgaatggaggcgacggcatgcagattgccatgtccggatgttatgcgggacctatgtttaatacacttgctggtttgggtacgttgttgctagattgatctgggctcttgttatgctgccgagaggtgacatgcagcctaacaagatacttggagttggcctcatcgctctttactcaaattttctttttattan

SEQ ID NO: 4449 - DNA, 549 bp, Zea mays
  Peptide Sequence Number=SeqID_10512
  Probeset Number=SeqID_18852
ccaggacgtatatttttactgaaatgatgctgggaagagcaaaaaaacagaagtacagacgcagcaaagaagattacaattattctctagcgggctcctcgtgaggtctcctccccatcgccacgcccacgcgccgcacaccgcccgcccgctcgccccgcctccgatcccaaatcaatcggcctgaccctagcccgccgccggccgcccacgcccgcccgcctcggctcgtctcaaatcgggcgcccgaggggagcgaggcctcgatcgcggcggaccccgatgccccgcattccggcccctccggcgacgtcggcggcagcggaggcatgatccggtggggactcggcggacctgccagccatggacgccaccgcacgcccggccatcgtcatcgacaacggcacagggtaaccccgatccctccccctctcttcctcagcatttcgctggcgccactactgctttatcgccgcgcgatccccccgtatgctcggtggttctcgccgggctttcggccatgcgcgcgcgggtggctcctgaaatggg

SEQ ID NO: 4450 - DNA, 598 bp, Zea mays
  Probeset Number=SeqID_18853
gggccatatccatgcttttctttttagtatgcgtacacaagggacatacacaaagcatggggctttaaacgcgccagcataggggccttttttttttttttttttcgttttttttttttttttttttttttttttttttttttttttttttttgaaaaaacatggggcaatgattatttctaggcattacaaacttgttcatacacgttcaatcgccaatgagccataatggatgggacccttacgggcttgcaagcagccaatcacatacgctggtccaaccaacctacccctaaatgaaaaaaaaaagctgcaagcatgggccattggtccaccacaaccacgataggggcagctgaattattgcggggttcagtcgaggaaattattcctatggcaggcaggaggcggggagatttcggatctcatgggctcatggccctgtcctttttcccacaggggtggacaggagcaacagcatcagtctactacatgggtggtgctccaccgttggacggccaggtcaccgcaatggggctccggacctccggcgccccctccctccagggggtgggtcccaaccagtagctggaaaccc

SEQ ID NO: 4451 - DNA, 640 bp, Zea mays
  misc_feature (601)..(640): n is a, c, g, or t
  Peptide Sequence Number=SeqID_10513
  Probeset Number=SeqID_18854
gagcgcgcacgcaccaagctcgggaagcgggagtgcatcaatggggatcagcggggctagctgcgagcacttcctggggcagctgagctcgagcgacagcgccagcgcaccgcaccagctgatgcagcgggagtgggactgcggcaccggcagcaggcgcgggtcgcggcgctggtccagtaagaagggcagggcgcggggacaccgccgcggcggcgggttctgcaggacggaggaggccgcgcggaagcgggtggtggtggtggtggaccagagctccggcgccaagcacgccatgatgtgggcgctcacccacgtcgccaacaggggcgacttcctcaccctgctccacgtcctgccgccgcacagcgggagcggcggcggcggccgcggtgctggggaggaggacgcctccgcgctcgccaactccctcggcgcgctttgcaaggcctgcaagcctgaggtgcgtgtgcgtgtactcactccttcactcgtgcgcagcttgtttcttctccaacgtgttccagaacaccacagcacgcctctgtccacagtaacgcatttttttgtttccgaacctgaactgaagaggcagatgttnnnnnnnnnnnnnnnnnnnnnnnnnnnnnnnnnnnnnnnn

SEQ ID NO: 4452 - DNA, 296 bp, Zea mays
  Peptide Sequence Number=SeqID_10514
  Probeset Number=SeqID_18855
gcctgcagcagtttattgcgccgggcagatacacggtgggcgctagggaggctgggcagcttggcttgctccggtgggccgcaccttgaccctcgtaggccggggccaggggcttggttgtctccaggtcaaagcggttcgtgcaagacttcaagaagggagaggcttactgatggttctagggctgatgcccttcaggaccaagaatatgtccttacttacgaagataaagatgctgactggatgctcgttggtgatctcccctgggagtaagttcctaacttggtatagtttgc

SEQ ID NO: 4453 - DNA, 617 bp, Zea mays
  misc_feature (601)..(617): n is a, c, g, or t
  Peptide Sequence Number=SeqID_10515
  Probeset Number=SeqID_18856
gcttttggaactagaacaactgccgttggaaacctcctggtgatctcctctcgccctattaataccatgctgacgagccaatagcagaagcatcacacactaatcaacaagcaggaccagctagctagctcctctcactgctatcacccgcccagccatctcgctgaaagagaaaagcgcagccatgaagactactagctcgggcattgcagtcgtcctactggtggccatgctggcagtccattccgcgttggccgacatctcgtgctccgacgtgctcaacgacctgtcgccgtgcctgcccttcctgcagggcaaggcagccaaacccagcgagagcaacaaccagtgctgcgacggcgtgagggccctgtacgcggcggcggacaccaggcccgacaggcaggccacgtgccggtgcctcaaggcggcctacgttcaggtccacgctgtgctctccgcggcgcaggagctgcccggcgactgcggcctctcgctgtcctacaacatcaccccccgacatcgactgcgaaccggaatcgaatggacggaatactcgctgccgttaaccacaatcccactacaacgggtatggcagctnnnnnnnnnnnnnnnnn

SEQ ID NO: 4454 - DNA, 644 bp, Zea mays
  misc_feature (644)..(644): n is a, c, g, or t
  Peptide Sequence Number=SeqID_10516
  Probeset Number=SeqID_18857
tacactttctggcggaggcggcccccaagggccaaattttccagcccacacgagctccacactccaattttttccggcgcaaagggttagggtttgctgtcggcgatgtctgatcggcagccgtctgaggaaccggaggagcaggtggacctggagggctgagtctctcacctgctggcggaggcggcccccaaaagccaaattccccggcccggaccacctccacactccggttttttccggcgcaaagggttagggtttgctgtcggcgatgtcggatcggcagccgtcggaggaaccggaggagcaggtggacctggagggggacgacgacggcatggacgacgacgacgccgggtaccgtcgccgcggaagccgggacgactcggaggagcccgaggaggatgacgacaatgacgagcgccacggcgaggccgacgacgacgccgggatggagccggagccggccggaagtaaaggcggggatgacacgggcaaggggcccgacgtcgccggtggcgggtccgaggacgaggaggagaggagcaagtgggatgacatgctcgccctgccgccccatggctctgaggtcttcattggtggcctgtcgcgcgacatcacggaggatgacctccgttagctgn

SEQ ID NO: 4455 - DNA, 568 bp, Zea mays
  Peptide Sequence Number=SeqID_10517
  Probeset Number=SeqID_18858
atgaaacaggcataaaatatacagaaatgtgcagttaaacaagaaatatactgaaaggtgcatccttgaacgaggtaaattggtatttctccacaaaaatgcaagatccacacatccaacactgacaggtctaatagcttaggttccaaaagtacatgagtagcatgctctgctactgataaagaagcttgggtagttcaacccggcgttgccatgtatccaatcagacctcctagccggtcaaacctgggggaagagattgcttcaacttgtttcccttctacagcatcgaatgacgcgagagctgtgtactaagtacattggagccagtcgcatccttgaaacttgtacaacatcgcttagctccgtctgtgatcttctacatgagcgtggcatgccgttcctcactcagcggctgacggagggagagtcgctgtaatcgtcactagcatctgtcttcgtgcatcttgctcgctgggacactgggaactccgccgtagctctgtcttcgtagcggcgagtgccggggatccctcgacaggatggaaaatcccggccggcctcgagg

SEQ ID NO: 4456 - DNA, 759 bp, Zea mays
  misc_feature (601)..(759): n is a, c, g, or t
  Probeset Number=SeqID_18859
gcacagaatggtaaccagggctttccaattgctcatataattgcctataaggctggtcacgcgctgcacactgatttcctccgccatctgtctggaaagatcactgtggaccaagaacagcttcctgggcggtgttcagatgtgcacggctcatgttcatcgtatgttcggtagtggttaggatagaaagaggtgcatttcaggacaagcacgcggtgacacccctcgtttctcagtataaggctagtactgagatgagggttctactgtgacatttttccttcagattcgtgggctgcaacagccatggtctttcagaaaattgaattttgccggcccgtgtggagttttggtaacttggtatggaagatcatttttttccagaaaaaaaaaaaaaaggacgagggcgcccgctgtactcgacctttttaagttagatgcttcttcaagaagtgtttcattgccatttacttctttggttgtagttgactgggttttgacctatttttcaggcctaaacattattttttgtcagaacagtatcatgtaatcatgttcttcttatcttttggaaagctttggaataattattttgttttcnnnnnnnnnnnnnnnnnnnnnnnnnnnnnnnnnnnnnnnnnnnnnnnnnnnnnnnnnnnnnnnnnnnnnnnnnnnnnnnnnnnnnnnnnnnnnnnnnnnnnnnnnnnnnnnnnnnnnnnnnnnnnnnnnnnnnnnnnnnnnnnnnnnnnnnnnnnnnnn

SEQ ID NO: 4457 - DNA, 785 bp, Zea mays
  misc_feature (760)..(760): n is a, c, g, or t
  Peptide Sequence Number=SeqID_10518
  Probeset Number=SeqID_18860
atttgttcatggtggacaaggttccatgtcatttaaaaggcaccaccgccaccgtcgaaataaccgtcgtgcgcgagctaacctcattgtggttgacagtgccgcgttgacaaatgcacatcgttcatccattgtggatatgattttaactcaacaccaagaaagttgtcgtagaattcaagatgcggcaagacgagccatgcaggcttccttggaaagaaccatatgtcaagatttgaataagttactcccgagggtatcaatgtctggagatgatattaatggtgagatcatgcgatgtgctgaagcatttgcacaatggctagattaccaagattgggtaaagagaaacccacaacgcaagaagtatgacaaacaagttgttaatgtgcgcgctagtcgtgctggcaacaaacgaagagaggtggcactgacagctgactgtatggttaagagggtgggatgtactacgaacgtttcaggcagccatgcatcgcctatgtatgagaggcatttacggacgtatttgaaggcttacctcttgactgcattggcttgagtaagaaatattattgcctgcatggagggattatcgccatccattgagaccctcgacaacattcgcaacttagaccgtgtccaagaagttcctcatgaaggtccaatggtgtgatcttctgtggtctgatccagatgatcgatgtggttgggggtatttctccacgtggtgctgggtatacctttggacaggatatataanagcagttcaaccataccaatagcct

SEQ ID NO: 4458 - DNA, 450 bp, Zea mays
  Peptide Sequence Number=SeqID_10519
  Probeset Number=SeqID_18861
gttgcttggaatgtcattaaaggacaactcatggcggctgttgggaggctcttccaagaagatgttaacaagctctaccacttgaactctgcctacgccctttctcatggaagttttgaggcatttgcacttcggttcagtatggttgccaggaccaggagaaggatttggtccagcaagccattccgtgctcggtggctgaatttccctgtggctgatcatctcccgggatggaaagttttgctaattcatctagctggaagagctactcttgttaaatcagtgctgacagccatcccggtgattgttggccttgcaggcatgaataaaattatttcctttgataacgtaaatggaattcttacttgtgaagctggttgtgtgttggagaatttaagtaccttcgtggaaaatgaagggtaaagttatccttagcagtttggttctgat

SEQ ID NO: 4459 - DNA, 208 bp, Zea mays
  Peptide Sequence Number=SeqID_10520
  Probeset Number=SeqID_18862
ctgatgctgagagcaaggtttgtttatttacacataaacacctcagatggtacttcagaaattgtccctgccactgctatccctgatgactggatgggtcttgatgttggccctgatgccaccaaaacattcaacgaagcattggacaccaccaagactgttatttggaacggccccatgggagtgtttgagttcgagaagtttgcag

SEQ ID NO: 4460 - DNA, 566 bp, Zea mays
  Peptide Sequence Number=SeqID_10521
  Probeset Number=SeqID_18863
aataataaatataatggagagaaaaacaacagcctttctgttggatgttctgaagccaaacttgccagagcatgcttttcttcaaaccaaggttttggagatcaacttagtcgcttacccaaatgttgcagatgccattcttgcgaatggcatgttcagtcattatgaccgtcctcgtattgctcagctctgtgaaaaggctggattatacttgcgtgccctccagcattattcagagttgcctgatatcaagcgtgtcattgtaaatactcatgccattgagccccaggcacttgttgagttctttggcaccctttcaagggagtgggcactagagtgcatgaaggaccttctactggtaaatctgaggggaaatcttcagattgttgtgcaggctgcgaaagaatattctgagcagctaggggttgacgcgtgcatcaaattatttgagcaattcaaatcttatgagggcccgacagcaacgtttactttttcttgggatcctatctgagctccagcgaggacccagatatccatttcaagtacatagaagcagctgcgaggac

SEQ ID NO: 4461 - DNA, 643 bp, Zea mays
  misc_feature (642)..(643): n is a, c, g, or t
  Peptide Sequence Number=SeqID_10522
  Probeset Number=SeqID_18864
gccggccggggctgcgacacaaagaagctccataattaattattgccctttcagttcgccatcggcagccgagcaccatgagctccacaggcggcggcgacgatggcgccaagaagtcttggccggaagtggtcgggctcagcctggaagaagccaagagggtgatcctgtgcgacaagcccgacgccgacatcgtcgtgctgcccgtcggcacgccggtgaccatggatttccgccccaaccgcgtccgcatcttcgtcgacaccgtcgcggaggcaccccacatcggctgagaattaaatctacaaaatgaatgactcggacatgccatgcgtacctgtccgtcgccgaataatggatgtgtgtgtccgccgcccctgtagacttcctctaaaaattgtgcgcccgttcttctgctttcctgtgctcggcaacgccccggttcgcctcgacgccgccagccgtggtcccatccacctctgcgcaagtaacagcaagaagctgattgtgtggtagaggattcgaatacgttcgaggacgaccccgcagatactttttgacaagagggtgatgccggagactttgatggcgattttatcgacaacgatgatttctaagtctaacgatgcagccggtcatctnn

SEQ ID NO: 4462 - DNA, 336 bp, Zea mays
  Peptide Sequence Number=SeqID_10523
  Probeset Number=SeqID_18865
aatgcatgcgtgctgcactcctgctccacctacattcgtacacagcacactcccaaaaccagagccacgccggtcggcacaccgtcgcctgctttgactagcctcgccgccgcagcgacagccatggccaccgctgcccactccctccacctccctggtccgacgccttctaaatcctctacccccttctcccaccgcctccctgtcccttgccacctccgcccgcaacgccggcgcctggccgactcgtcctccgacctcacctgcttccccgaaccgactaccgtcccgaacggcgtctacgtgccgtgggcggcggccttcttcgtagccgaa

SEQ ID NO: 4463 - DNA, 590 bp, Zea mays
  Probeset Number=SeqID_18866
gacgattcacggcgtgggcacgtcggcacgtctacgagctcacgcttcttaggctgtccgcagcgcatgccgcgctcttccccctccccttgcactgttatctgatttctcctgacttggggatcccttcgcttttctccaacctccaggctttggtggatggaatggtcggccaactgaagtcgcagggtgcttccatcccggaggtggcttcatctcttgagcgttggaatccggtgttgcttcggggtcgtgtatctgagttggaggcaactaatgctgggatgactcggcagatcacagttcttgaagaaaaacattcccaagatcaagctgaaatggctcgacgatgcgctgacttcgaggagaagtattctcagagtcagatcgagttgagtcaggtctctgcggctttggatgatgccaacgctctgagttcttctcttcatgctcagcttgactctgagaaggaagaaaaacgcatccttgctgcttctcgcgacaacctggacagattgtaccgagattccagcaactcgctgaccctcttggagaggagccaccgttttacgaggaggagcggacatcag

SEQ ID NO: 4464 - DNA, 430 bp, Zea mays
  misc_feature (411)..(411): n is a, c, g, or t
  Peptide Sequence Number=SeqID_10524
  Probeset Number=SeqID_18867
tcgcgatctagtacctctcctgctctgcctcctcctgcttgccggcgccgccgacgccgcgccgctgctcgtaggcgtttttcccaaaggcacttcagcttgtccagaaggcaagttttactgcagaaatatcggagatacccctcgattgttgttctctgcgtttgcgaatgacaaaatttgcgattggggtgatggaagtgaggagggcgaatgtggtttccattgccagaacacctgtcgaagtgtaatggatactgctgaggctgatggcggtggtggcgacctcgcagttacacaggtagagtctgctgatgattttatgagttaacatgcaagggctatggaagaccatatccagaacaacagcaacagagaccttgtccagaagataagaggattgagaacagncctagttattgagctgggc

SEQ ID NO: 4465 - DNA, 629 bp, Zea mays
  misc_feature (601)..(629): n is a, c, g, or t
  Peptide Sequence Number=SeqID_10525
  Probeset Number=SeqID_18868
agtcctatggtgtcttctatgccgcacacctaggagcagtttgtgccctcttcttcaagctttggttgtctagccatcccctgctcccttcgttctcctgcgctcggcctcctttcagctgcgacgccggccaccgtctaagctcgccaagcatccaccgctgctcggccagggcgccgttccccttcgcactcgtcgtgggcgctgcctgtcgtgcccctctgctacctccacgcccaagctccactccatggctgcacctcccctccatggcttcttccagctggagctcgccgtcgtccctggtgaatgcccgagctcctctccatcgtctctagctcgccatggtacagcgccactgtcgaatccggtctccagcacgccatggcgtttgtcgaagctcgccggtgaagtctgtcgctatcctctggtcctagctcgccctgcactcgtccatggctgctgtcacaccgagctccctccacctgccatccctctgctcaggccatcgagccgctccagactgtgctcctagtcttcttcctcgccgggctggatcttccccaatcctctggtccatcgtggccctcccatctcgtgnnnnnnnnnnnnnnnnnnnnnnnnnnnnn

SEQ ID NO: 4466 - DNA, 609 bp, Zea mays
  misc_feature (601)..(609): n is a, c, g, or t
  Probeset Number=SeqID_18869
gtcgcatcgcacgccatcagcagctagcgcgctcctcgagcccagcagagaaaggccggcctacccactctctctctctctctctccagtctccaccggcagcgctaatcgtaatagccatgggctccaccgccggcgacgtggccgcggtggtggacgaggaggcgtgcatgtacgcgatgcagctggcgtcgtcgtccatcctgcccatgacgctgaagaacgccatcgagctgggcctgctggaggtgctgcagaaggaggccgtctgcgagcaagacggcgctggcgcccgaggaggtggtggcgcggatgcccgtggcgcccggcgaccccgccgccgcggcggtcatggcgcaccgcatgctccgtctgtatcgctactacgacgatttacggtgccagatggaggaccgaaacggacggtacgagcgccgatactctgccgcgcccgtatgcaagtggctcacccccaactaggcacggcgtgtccatgggcgctctagcgctcatgaaccacgacaaggtcctgatggagagctggtactatatcatggacgccggtgcttgacggacggcatcccgttcaacaacgcttacnnnnnnnnn

SEQ ID NO: 4467 - DNA, 800 bp, Zea mays
  misc_feature (792)..(800): n is a, c, g, or t
  Peptide Sequence Number=SeqID_10526
  Probeset Number=SeqID_18870
agctcttcacttccatgcgctgtgcaagaccagtgacacctgcccttagttggcagatataaaacttgattcaaggaaattcctctccctatcttcaagctctaaccaataaccactacaagggtgaagttgttctgctgttccagccagtgctaatcctctcccttgctgcagagttaagttgttcctgagctgtgtcaacccccctgtgtggtgagcacactcatagttctcacctcgctgtggccagaagtacgccgccacagaccgaagacatggatagccctgctctaccccgcgtcatccccgcccaggttcttgcgaacactattgtcgtgaacgcgaagaagaagtggaagtgactgaagaaaagacatcaccacctttggaatctcaggcagagacttggctctacttcgacatctgcgagtccgagcctgactcacctactaacaaagagaacgatctggttgaggagcccgaggagctcgcaggagaagcccctgagcagcagtcggttggtggaggttgtcaacattgcaaccactgctcaggagaagatgaagccgtggaaggagacttccaggagttccaagattacgacgagctctaggcgtgggttagcggcaacccccagtcggctgcctgtgaaggccgcggctatctacgtttcttttccgcactttgatttattgtaagaactatatggacgtctcagacgtatgatgtaaccgattatctcccttttaatactattttgagcactgtgtgacgaaaaaaaaaaaaaaaaannnnnnnnn

SEQ ID NO: 4468 - DNA, 397 bp, Zea mays
  Probeset Number=SeqID_18871
ccggaagtctcctcgtctgtcgtttcactcgtctgtcgtctccacctcgccccccacctccgaccccaagcgacccaagccagggttgcaccccacccccgcccccgcccctctatccaatccgatggagggcggcgactcgtccggcgccggcgccggcggcgccgtggccgcggcggccaagtggcggagcgacgcgtcgcgggcgttccagtactacctggacctcgacgcctcacgctacggggcggtggctcggcacgttcgccgccgcgaacatctacgcgctgcgggtctacatggtgcagggcttctacatcgtcacctacgggctcgggatctaccttctcaatcttctcatggttttcctctctaccatgatcgaccccgagctcga

SEQ ID NO: 4469 - DNA, 544 bp, Zea mays
  misc_feature (520)..(520): n is a, c, g, or t
  misc_feature (528)..(529): n is a, c, g, or t
  misc_feature (535)..(536): n is a, c, g, or t
  Peptide Sequence Number=SeqID_10527
  Probeset Number=SeqID_18872
agtcctctcctctcctccccggccccttcactccaccaacgaaccccacgcaggcagcagcacgcgcaagccgcaaggcaaggcacaaacactaggggccgggcatggcgacgcgggcggacgtggagaagggcgggccggcgaggaaggagcccggcaaggtgccgtcgccgctgtacccgcagcacgagggggagcgggagtgggtgccctggctcgtccccgtcatcttcgtcgccagcatcaccgtcttcgtcgtcaccatgtacgccaacaactgcccagcgcggcgcgacgccaagtgcgtcgcccgcttcctcggccgcttctccttccagccgctgcgacagaacccgctcctcgggccctcctccgccacgtgagtataatatccggtgctgtctatatatgtgattagatcagatcacatctcatgccctgtacttttgattgatcgtgtctgtctctgcaggctcaccaagatgggggccctggtgtgggagaaggtggtgcaccgccnaccagggnnctggcnngcctcctc

SEQ ID NO: 4470 - DNA, 236 bp, Zea mays
  Peptide Sequence Number=SeqID_10528
  Probeset Number=SeqID_18873
tgcatgcctgccagagtggtcatcctcaccaaaggtgacaataattttggggatgaccgactattatatgcacatggccagctttggctccagcaacaccacattatggggcgtgcggtgggctaccttccatatgttggctgggttacaattatcatgactgagaaaccatttattaaggtatgctcattcttgtctaaatattgattggcttgttcgtaatgaaacactgtcaa

SEQ ID NO: 4471 - DNA, 871 bp, Zea mays
  misc_feature (797)..(871): n is a, c, g, or t
  Peptide Sequence Number=SeqID_10529
  Probeset Number=SeqID_18874
ttccttttcctttttatttttaatttcttggttcggttcttgatcacccgttcttccttatccaggaaattagattatcaggtgcttctatttgtttgtgcatctcttgtttgcgcctgcgatctggacctttgtgggctcgtcaacaaaagagaagaggagcctttcttgttggtagttacaaccggtggcgtctcttgtggtgcaggtgcattttgtgtgaggatccagacgcaggaggatggctctcaagaagttgctgcagctcttttgtgtcggaaagaaggattccaagaagaaaggtaaattcatcgatccactctggcaaggtacccatgatgtccaatatcaagcttagcatatgttcttctttcccctgatggctcgagtgggatcaatgtactctgcggtgctgttcatcggggtcatgaattgtacctcagttcagccagtggtggccgtggagcggacagtcttttaccgtcaaagagctgccggcatgtactcagctttcccatatgcatttggccaggttgtcattgagctcccatacgcactggctcaggatatcttatacgctgtcatagtgtactccatgatcgggttcgagtggacggttgctaagttcttctggtacctcttctttgggtacttcacgctgctctacttcacattctatggaatgatgaccgtcgggctgacgcctaactaccacatcgctgcgatcgtctccgcggcattctacgccatctggaacctcttctccggattcgtcatcccccgaccgaaagtaccgnnnnnnnnnnnnnnnnnnnnnnnnnnnnnnnnnnnnnnnnnnnnnnnnnnnnnnnnnnnnnnnnnnnnnnnnnnn

SEQ ID NO: 4472 - DNA, 408 bp, Zea mays
  Peptide Sequence Number=SeqID_10530
  Probeset Number=SeqID_18875
atgttccagtgccactacagctacaacgcttgcgggctcggctctgacggcacagacaggctagtgaatctagttcaagaaatccggccaggaagagctcgcgcgccggagggcccagcctgttcggcgcgaagatcaccggcggtgggtccggcggctcggtctgcgtgatggggaagaactgcctgaaaagcagcgaggagatactcgagatccagaagaggtacaaagcggcgactgggtacctcccgactgttttcgacggctcgtctcccggcgccggcaagtttgggtacctgaagattcgacgccggtccacgtcgccgtctgattgaagaagaagaagaagaaggaagatctctacgcccaagatgccaataaatgggacagattaatcggcaataataa

SEQ ID NO: 4473 - DNA, 620 bp, Zea mays
  misc_feature (601)..(620): n is a, c, g, or t
  Peptide Sequence Number=SeqID_10531
  Probeset Number=SeqID_18876
cgatgcccgcctcctacataatgctcggaattcggctcgagggaaggaggggtgttcaatggcgttgcggaatggtggtggtggtggtggagcctgtcccgcggcggttgtgctggtggctgcggccgtcgcggcgctgctgggcgccaggggtggccggcggcgagcgaccaagttcgaccacgtggtgcagcccagctgggccaacgaccacgtggtgtacgacggcgacctcctcaagctccgcctcgactccagctccggcggagggttcgtgtcaaggaccaagttcctgtacggcaaggccagcgccgacctcaagctctgtgccgggggactaccgccggcgtcgtcactgggtgtctatctgacagccggtcgcggggacatgcaccaccagttcgacttcgcagttcactgggcaagcgatcacaacggaccagcatcatccgttcctaccagcactgagccacctagccatggcgaaccctgccgcctacttgcaggagcagctgcttgcatccaacccacttgctctggcgaacggagttgcaaaccagcaacaacaacagcttcaacagtttttgccaacgctcagtcnnnnnnnnnnnnnnnnnnnn

SEQ ID NO: 4474 - DNA, 349 bp, Zea mays
  Peptide Sequence Number=SeqID_10532
  Probeset Number=SeqID_18877
aaaaaactcccatctcgcggcggaaagagaaagagagagagaggagaggtgcgagctggtgagatggatcggttggaggagcggaacattaagaagggggagagggagatggaggaggcgcgcaaggaagaggagcggaaggaggaggcgggggacaggaatacccaggagccgcagcaaggtcaaggcctcagcctctcactcgccaacggcagcgacagcggcaggtctgcaatgttgccgagtgagaggctgaggcctagccttgcgcttgctgatataacttgccagcattcagttagtggtttgccagtttgtgctgctaaaaaaaaaaaaaaaaaaaaaaaaa

SEQ ID NO: 4475 - DNA, 700 bp, Zea mays
  misc_feature (1)..(47): n is a, c, g, or t
  misc_feature (648)..(700): n is a, c, g, or t
  Probeset Number=SeqID_18878
nnnnnnnnnnnnnnnnnnnnnnnnnnnnnnnnnnnnnnnnnnnnnnnaaatgatctatagcattaattagcatttctctcttacacacaccttagtgaaacttttgtttccatgttagcgcagtttgctcctgtcgttgtggagatggatggatcataagctaatgaagccagattccatgcagagaagtcagcagttgttcagcgtttctaccttttggtcggtacattatgccatgcacagtagtactagagaactgatgttttacgctgatcttgctgttagaatcttacgctgtctacttattatgatctaggtacagtggtgcgctgacttgtatgaagttttactgcttgtgctgacattgaatatacgtgctaattatcgactgggtttccacttgactggttaaagaggtaaataattaagcctcgcttggttagggcatgttattgcatctttatggaaaatgcctaaaactaagggctagttgggaaattccattttcccaagttatttttattttcccgttttcccttaggaaaaacagttcccaaaatagccctatagaggagggactttcaaccatctttttacttggcatcgaacatacccggaggaaaatttcatgggggggagtttgatttnnnnnnnnnnnnnnnnnnnnnnnnnnnnnnnnnnnnnnnnnnnnnnnnnnnnn

SEQ ID NO: 4476 - DNA, 651 bp, Zea mays
  misc_feature (1)..(50): n is a, c, g, or t
  misc_feature (651)..(651): n is a, c, g, or t
  Peptide Sequence Number=SeqID_10533
  Probeset Number=SeqID_18879
nnnnnnnnnnnnnnnnnnnnnnnnnnnnnnnnnnnnnnnnnnnnnnnnnnaaaccagcgccgaatattcgctttggtcgtcttctcatctgccccaccgtccgggcttgaccaggatttctctcggtttgcggtacttttattgccccaggtcgatgtgaagcgggcactctcgcgggaggagcagcaggcctccaaggccgcgaaccctagcggtggaaggaactcggggggcggaggaggcggcggtggcggcagcgatgcaagtggtgctcggacgaagaagatctttgtgggcgggctgccctctactctgactgaggatgggttccggcagtacttcgagacctttggcatagttactgacgtagttgtcatgtatgaccagaacacacagcgcccacgtggtttcgggttcatcacctttgattcggaggacgcggttgaccgcgtgctgcagggtcccaggagcatccacacctctagtcgcgcgcagatgctacaacaacgcctacttcgccaaggtcgggggcatcagcctggtggagatgaactacctggaggtggacttcctgttcggcgtcggcttcgacctcaacgtggcgccggagacgttcggcgactactgcgccgtgctgcggtcggagctacn

SEQ ID NO: 4477 - DNA, 436 bp, Zea mays
  Peptide Sequence Number=SeqID_10534
  Probeset Number=SeqID_18880
gaaaccggggcggaccacacccgtccgttggagcaccataaggtgccccagcaccatctggcagagcagttggttaacccccgggaggagggccggcccctgttccggcctaagggggaaagactacttcaggactgccctttctttccgtggccggttcaaccaactcgttcgcttaaaagccaagggtttggggccggacttggggctttacggcctaaaggcgaccaccagggtcttaaagggcggcttaaacccgacgccggtgttccagggcagcaggggccctttcgccaggtccttgctgttccagttttacttttgcgcgggggggaacggaccgttaatggactgccccgggccgaagaagtccacctgttccagggggatccttttccaccccttcaagaaggggttgcttaagcagcagtttaac

SEQ ID NO: 4478 - DNA, 1154 bp, Zea mays
  misc_feature (1)..(8): n is a, c, g, or t
  misc_feature (966)..(1154): n is a, c, g, or t
  Peptide Sequence Number=SeqID_10535
  Probeset Number=SeqID_18881
nnnnnnnnctgtattttatgaagaggccaggaggcatttatcagagatgctaaaaggtaatgactgttccataaactatccagaagttcaaatctcaaaatccttggaaggcatactttctcttcctcatggcaatgtgtcaaccactgggagtagcctgaggggaaaggattaccttgacccctcacctggagaaacagatgtgtacgatgcatgcgaggttcagagagaagaatgcacacaagagagaagccaatcacaagaggattttggaagcattgctcactgtacttgtacaacagttgatgatcaggtgacacttcgagaaggatattacacgaatgaagcacaagaaggaccaagacatgctcatgatgagccagacactctgtatattgaaggacttgataaattcatttgcggcgaaaacattcgcaacgaagagtccagtccagcagaacaaagcagagacgatatatgtcaagagatactagaagaaataaatcagggaaaagagcatgttaaaatgtccctagcttctgttgagggcatagataaaagttggggcagcaagagccagaaacaccggaaccaagagcatcagccaaattaatctcagatgtttctcctaatcgaagcgatgaaaaacaagagaggtgcagtccagtatctgatcttgagtcatcctgcataagagttggcaggccggacggtataagggatgcgatcataccagcactaaagcaccggatcccatcagaactccgaagttaagcgtgcttgggcgatagtagtactaggatgggtgacctcctgggaagtcctcgtgttgcattaaaaaaaaaaaaaaaaaaggcccctatgtttttcgaacaccaaaccatagtaaaaatgggtgaccgttctcgtgttaaatctccttttatttgttttaaggggcgtttttcgggtactttgtgcggaggnnnnnnnnnnnnnnnnnnnnnnnnnnnnnnnnnnnnnnnnnnnnnnnnnnnnnnnnnnnnnnnnnnnnnnnnnnnnnnnnnnnnnnnnnnnnnnnnnnnnnnnnnnnnnnnnnnnnnnnnnnnnnnnnnnnnnnnnnnnnnnnnnnnnnnnnnnnnnnnnnnnnnnnnnnnnnnnnnnnnnnnnnnnnn

SEQ ID NO: 4479 - DNA, 873 bp, Zea mays
  misc_feature (1)..(27): n is a, c, g, or t
  misc_feature (873)..(873): n is a, c, g, or t
  Peptide Sequence Number=SeqID_10536
  Probeset Number=SeqID_18882
nnnnnnnnnnnnnnnnnnnnnnnnnnncacttttgtatccggttatgtattatttctatattgtgcgacaatgatacagttgctgtactccagtcctctagggatgaaaacggtcgaaaacgatcgaaaaaacagctaaattgtttttgttttcatattttttggtcgggacgaaaacgaaaatgaaaatcaacggtcgaaatacgagatcggaagtgtcggttattcgaaaacgatcgaaaacgataaactatagtcagaaagataactattttgtagttttatcaaaaacataataaaatgatgtattgcctaattttttagatttagaaatacacaaacaactctttttcatcattcatattagttagagtaattataacatttgcttttcacttattcattcacttgaacacaacaaaaatctataacttaaataaattatatgctagatctatctcatattatataataatataaaatggtagaaaaagtattagcataactcggaaacgaaaaatacgaaaacgatcgaaaaactagctaaatcgttttcgtaccgtttctaatcggttcccgaacaattcgaaaatgatagagaaaaaacagtattcgaaacgggacggtacgggaatttcccatcccgttttcatccctgcagtcctctattgattctccatccaataccaaacatgggctcgagtgcaacggcagagcgacgcttaagggcagcagtggcaagccactatatcaaaccctttctcataaaaaataaatttaatatcgaagtaagcatatagcttacatatcagatattaaactaataagaacagatactacacttgatcttagccaaaaggccgagaaaggtan

SEQ ID NO: 4480 - DNA, 774 bp, Zea mays
  misc_feature (1)..(173): n is a, c, g, or t
  misc_feature (702)..(702): n is a, c, g, or t
  misc_feature (774)..(774): n is a, c, g, or t
  Probeset Number=SeqID_18883
nnnnnnnnnnnnnnnnnnnnnnnnnnnnnnnnnnnnnnnnnnnnnnnnnnnnnnnnnnnnnnnnnnnnnnnnnnnnnnnnnnnnnnnnnnnnnnnnnnnnnnnnnnnnnnnnnnnnnnnnnnnnnnnnnnnnnnnnnnnnnnnnnnnnnnnnnnnnnnnnnnnnnnnnnnnnnaaagagaccagaagttgggttcaaaatagagagctaggccggatcccgaaaggctcctctggtctggatcaccggactgtccggtgtacaccggacagtgtccggtgcaccaccgaacagtgtccggtgcaccagaggactccaactcaaacttgccaccttcgggaatttccagagggactccgctataattcaccggactgtccggtgtacaccggacagtgtccggtgctccaaggaagagcggcctccggaactcgccagcctcgggaaacgcagcggttgctccgctataattcaccggacatgtccggtgtacaccggactgtccggtgaaccagcagagcaacggctacttcgcgccaacggtcacctgtaggcgcattcaatgcgcgccagaagcacgcggaagtcagacacgcccatactggcgcaccggacattgaacagtacatgtccggtgtgcaccggacatctaggcgggcccagaagacagtagctccaacggtcgaatcccaacggcattggnggacgtggctggtgcaccggactgtccggggcaccatacgacagacagcctccaccaacggtcaaagtttgn

SEQ ID NO: 4481 - DNA, 459 bp, Zea mays
  Peptide Sequence Number=SeqID_10537
  Probeset Number=SeqID_18884
aaaaaagctcggtctccttccctaatccgttcactccccaaatcccagactctcaccgcttccctcgtctcctcagtcctcccccgccatggtcacggacaagtccaacctcccacagcagcagcagcctcctccctccgcttcctcagcaccctcctcgctcaagtccctcaacaaggcctcctacaagatctccaagcagtcgtcttccgcctctcccgctcccgttcccgcctccaccatgcgagcgccttccccgccgccgccggctccccgcccacctcctcctctcccgcagccgccgcaggcctcctccgtccctgccgaccacccgcctccccagccccccgtgtacaacatcgacaagtccgacttccgcgacgtcgtgcagaagctcacaggctcgccgtcccacctcctgccgccgcagccagcgcccactcccgccaccgctcccct

SEQ ID NO: 4482 - DNA, 542 bp, Zea mays
  Probeset Number=SeqID_18885
cggacgcgtgggaggaatcccttttatcggatgaagacgaagctagcagcgtgatattccccaagcgctcgataaattgcctgaatcggaaaatcgctaccggtctcgtggattcatgttggctgtgtaaacggtacgttgattaaccacaagatgcggagaacttgagtcaagtcgaccccaagcgtggactactccgcatggtgaagctgatggaccaacctgaagatggttaaatcaagcgaatgttcggttgagggatactcgtcaagcggacgtcatctaacaaacactaacatagtgtttattccaggtcatagttttgtgctgctgattatggtgttaagtgccggtgggcacggccttcttataagtctaagtaacccttctatacttcttaatgagaatggtcccttgagctagcatatatttcaaacttatacttttgcaatcgcgccaatattataatgataaaattttgtaccctgtaaaaaccggtaataagctttacaaagcccaaaaaaaaaaaggagggcggccgc

SEQ ID NO: 4483 - DNA, 730 bp, Zea mays
  misc_feature (1)..(49): n is a, c, g, or t
  misc_feature (650)..(730): n is a, c, g, or t
  Peptide Sequence Number=SeqID_10538
  Probeset Number=SeqID_18886
nnnnnnnnnnnnnnnnnnnnnnnnnnnnnnnnnnnnnnnnnnnnnnnnnccccttgtgctccgaccaatggttggattaatgcttgctgggatgggaggctcaattgatgtgtttcggatgaggcctatagccccagtagatttatacagatcaatacgtgattcacaacttattggcctgtcaggatacacaaaggagttttcaataggaaagttaatatgccgaatgaagatcgcactgaagaggttaaagtgttaacttatattgattgtcaaacttccacggaatgatgtcctactaacagcaacatgggttattaataaggtctgtagtttcaaagtatgatatggcatcataattgtttggctatcagcactaagccaaataaaggatttcggctctcatcaagtgactccctctcacgttgactttgcggatgtctcaattctagtggtggagctacgaacaacaatccaatgtcctgatcgagagcgatggagctaatgtttgaacttgtgtgtttgaacttgtgaactaaaaatgtgaactatggatgtgaatttatgtgaatttgtgaaattatgtatttgaacttatgtgaatttgtgaacttatgtatttggacttgtgtgaatttgtgatatgaatnnnnnnnnnnnnnnnnnnnnnnnnnnnnnnnnnnnnnnnnnnnnnnnnnnnnnnnnnnnnnnnnnnnnnnnnnnnnnnnnn

SEQ ID NO: 4484 - DNA, 978 bp, Zea mays
  misc_feature (1)..(1): n is a, c, g, or t
  Peptide Sequence Number=SeqID_10539
  Probeset Number=SeqID_18887
ncggccgggaagcctcgcgccgctcacctccccaacgccatggccagggacctcactctctgcgtgtagcagcaaccccctggctcgcgcccacctggctacaaatggaaatcgaagtcgcgcccgcctctgctcttgcgcgtcccggccatactcgccctcggtgtgccgtcgtgtgaggactgggtaaaagggggaaaacatggccaccgttatcgaccgtggttctcaaccacaccgcgtcctcggagggtggtcgcataaccttttcggtgctcctcgtccgtggtcgcagtcggttcaggcgggaattggccaccggtgctcaggatttattgctgacggtgggggagcgccgctgtttcttccccaatccatggacagacaacttcatcgccttatagccgtgtggtcacgaggatctgaagaatcaccctggtaactggaatctcaagtgccaggagaagaacaggtgattcaggaggagccacgtatcgaggagtatgatctgatctaggtggcgtttctcagttgacattggcgccgacgatccttagttcattttatatttattcttttattttgtaataagtcttccgctatgtattaaatactctgatgatttatgacatttatctctatacactctgttattatatatgttgtcttctttggcgcatgtatgagatgcacccggctttgtcctttaaaaccgggtgtgacaccctgcgcctcaagaaccgcaatccccagaggcagaaagagatactggaggccaagcgccagcgcgtgtccgcactagccaaagtgcggcagatgatacgcgtcgaagagcagaaggtcccaggacttcgagcaggagatcgcgctgatgcagcgcgaaggccacctcggcctccagcacgggccacccctgcagcagcgcgcacaactcgaagacacgcgcgaaggccacctcggcctgcagcatgggccacc

SEQ ID NO: 4485 - DNA, 765 bp, Zea mays
  misc_feature (601)..(765): n is a, c, g, or t
  Peptide Sequence Number=SeqID_10540
  Probeset Number=SeqID_18888
cggcgcggcctcgatttccccttaaacaacacagaggaagcaggcggcggcgatcgggcgatggcatggcgggcgagcctgtctcggagcctaaaggagatccgcgtcctcttctgtcagtcctccccggccagcgccggcgcccgggacaaatctcacgcatcttcgatttcactctcctaagtcgctggtcgccggccggactcggatatgaccggaccaccgggtcatttccccttaacacacagcgatggcctcgcttcacagttgtcccgatctgcgccgccccccgtggagatcgtgaagaacaactatggggacatcaagggttcggaacccctccctccccttccttgtccgcgagtgctccggtggccagccccagctctgggcgcgctaccatatggctgcggagagatgcgtgaacttggatggtactgacggaagcacaaattgataaaaagatgtaagagcttgccaaagccgccgagtctcttaaaaccaaatagttttgcaactctatcctgccatgtttaacgttcccaaataaatgatgccatatgtgtgagcaattgttactctatcggtatctgcatttgtnnnnnnnnnnnnnnnnnnnnnnnnnnnnnnnnnnnnnnnnnnnnnnnnnnnnnnnnnnnnnnnnnnnnnnnnnnnnnnnnnnnnnnnnnnnnnnnnnnnnnnnnnnnnnnnnnnnnnnnnnnnnnnnnnnnnnnnnnnnnnnnnnnnnnnnnnnnnnnnnnnnnn

SEQ ID NO: 4486 - DNA, 547 bp, Zea mays
  misc_feature (453)..(453): n is a, c, g, or t
  misc_feature (479)..(479): n is a, c, g, or t
  misc_feature (501)..(501): n is a, c, g, or t
  misc_feature (509)..(509): n is a, c, g, or t
  Peptide Sequence Number=SeqID_10541
  Probeset Number=SeqID_18889
ccggccgggacgacctccctgccgagctccctccctctccgttggtgatggcatctccggagctccaagaccgcggacaccgccgcgcctccgccggaggttgcagccaccggagaggcggctccgggcgcggcttcttcaacaccggcacaaaaccctaacgctgctgcaaccgcagtggccggggccacggatctagagacgatgatgcgccgcgcggagcgctttgggacgccagtactggtgccacaggagcatctgcgcagcagccgcgccgagcgatttccgactggctcttcgagtgtaaaggaggaagagaataagaagtccagggctgagaggtttgggcttgcctcgccctcttcttcagatgaggaagctaagaaaaaggcccggttggaacgatttggtcagagcgcaatgtcgacaaggtcgaaaaaaaaaaaaaaaagngcccggtctttttttttttttttccnaacacaagaaaaatactgaggnattacagnaatccacagaatcgggggataacgatagaaattgacat

SEQ ID NO: 4487 - DNA, 695 bp, Zea mays
  Peptide Sequence Number=SeqID_10542
  Probeset Number=SeqID_18890
attcggctcgagaatttctattatcttgctctttggatcaaacaataaaagtttgggccgctacagagagtggaaacttagaagtaacatatacacacaaagaggatcagggtgcacttgccctcagtggtatgcctgacgcacagtcaaaacctgtgctactgtgttcattaaatgacaacactgacgacttatatgatcagccatctttcaccgacagaggcacattatcatccacaaaagaaataagggcaagacatatggttcctggtgctttaattattacggggggggggagtggagagctcaaggccaggaggggggtagagggagccgaggcgtagcgaaagttgggggccgtcggagagtcggcattggggatctaacccgcgcgccggggcggagcggaagaaggccgagggcggcggccggcggccaacgctcgtccaggaggaccagcagcacgcgcccgcggggccccgcgtcgcggcccttcacagcctcgagcgcgagaggggacgagaaggcagcggcgaggggggggatgtggcgccacgtcgccatagttgggcggatctcggggcgcgggggtgtggcggggcagccagcagcgacggaggcagcaacgcgggatgtagaggaggcgcgcaagtgtggcaaggagaggaagggggccgtctaggccgtccgattgg

SEQ ID NO: 4488 - DNA, 1033 bp, Zea mays
  misc_feature (1)..(1): n is a, c, g, or t
  misc_feature (1003)..(1003): n is a, c, g, or t
  misc_feature (1012)..(1012): n is a, c, g, or t
  misc_feature (1017)..(1019): n is a, c, g, or t
  misc_feature (1024)..(1025): n is a, c, g, or t
  misc_feature (1027)..(1028): n is a, c, g, or t
  Peptide Sequence Number=SeqID_10543
  Probeset Number=SeqID_18891
ngagaagttgtagcggatatacaaagggggtgtatttgtcgtgggaaaaggggggtcaaggcgagggggtgggaggggcctgaaggtgtggggagggtggtgggggatgggtggaccccatgtaaacgtggagagccggggagttgagatgagaagagagacaaagagtgatgggagaaggataacacggcaaggaagtgtataccagggcagaatgaatggactttaaatggtattacgtgtacctattccagagggggagctgagtaggtgaggacctgtgtaaagcaaaaagttgggagtgacaccagagcctcctgcaagatgcttctgattctgctgtcagtggccctgctggccttcagctcacctcaggatttaaatgaagatgtcagccaggaagatgttcccctcgtaatatcagatggaggagactctgagcagttcctagatgaggagcgtcagggaccacctttgggaggacagcaatctcaaccctctgctggtgatgggaaccaggatgatggccctcagcagggaccaccccaacaaggaggccagcagcaacaaggtccaccacctcctcagggaaagccacaaggaccaccccaacagggaggccatccccctcctcctcaaggaaggccacaaggaccaccccaacagggaggccatccctgtcctcctcgaggaaggccacaaggaccaccccaacagggaggccatcagcaaggtcctcccccacctcctcctggaaagccccagggaccaccctccccaaggggggccgccccacaaggacctccacagggggcagtcctccctcagtaatctaggattcacatgacgaagtgaaataagaagaaaaacagttgtttccaatggccgttgaaacatgggatgcatggctctaaacttcagtataccaaaaaacacccgtgttgagggggtgtggatgaatattaatgtagaagaaatgggatataatatgaaataaggaaanttggagganaaaannnaaaannannaaaat

SEQ ID NO: 4489 - DNA, 411 bp, Zea mays
  Peptide Sequence Number=SeqID_10544
  Probeset Number=SeqID_18892
attaaaaaaataaaagcataggttcacaaagctggggtaaagagaaaagtttctttttatgtgtttagacaagtaatatccagcgagattttactcgttgccatctcaaatcctaggttactccagatattgcctatacccaaccaagcctggcaagtggtctagctgaacttcattgaagggttgccccgatccggtacaactaactgtatccttgtggtggttgatacgttcagtaagtatgcccatttcatcggcttgcttcatccattcactgccgttaaagtgcctcaagacttcatggcaaacgtatacaaacttcgtggacctcacgctctggtatcagatagagaccgtatcttcaccagccatatttggcaagaactcttccgcctttcaggtatcaaactg

SEQ ID NO: 4490 - DNA, 547 bp, Zea mays
  Peptide Sequence Number=SeqID_10545
  Probeset Number=SeqID_18893
aatcacggactcatccacccacctccttccacggttccatccgcgccgttcacggcacggcgaagcccggccgccccacccaccaccgcctttctccttcccccgcgccgatcaccctgcggcggccactgcccacccctagggtcagagctctggtagcccgctgatcgatcctcacgtcctcctcttaaaagatttggatggtagatccctgaattgagatgcggctcgagagcaacttaatgtagggcacctccattggcagagtgctgtcgatgctatcactgctcctgaaccttcttactgctaattattcaggtgcgggcatctcgaattacagcatgctcatggacgtaatacttccatctggaataaggcctcgaccacggaggctgtgcggtccattggtccctcgagatcacttgcatcctttttcgaaacctaccaaaccatatgcagctcccagtaagcataatggttttacttatacaaagatatatggtggctttgagaagatacagtctacaatctgtgaccttgttgccgt

SEQ ID NO: 4491 - DNA, 501 bp, Zea mays
  misc_feature (204)..(204): n is a, c, g, or t
  misc_feature (250)..(250): n is a, c, g, or t
  misc_feature (255)..(255): n is a, c, g, or t
  misc_feature (318)..(318): n is a, c, g, or t
  misc_feature (344)..(344): n is a, c, g, or t
  misc_feature (349)..(350): n is a, c, g, or t
  misc_feature (399)..(399): n is a, c, g, or t
  misc_feature (409)..(409): n is a, c, g, or t
  misc_feature (411)..(411): n is a, c, g, or t
  misc_feature (416)..(416): n is a, c, g, or t
  misc_feature (427)..(429): n is a, c, g, or t
  misc_feature (450)..(450): n is a, c, g, or t
  misc_feature (460)..(461): n is a, c, g, or t
  misc_feature (467)..(467): n is a, c, g, or t
  misc_feature (485)..(485): n is a, c, g, or t
  misc_feature (492)..(497): n is a, c, g, or t
  misc_feature (499)..(500): n is a, c, g, or t
  Peptide Sequence Number=SeqID_10546
  Probeset Number=SeqID_18894
aagaccaccgacgcgtagcacagtccattattgccgtctcccttttgcgtgagcaaagaaagagagcgagaagagcagtcgccatgtctggcatcatccacaagatcgaggagaagttccacatggggggcgaccacaagaataaggaggaggacaccacaaggaaggccgaggagccaccacaaggaagggaggagggggagnaccacaagaaagggacggcgggaggccacaagggaaggcttccgtnggagnaagatcaaggacaagaatcaccggcgagaccgggggaaaaaagtccggcgaccacaaaggggnaaaagaaggacaagaaaaagaagagnccccnnggcgagggcacgaccccccgacgggcggccacagtagcagcagagcganggcgactggngnaaaantttgggtgtcnnnagcacaggtgcaacaccatgnatggttgggnngggggnggggaggattcataccanttatggnnnnnngnnc

SEQ ID NO: 4492 - DNA, 830 bp, Zea mays
  Probeset Number=SeqID_18895
aagtctattgctatggatgcgaatgctatcctcctaactccttttctgatacccgcctcaaataacaatgcacctgctttactgtctcccgaggaagatatatgcgtacctccacatatctataccgattcggataacctctctatctgcttactggagatgcaaacttagcttctgctttgcaaacaactgatacctatcttactgaatcaggccagatatctcccactgcagacactagaaccatctatgggaacttcctccgcgaacaacatcccaagggcatacacacacggcccacacatttatttcatggaccactagtgaaatcggatttgcctcatagcatacaggtgacatggcaattccgttaaagacctcagatctcagattcgctcgatataatacttgaaccctcctggtcaactttggctccaaggacttacctgatgatcatagttcaacatgagggtacacttgtgctaccagacaagctaagagctgcgttctgctacatgaccttgcgtatcaccctgtctacctgaggcaaatccttctcaccttgtgccaatgaatcaagatgtagctgtttgctgatgcacttttagtacgacttcacgttgcaagtccatatgagccctccatgctgccagtgtcgaaacctgccctgccccggtcggagtggaacctgtagcttcaagatgaggacctggtcccattcccgtagctggaatagggttcccgttccctctctatggcgccccgcctccctgtcccggcccccggatcgcttgccttcgtctggtgggagctccaatgagtactggttt

SEQ ID NO: 4493 - DNA, 915 bp, Zea mays
  misc_feature (1)..(314): n is a, c, g, or t
  misc_feature (638)..(638): n is a, c, g, or t
  misc_feature (915)..(915): n is a, c, g, or t
  Peptide Sequence Number=SeqID_10547
  Probeset Number=SeqID_18896
nnnnnnnnnnnnnnnnnnnnnnnnnnnnnnnnnnnnnnnnnnnnnnnnnnnnnnnnnnnnnnnnnnnnnnnnnnnnnnnnnnnnnnnnnnnnnnnnnnnnnnnnnnnnnnnnnnnnnnnnnnnnnnnnnnnnnnnnnnnnnnnnnnnnnnnnnnnnnnnnnnnnnnnnnnnnnnnnnnnnnnnnnnnnnnnnnnnnnnnnnnnnnnnnnnnnnnnnnnnnnnnnnnnnnnnnnnnnnnnnnnnnnnnnnnnnnnnnnnnnnnnnnnnnnnnnnnnnnnnnnnnnnnnnnnnnnnnnnnnnnnnnnnnnnnnnnncgccgacgaggacgaggcgaccatggcgttctcctccagctgaccgtcgttccactcggaggacttcgtatccccgccggccaatcccaaggcgccacctccacctaaacagcgtagcaagaggtgccgcgcggaggtctcccggctgcgcgcgaatgcttgccgcgaacatcgccggaagggaccgacatgtcgggaatcggagcgcggatcacgggtacgctctacggccgcgccgaacccgcaggaacggcggcgtcgtgcactggtccgcgtcgcacgtgcggctgcacgcctgctgcttgctcgcgtcgtcgccggcgnactggacgccgacgttgagcgcggcggcgggcggcgagaagagggacgcgcagacaagggtgccggcgaccaccgtgagccgccaggaactgccgcgctccatcgtcctcacgggagctctagaacgaattagtctctctctcccaccgcgcgccggcacgcactagctctctctggtctagtctggtctgtcgtgacggcacggcacggcctgccgtccctggagaggagagattatctaggggcggcgaactggtctcactcaactgcagttgcn

SEQ ID NO: 4494 - DNA, 521 bp, Zea mays
  misc_feature (2)..(2): n is a, c, g, or t
  misc_feature (6)..(6): n is a, c, g, or t
  misc_feature (29)..(29): n is a, c, g, or t
  misc_feature (32)..(34): n is a, c, g, or t
  misc_feature (43)..(43): n is a, c, g, or t
  misc_feature (47)..(48): n is a, c, g, or t
  misc_feature (52)..(53): n is a, c, g, or t
  misc_feature (55)..(56): n is a, c, g, or t
  misc_feature (59)..(59): n is a, c, g, or t
  misc_feature (63)..(65): n is a, c, g, or t
  misc_feature (67)..(68): n is a, c, g, or t
  misc_feature (73)..(74): n is a, c, g, or t
  misc_feature (82)..(82): n is a, c, g, or t
  misc_feature (86)..(86): n is a, c, g, or t
  misc_feature (90)..(90): n is a, c, g, or t
  misc_feature (96)..(97): n is a, c, g, or t
  misc_feature (99)..(100): n is a, c, g, or t
  misc_feature (104)..(104): n is a, c, g, or t
  misc_feature (106)..(106): n is a, c, g, or t
  misc_feature (110)..(110): n is a, c, g, or t
  misc_feature (112)..(114): n is a, c, g, or t
  misc_feature (116)..(116): n is a, c, g, or t
  misc_feature (119)..(119): n is a, c, g, or t
  misc_feature (122)..(122): n is a, c, g, or t
  misc_feature (127)..(128): n is a, c, g, or t
  misc_feature (131)..(131): n is a, c, g, or t
  misc_feature (133)..(134): n is a, c, g, or t
  misc_feature (136)..(136): n is a, c, g, or t
  misc_feature (139)..(139): n is a, c, g, or t
  misc_feature (142)..(142): n is a, c, g, or t
  misc_feature (145)..(146): n is a, c, g, or t
  misc_feature (152)..(152): n is a, c, g, or t
  misc_feature (154)..(154): n is a, c, g, or t
  misc_feature (159)..(161): n is a, c, g, or t
  misc_feature (163)..(163): n is a, c, g, or t
  misc_feature (165)..(165): n is a, c, g, or t
  misc_feature (172)..(172): n is a, c, g, or t
  misc_feature (175)..(175): n is a, c, g, or t
  misc_feature (178)..(179): n is a, c, g, or t
  misc_feature (181)..(181): n is a, c, g, or t
  misc_feature (186)..(187): n is a, c, g, or t
  misc_feature (189)..(189): n is a, c, g, or t
  misc_feature (195)..(195): n is a, c, g, or t
  misc_feature (203)..(203): n is a, c, g, or t
  misc_feature (206)..(208): n is a, c, g, or t
  misc_feature (210)..(210): n is a, c, g, or t
  misc_feature (212)..(212): n is a, c, g, or t
  misc_feature (217)..(217): n is a, c, g, or t
  misc_feature (224)..(224): n is a, c, g, or t
  misc_feature (229)..(231): n is a, c, g, or t
  misc_feature (239)..(239): n is a, c, g, or t
  misc_feature (245)..(246): n is a, c, g, or t
  misc_feature (248)..(248): n is a, c, g, or t
  misc_feature (253)..(255): n is a, c, g, or t
  misc_feature (257)..(257): n is a, c, g, or t
  misc_feature (259)..(260): n is a, c, g, or t
  misc_feature (263)..(263): n is a, c, g, or t
  misc_feature (265)..(265): n is a, c, g, or t
  misc_feature (270)..(270): n is a, c, g, or t
  misc_feature (273)..(273): n is a, c, g, or t
  misc_feature (279)..(279): n is a, c, g, or t
  misc_feature (286)..(287): n is a, c, g, or t
  misc_feature (293)..(293): n is a, c, g, or t
  misc_feature (299)..(299): n is a, c, g, or t
  misc_feature (301)..(301): n is a, c, g, or t
  misc_feature (313)..(314): n is a, c, g, or t
  misc_feature (400)..(400): n is a, c, g, or t
  misc_feature (413)..(413): n is a, c, g, or t
  misc_feature (416)..(416): n is a, c, g, or t
  misc_feature (425)..(425): n is a, c, g, or t
  misc_feature (446)..(446): n is a, c, g, or t
  misc_feature (448)..(448): n is a, c, g, or t
  misc_feature (457)..(458): n is a, c, g, or t
  misc_feature (462)..(462): n is a, c, g, or t
  misc_feature (475)..(476): n is a, c, g, or t
  misc_feature (485)..(485): n is a, c, g, or t
  misc_feature (488)..(488): n is a, c, g, or t
  misc_feature (502)..(502): n is a, c, g, or t
  misc_feature (518)..(518): n is a, c, g, or t
  Peptide Sequence Number=SeqID_10548
  Probeset Number=SeqID_18897
antganggaggaggaagggcaaggggagngannnggtgagagnaacnnattnntnngcngagnnntnngtagnngaacttanaatnaganggatcnnanngcgncngagncnnngnganaanctgannggnannanggnagnaannagaggncncgcgnnnangnagagagnctncannanaacgnntntggganagggaganatnnntnangacgngagatangcggnnnaatacaanctaaanncngtcannngngnnggngnggcantangagctncatgacnnccttgnatgtcncngcctccagttcnnccactgttgtgctagaggtggtggtgacggtggtgacacttgaaacatgttccataaaggtcactgatacaaagagaatggtgaancataataataatnacngaactcttnccattgttttatgttgtttangnttttatatnntgtnttctttttggttnngttttggtntanaatgaaggagtaantttgaagaatgaatgngac

SEQ ID NO: 4495 - DNA, 834 bp, Zea mays
  Probeset Number=SeqID_18898
cttttttttttattatttatttatttgcattagaatgcatttcgcatagtaaaaatcagaatctcgatccagcgtcatgattcatcatatgtgtgagactggcgccaagcccatctggtgacaataacgcgtccgggtcttgtgccccgaaaccacacagtgacagtgaaggtgatctcgcacacggcacacggcctttctgggcgcgctggctcatcatccgtctcaccgcctgtcctggagaggtttcgagcgatatacatcctatcctatcagatctagctctcgcccgcgtctcgattgggcgcgcagctcttccattgcgtcgcccagctcatccatggagtactccagcttgttggcaagagcgaggagcgccttcttgcgctcttcgcccccgcacaaggcgatcacacggccgaggtcaatgcacaggaaggcggcctttagccggatgtccctcccaacaaggtcccacgagccctcgtcgtccgtgtccaggtccgcctccatcgccgagaagagctcgacagcgcagcctgatccggcagagacaccccttctgctcgaggcctttagccggaggtccctcccaacaaggtcccacgagctgctctcgtcggccgtgtccaggtcctcctccatcgccgagaagagctcgacagcgcagctcctgatccggcaaagacaccccttctgctccatctcgtgctccaccatcgcccgctctgtgtacgcgagggagatcaaggcctgtggcaagtagttatgggataatgagggcacgacggaagaaggcaagtgacagcccggccggcctcgaggtacccaatg

SEQ ID NO: 4496 - DNA, 500 bp, Zea mays
  misc_feature (204)..(204): n is a, c, g, or t
  misc_feature (307)..(307): n is a, c, g, or t
  misc_feature (320)..(322): n is a, c, g, or t
  misc_feature (325)..(325): n is a, c, g, or t
  misc_feature (333)..(333): n is a, c, g, or t
  misc_feature (351)..(351): n is a, c, g, or t
  misc_feature (354)..(354): n is a, c, g, or t
  misc_feature (356)..(358): n is a, c, g, or t
  misc_feature (361)..(361): n is a, c, g, or t
  misc_feature (366)..(371): n is a, c, g, or t
  misc_feature (373)..(373): n is a, c, g, or t
  misc_feature (378)..(386): n is a, c, g, or t
  misc_feature (388)..(388): n is a, c, g, or t
  misc_feature (390)..(394): n is a, c, g, or t
  misc_feature (397)..(397): n is a, c, g, or t
  misc_feature (399)..(401): n is a, c, g, or t
  misc_feature (403)..(407): n is a, c, g, or t
  misc_feature (409)..(411): n is a, c, g, or t
  misc_feature (414)..(420): n is a, c, g, or t
  misc_feature (422)..(422): n is a, c, g, or t
  misc_feature (424)..(424): n is a, c, g, or t
  misc_feature (427)..(427): n is a, c, g, or t
  misc_feature (430)..(445): n is a, c, g, or t
  misc_feature (447)..(500): n is a, c, g, or t
  Peptide Sequence Number=SeqID_10549
  Probeset Number=SeqID_18899
ctctcgcgccgccacttccctcccgacccactagcccaaaaccgtagcgcccgccgccgtcgttgcgagctccccatcttcctccgtcaaccatggcgacccagatcagaaagaagaagaagttcgtcagcggacggcgtgttctacgccgagctcaatgagatgctgacgcgggaggctcgcggaggacggctactccggggngtgggaggtgcgcgtcacaccgaggcggcacggagatcatcatccgcgccacgcgcaacgcagaacgtgttcgggcgagaaggggccgcagggatcagggagntcacgtctgtcgnnncanaaagaggntcaacttccccgagaaanggngnnnagntctannnnnnanaaggnnnnnnnnngngnnnnntgngnnntnnnnnannntgnnnnnnncngntanagnnnnnnnnnnnnnnnngnnnnnnnnnnnnnnnnnnnnnnnnnnnnnnnnnnnnnnnnnnnnnnnnnnnnnn

SEQ ID NO: 4497 - DNA, 758 bp, Zea mays
  misc_feature (217)..(217): n is a, c, g, or t
  misc_feature (601)..(758): n is a, c, g, or t
  Probeset Number=SeqID_18900
cggggtggggtggcggtcgccctgttatcgcccgctcagaggggcggaggcctgggggagtgacgcggcgcaacccgaggagagcgcgtcagcgccgcgcgcgagcggccctaagtgataattcatattaataatgctagcgatttgctatgttttcttctcgagaaattgggtatttcattgcactgggagtcaaaaaaaaaaaaaaaaagcttanccgattcccctcctattcctctgagttgagagtgcattttatctaagaaactacttccagctcctccttactattactattatgttagaaattgtttgttgtaagataagagatatgttagggcttcttcagtttcctctcaatctatatggattgtaggggattaggtgggattaaatccatagcaagttaaaatccttcatattttttttcaatctcttccaattcataagacatagaaataaccgaggaatgccttattgtttttgcacgagaatttgggtatttatttgtcctttgaggacgggaaaagaaaagaaaagcttatgggtaccgggggcctcggggctgggacgggggccccgcgcgctcaatacggcgcgnnnnnnnnnnnnnnnnnnnnnnnnnnnnnnnnnnnnnnnnnnnnnnnnnnnnnnnnnnnnnnnnnnnnnnnnnnnnnnnnnnnnnnnnnnnnnnnnnnnnnnnnnnnnnnnnnnnnnnnnnnnnnnnnnnnnnnnnnnnnnnnnnnnnnnnnnnnnnn

SEQ ID NO: 4498 - DNA, 723 bp, Zea mays
  Peptide Sequence Number=SeqID_10550
  Probeset Number=SeqID_18901
ctctcaggatgtgacgctaacacctctgtctgtccatcctactcacaatctctaatattgccctacttcccccagaccgtctatctgagaccgcttccatgtgagagaagccatttcctcttgcccgtacactgacgcctccgagtacggacaatctccgtacctgtatcacccgatgatctttcaaacaacacacgtgctatctatgcggcatactgaggaacaaaatgtccgggtactgcaactgcatgaactcaagctactggtgatatgcctgcgacgtcagcaaaaactttctcctcactctcaatgacaacgattacctccattcaaccatatggctacactgaatcactgctgcttatgttgaagcaaccacagctacgtagcatgaaatctaactatgtactgcatcactctcatcagcaccgatttcctgcattgtatgcaattctaccgctacgtgaactccctctgacttgatctccactcttgaataatattaccctttgcgaaagtatctacaaccactatcgcttgctgctagacatatatgcgattgcgtccgttctatccgcacccggtgtctaagcacggaacgaccgttctactcgaacagcagctgtgctctgttcaactcgtgtagacatactcgactaccttatacggcgaccactccctggccgtgtgcatctctacactgacgaatacgtggcgtcataa

SEQ ID NO: 4499 - DNA, 969 bp, Zea mays
  misc_feature (969)..(969): n is a, c, g, or t
  Probeset Number=SeqID_18902
tcccccccccccccccgacgccgaccgcactccgctccgcatccatcatcccagcgcgatggctggcaggaccgtgcccgcctccctcccctccttctccctcacgcccgactccctcgctgcccctttatcctggatctcgtcatggacgccaccacgaccaacggttcgacggagcacgcgtcgcacgctgcgccccgggacggagttcgacctcacccgagaccggtcacctccatcccgagctcctccgagaaccgattattatgttgctcctacccttataccggttaatatgtatgcaacgaccactcccagattagtgccacacgtttcccggcttgctcgccacttgacacacctctggtggccctcaagacccccacaatctccctccaacgcccccccggctaacaaaaatcccgccgacgtctcccttattctaacccactatatcatcttttgtctccccccggaaaacaacccccactatcggctctcccgtctccttcatcccagcacatactcccggcctctccccatgtctatccaccgcccaacagttgtatctaccaacaatatctcccacctcgcctcgaaacacaacccccgtccttccttaccacgcgtctggcagcgtaaccttaaaagatatctttctccacgccatcaaaaacattcttacgttaaccctcactccgcgggagcgtgctatcgccgcgaaccacatcacacccccctcttcaatacaacgcctcttcctccttccttcacatcagctctgtcaaaacttgagataagtctctttttctatacatcatcacccacaacactctcttggtttctctccctataaccgccacccgcccatccctatctcttctatcctctgttccgctcgaccccaaaccaacctaatacataacgcacccacacagcaaataaataaacaatataagataaataggn

SEQ ID NO: 4500 - DNA, 652 bp, Zea mays
  misc_feature (601)..(652): n is a, c, g, or t
  Peptide Sequence Number=SeqID_10551
  Probeset Number=SeqID_18903
atggactgtgccctcaacccggcctggctgctcgaggtcgtcggccaataccgacgctggcctcatgccgacctgcgccacggcatccagctgctgaacagaacagcgggtggcagtggcaaggcatcgatcggcggcatgctttcgtcgggcctctacctcaacgacctcgttgcccgctcaggcgccatcgacgtgtccgtttactaccgcctcgcgtcggagcacaagctgcccgctgcgtacgacgacgcgtgggcagcgctgcggtgggcggtgacgctcggcgaggacctgtggctgctggagcacgccgacctgtccggcgtgttcctggtgggctgcagcgccggcgccaacatcgtgcacgacacggcccgtgcgagcctccgccgccggcgtggccatccgcgggctcgccttagtgcccccgtacttcactggtagggaggccatgggcggcgagacggtgttcggccccgagatccggtcgtccatggaccggacttggcgagacgacgttcgtggacgacgcggcgcgcaaggcctccgcgcgtgctggcaaccagagtaccgcggactgtgtcgttggcctttcgcnnnnnnnnnnnnnnnnnnnnnnnnnnnnnnnnnnnnnnnnnnnnnnnnnnnn

SEQ ID NO: 4501 - DNA, 490 bp, Zea mays
  misc_feature (12)..(12): n is a, c, g, or t
  misc_feature (34)..(34): n is a, c, g, or t
  misc_feature (63)..(63): n is a, c, g, or t
  misc_feature (96)..(96): n is a, c, g, or t
  misc_feature (106)..(106): n is a, c, g, or t
  misc_feature (123)..(123): n is a, c, g, or t
  misc_feature (152)..(152): n is a, c, g, or t
  misc_feature (199)..(199): n is a, c, g, or t
  misc_feature (202)..(202): n is a, c, g, or t
  misc_feature (311)..(311): n is a, c, g, or t
  misc_feature (318)..(318): n is a, c, g, or t
  misc_feature (329)..(329): n is a, c, g, or t
  misc_feature (338)..(338): n is a, c, g, or t
  misc_feature (349)..(349): n is a, c, g, or t
  misc_feature (356)..(356): n is a, c, g, or t
  misc_feature (362)..(362): n is a, c, g, or t
  misc_feature (364)..(364): n is a, c, g, or t
  misc_feature (368)..(368): n is a, c, g, or t
  misc_feature (387)..(387): n is a, c, g, or t
  misc_feature (398)..(399): n is a, c, g, or t
  misc_feature (405)..(405): n is a, c, g, or t
  misc_feature (417)..(417): n is a, c, g, or t
  misc_feature (435)..(435): n is a, c, g, or t
  misc_feature (442)..(442): n is a, c, g, or t
  misc_feature (449)..(449): n is a, c, g, or t
  misc_feature (456)..(456): n is a, c, g, or t
  misc_feature (469)..(469): n is a, c, g, or t
  misc_feature (471)..(471): n is a, c, g, or t
  misc_feature (476)..(476): n is a, c, g, or t
  misc_feature (478)..(478): n is a, c, g, or t
  misc_feature (480)..(480): n is a, c, g, or t
  misc_feature (482)..(482): n is a, c, g, or t
  misc_feature (484)..(484): n is a, c, g, or t
  Peptide Sequence Number=SeqID_10552
  Probeset Number=SeqID_18904
ggctcaagatcncaacaccttccacgtgccctgnctgagggaagaaatcaaaccctctcaagntctcaatctcatatctcctcccctcaccctcgnccctgaccanaaccccaacatctctcncctgcgtatgcacattgcaactaacatanaccaccctcctcggcccaaacctcctcaattgatccaagaaatccgnatngcaccctttcctcggcggatctagtaccacaactgtctcatcggcaggatactctactgatttgaagagatcacctgcgtcgggggcgatgaaggtgcaacgctcgggngtgaggntgttgagggangcgttgtgnccgccgcaaangatggantcgggngncgangtccaatgccccatggagngggtgaatacnngagganaaagtgattgtnaaaaggcccgaaacccgnactaagncgtcganaaaaaantttgaatttgggnangaggntntngnantattat

SEQ ID NO: 4502 - DNA, 519 bp, Zea mays
  misc_feature (169)..(169): n is a, c, g, or t
  misc_feature (181)..(181): n is a, c, g, or t
  misc_feature (196)..(196): n is a, c, g, or t
  misc_feature (198)..(198): n is a, c, g, or t
  misc_feature (213)..(213): n is a, c, g, or t
  misc_feature (218)..(218): n is a, c, g, or t
  misc_feature (221)..(221): n is a, c, g, or t
  misc_feature (254)..(254): n is a, c, g, or t
  misc_feature (267)..(267): n is a, c, g, or t
  misc_feature (285)..(285): n is a, c, g, or t
  misc_feature (299)..(299): n is a, c, g, or t
  misc_feature (311)..(313): n is a, c, g, or t
  misc_feature (320)..(320): n is a, c, g, or t
  misc_feature (327)..(327): n is a, c, g, or t
  misc_feature (331)..(331): n is a, c, g, or t
  misc_feature (338)..(339): n is a, c, g, or t
  misc_feature (351)..(351): n is a, c, g, or t
  misc_feature (370)..(371): n is a, c, g, or t
  misc_feature (374)..(374): n is a, c, g, or t
  misc_feature (380)..(380): n is a, c, g, or t
  misc_feature (382)..(382): n is a, c, g, or t
  misc_feature (386)..(390): n is a, c, g, or t
  misc_feature (395)..(397): n is a, c, g, or t
  misc_feature (405)..(406): n is a, c, g, or t
  misc_feature (416)..(419): n is a, c, g, or t
  misc_feature (422)..(422): n is a, c, g, or t
  misc_feature (425)..(425): n is a, c, g, or t
  misc_feature (427)..(427): n is a, c, g, or t
  misc_feature (434)..(434): n is a, c, g, or t
  misc_feature (441)..(442): n is a, c, g, or t
  misc_feature (451)..(451): n is a, c, g, or t
  misc_feature (456)..(456): n is a, c, g, or t
  misc_feature (465)..(465): n is a, c, g, or t
  misc_feature (471)..(472): n is a, c, g, or t
  misc_feature (480)..(481): n is a, c, g, or t
  misc_feature (486)..(486): n is a, c, g, or t
  misc_feature (488)..(489): n is a, c, g, or t
  misc_feature (491)..(492): n is a, c, g, or t
  misc_feature (496)..(496): n is a, c, g, or t
  misc_feature (503)..(503): n is a, c, g, or t
  misc_feature (507)..(507): n is a, c, g, or t
  misc_feature (509)..(509): n is a, c, g, or t
  misc_feature (513)..(515): n is a, c, g, or t
  misc_feature (517)..(517): n is a, c, g, or t
  Peptide Sequence Number=SeqID_10553
  Probeset Number=SeqID_18905
aaaacagctcgtccagtagtaccatttgcaattgcattgcctcacctcatccccacctcacctctcctctcctctcctcgggctcacttcacaagttcacatcacgaaacaggagcgtcataaagacatgggcgtcgcagggtagcctcagaccagtgacgcagcggcnagcggcagcggncatggggtcctgagngnctgactgcgaaaganatggntgnagcgcgacggcccccggagccattaatgggggngctcctcttcctngtccttccccctcctcgncttccttccccgtngggtcggggaannnggttggntccgccntttnaaacggnnctggcccggaanacggggtggtcctaaaccnnaanggttgntntgcnnnnnccccnnnggtcttcnnatctcctatnnnnggnggncnctccccngctcccnnttcttctcntcccncctcctccncgctcnnaccccccnnaccgncnncnncccnactcccnttcncncccnnncncc

SEQ ID NO: 4503 - DNA, 469 bp, Zea mays
  Probeset Number=SeqID_18906
gtcaggcctcccattcagcgcagcgcaggtctcaaggaagggggacgcgaaggaagacgccgctcacgatcgggaaggtcttcagccggctcttcacccagatcgacatcctgatcctcatgcacatcctcaacgccggccacaaaaccaccattctatacaagctcatgctcggcacatcgtcaccaccatccccaccatcatcttcaatgttgaaactgatgattacactaacattagcttcactgtctgcgacgctgactgtcatgacaagatcaaacctatgagcaggcattacttgcagaacacccagcgtctcatccattgtgtgaacagcaatgaccgcaaccgtgaccgtgaacccagagatgaactccacaagatgctgcacgaggatcagctacatgatgctctgctgcttgcttttgtcaacgagcaagatctccccaatgacctgactgctgccgag

SEQ ID NO: 4504 - DNA, 458 bp, Zea mays
  Peptide Sequence Number=SeqID_10554
  Probeset Number=SeqID_18907
ttttttttttttttttttttttttttttttttttttttttttttttttttttaacaacaaatccctgcatttaaattttaaatccggcacgaaacggacatgaccgggagccctttacacagatgaacatgaaccccaggagcgaccatggatcgataatggggggggcagttgacaggatcttatttaaaccctgctattaattatatttatacccctcgggggcgtcgtccttttaacttttgggccccattcccgggccgggcgggccggtttaattgcagttgcaacaggagcacccccagttggggccccaattgcaggtgttgcaatcccaacccccccccttgggggcccccttaaaacccccggcgctggccttgggggtcggcccaaggaggaccatggtttttattctgttggcggggggggtctccacgtaaggggacatgcatttg

SEQ ID NO: 4505 - DNA, 665 bp, Zea mays
  Probeset Number=SeqID_18908
gtgcatttagcacgaaccatcgagttacagtcgataacaccgtcctactccaaaaagcaccttgaggggcaacccgggtgcgcggtcggacccgaaacaccgacaattcccacgacacgatcatctttggagatgagaaccaagacaagataaaggggttaggtaagatagcgattactacagagcattcaatttctaatgtctttttggtggaatcgcttggttacaatttacatttcgttagccagttatgtcacatgttctataatcgtttatttacaaatgttgatgtaactatttttagaagaagtgatggttcattggcttttaaaggtgtattagatgaaaagctttatttggttgattttaacaaaaagaatgtcgatctaggtgcatgtttaattgctaagactaacatgggctggttgtggcatcgtcatctaacacatgttgcgatgaagaactttcataagcttctaaagggagaacatgtgttaggactaactgatgtctgttttgagatagacagaccttgtgcagcatgccagacatgaaagtaggtgggaacaagtcatccaagcaagaacattaagactagaatcacaaacctgaccttgctacccgataatattttgggttagattcgccatttattggatggtggg

SEQ ID NO: 4506 - DNA, 544 bp, Zea mays
  misc_feature (76)..(76): n is a, c, g, or t
  misc_feature (85)..(85): n is a, c, g, or t
  misc_feature (89)..(89): n is a, c, g, or t
  misc_feature (91)..(91): n is a, c, g, or t
  misc_feature (150)..(150): n is a, c, g, or t
  misc_feature (179)..(179): n is a, c, g, or t
  misc_feature (228)..(228): n is a, c, g, or t
  misc_feature (250)..(250): n is a, c, g, or t
  misc_feature (265)..(265): n is a, c, g, or t
  misc_feature (273)..(273): n is a, c, g, or t
  misc_feature (276)..(277): n is a, c, g, or t
  misc_feature (286)..(286): n is a, c, g, or t
  misc_feature (291)..(291): n is a, c, g, or t
  misc_feature (301)..(301): n is a, c, g, or t
  misc_feature (315)..(315): n is a, c, g, or t
  misc_feature (347)..(348): n is a, c, g, or t
  misc_feature (359)..(361): n is a, c, g, or t
  misc_feature (364)..(364): n is a, c, g, or t
  misc_feature (377)..(377): n is a, c, g, or t
  misc_feature (380)..(380): n is a, c, g, or t
  misc_feature (388)..(388): n is a, c, g, or t
  misc_feature (394)..(394): n is a, c, g, or t
  misc_feature (399)..(399): n is a, c, g, or t
  misc_feature (420)..(420): n is a, c, g, or t
  misc_feature (423)..(423): n is a, c, g, or t
  misc_feature (454)..(454): n is a, c, g, or t
  misc_feature (457)..(457): n is a, c, g, or t
  misc_feature (460)..(460): n is a, c, g, or t
  misc_feature (468)..(469): n is a, c, g, or t
  misc_feature (474)..(474): n is a, c, g, or t
  misc_feature (476)..(476): n is a, c, g, or t
  misc_feature (498)..(498): n is a, c, g, or t
  misc_feature (502)..(503): n is a, c, g, or t
  misc_feature (508)..(508): n is a, c, g, or t
  misc_feature (511)..(511): n is a, c, g, or t
  misc_feature (514)..(516): n is a, c, g, or t
  misc_feature (519)..(519): n is a, c, g, or t
  misc_feature (523)..(523): n is a, c, g, or t
  misc_feature (525)..(525): n is a, c, g, or t
  misc_feature (529)..(531): n is a, c, g, or t
  misc_feature (534)..(534): n is a, c, g, or t
  misc_feature (536)..(538): n is a, c, g, or t
  misc_feature (540)..(540): n is a, c, g, or t
  Peptide Sequence Number=SeqID_10555
  Probeset Number=SeqID_18909
tatctctcttgtccgtgcgcatcggattttggaaaccattgatgcagacctcaatccatctctaacaccactgatntatctactnaggncntctctaacaatacttgtaattttgtttctttttgcttcttccgtcactatatctatggncgctgagtcttctaaccctcgcaccgtcnaagagatcttcaaggattttagcggccgccgctccggttttctttgagntctctccgaaaatgttgacaanttctactctttatgngatcccgnaannggagaatcngtggntggacggganacccgaatgggacntggcgaagtgaatcttaccagactggaggaanngccctccggannnatnccctgaagctcanccncctttggnaaatcncatcnccccttataacatggttatgncanccgttaaaagattgggcctcctctctctaangtngtntggtcccnncagananaaactgccctggggtaacctcncccnnggttncgnttnnntanactntngagnnnccncnnntnatta

SEQ ID NO: 4507 - DNA, 1890 bp, Zea mays
  misc_feature (1107)..(1107): n is a, c, g, or t
  misc_feature (1289)..(1289): n is a, c, g, or t
  misc_feature (1890)..(1890): n is a, c, g, or t
  Peptide Sequence Number=SeqID_10556
  Probeset Number=SeqID_18910
cattgggtacctcgaggccggccggggatcgagcctcgacgagcgagtcgaggactcatcctagctagctaagctgtccgacagcgcagcagaccgatacgagtacgacgatgatgagtagcaccggcggcgagagcaagctggagagcccgctgctgggcctgcccgcgccgggctcgtcggccggcagcgggcacagccacggcgaggcggtgagcgggcagctggagagcatcctcagcgacgcctccctgccgtggaggcggcggatgctgtcggcgtccatggtggagatgcggctgctcgtgcgcctggccgcgcccgccgtgctcgtctacatgatcaactacctcatgtccatgtccacgcagatcttctcgggacacctcggcacgctcgagctggccgccgcgtcgctcggcaacaccggcatccaggtcttcgcctatggcctcatgctgggcatggggagcgcggtggagacgctgtgcgggcaggcgtacggcgcgcacaagtacgacatgctgggcatctacttgcagcgctccaccatcctgctgatggccacgggggtgcctctgaccgtgctctacgccttctcccgccccatcctggtcctcctcggggagtcccccgagatcgcctccgccgccgccgtcttcgtgtacggcctcatcccgcagatcttcgcgtacgccgccaacttccccatccagaagttcatgcaggcgcagagcatcatggcccccagcgcgtacatctccgccgcgacgctggccgtgcacctcgccctcagctgggtggtcgtctacaaggtggggctgggcctgctgggggcctccctggtgctcagcctcagctggtggctcctcgtcgcggcgcagttcgcgtacatcgtgatgagccccaggtgccgccacacctggaccggcttcacctggcaggccttctcgggcctctgggacttcctcaagctctccgccgcgtccgccgtcatgctctgcctcgagacctggtactatcaggtcctggtgctcatcgccggcttgctccccaaccctgaacttgcattggacgcgctgtctgtatgcatgactgttaatgggntgggtgttcatgatcgcagtagggttcaacgccgccgccagcgtgagagtgagcaatgagctcggcgccggccaccccaagtccgcgtatttctcggtgtgggtagtgaccgcgctgtcgactctcatatctatcatgctcggctctggtcctctgcctgcgcaactacatcagctacttgntcacggagggcgaggtggtgtccaacgcggtggcggatctctgcccgctgcttctactcacgctcgtgcatacccgcaggcgtgctgcgctgtttcaagttccgtttcgggatcaagggactgtggggaggcatgattgggggtaccctcatccaaacacttgctttgatctggatcacgttaaggactgactggaacaaggaggtcgaggaagcgcggaaaagattggataagtgggacgacacaaggcagcctcttctcgcaagcaaggagtgatggatgatggtacaggagtggatgaagaagattcagtaggcttctgctagctgatccagtctgaaatcatcttgtagtcgccaccgctaactgcaattcagggatgtactgttagaacactcacaggttgttgcgtaccttcgaccggagcgggtgtgcggagattctccgtaacaggccggtgtatagcggcaaagtgatagcgatttggtccgggcgccttccctgacgccgaggcttccagatgagcggaagcaggcatcccctcttcgatcgaacccccaccagcagactgaatcactgatattttagagcgacttgatcn

SEQ ID NO: 4508 - DNA, 4301 bp, Zea mays
  misc_feature (1)..(1): n is a, c, g, or t
  misc_feature (3929)..(4301): n is a, c, g, or t
  Peptide Sequence Number=SeqID_10557
  Probeset Number=SeqID_18911
ncggaccgggcgcgagttcgacaaccacgcctctcggtcattcttcctcaccagtggcattcagttgcgtctctcgtgcccctacacctccacccagaacggctgggcagcgcatgattcgcaccaccaccaacatgatccgctgccttctcttccaggcaaatctccctgcgagctactgggcagaggccctgcacaccgccacccacctcctcaaccgtcttccctccaaggcggtgagccaccctactccctacttcgcgctgtacggcacagcccccacctacgaccaccttcgcgtgttcggctgtgcctgctaccctaacacttccgctactgcccctcataagctttctcctcgctccacccgctgcctcttccttggctactcctttgaccacaaggggtatcggtgtctggacctcgcctcccaccgcatcatcatctctcgtcacgtcgtcttcgacgaggatgtgtttccccttgctggccctccccacccaccgacctcgactccctcctcgagtccgatccgtctccccctcctcccaggtgccccgccttgcgccgttacccgcaccccgtgcggcctcgacgccgcggctcgcgcctattcccgcgccacgcgcggtcccgtcgatcacgcctgcgccacgcgcggcctcgtcgaccacgcctgcgcctcgcgaggcccaccgacccctctcgcaccatgcgcggccctgttgacgcccacgactcgcttcgccgaccccgcgctcgtctactatcgccgccgccacgtcactacctcggcacctgctgacccaggcccatcgacgagcccagtgcgcttcgctgaccccgccgtctatcaccgccgtgagtcggccacacctgcggcccccgacgtcccggcagaccgccccgagccaccggtgtaccacccggtcgccatccaccgcgaccccgggcacgtccacccgatggtgacccggcgcgccgccggcgttcttcaacctaattcggcacgagtcttggcagctgatacgactaccactccaccggacgcctccccagtcccctcctccgttcgcaccgctctcgccgacccacactggtgacgcgctatggaggaggagtacgcggccctcctggccaaccacacctgggacctggtgccgtgtccactaggcaccaacgtggtcaccggcaagtggctatttcgctacaagcttacctcgaacggctccctcgaccgctacaaggcccgttgggtccttcagggcttcacccaacacccgggagtggactacgacgagacctttagccccgtcgtcaagttcgccattgttcgcaccgtcctctccctcgccctctcctgggactggggatccatcagctcaacgtcaagaatgccttcctccacggcactctgacgaagactgtctactgcagccagctcaccggcttcgtcgacgaagctcatccggatctggtctgccggctgaaccgctccctctacggcctcaagcaggcgccgcgggcctggtacagtcgcttcgcttcggacatcaagttcaccggcttcggcgcgggcgtgtcgtcgatcttcccccaggccccagcctcatgccgccggcctaaccaaccaacctcatggccgccgccattgccgcggcgcttctccgccgctccacctcgcaccaccgtctcatattacctctcctctctcacctccaccgcacctttccgcaaccctcgtccccatggctcccaccccaacaccgcttcttctccaccggcgaatcagccggcgatcccacccagaaaccgacgtcttctcttgacccgaagaagctatggcgcgagctatccgcctcggaccccgccgtcggatcctgccgcctgccgaaggccacgtgggatgccattgtaggcctcgtccgcggcttcgccaaaagtccggccatatccgaccaggcgctcgcgctctacgtcccctcttctgccttcccatcctacgtccgccgcttccgcgggttcatcctcccgcgactctcccgggagtccgcggcgcatctcctctcgctccccgctgaggacgcacacgagctcctcctcccggccttcgcagagttctgcttctccaacttcgcagacaagctgaggcagcacaggtcggtcatggccgcggccgacctcacggccccgcacacctggtaccccttcgcgcgcgctatgcgccgccgtatcgtgcaccactgcgggcccacgaacagcggcacgacgcacaacgcgctctcccgcgtgcccgcaccgcagcccacgctgccccgccttcctcttccacccctcgccgtccgtcgtcctcagcgcttgtacgcttgcctcaaaacccctggccccgtgctaaaaccctagccctcgaattccttcccctgcccgcgcggagcagacgagcctgagcccgtcgtcctcgtccatggcgtcctcaggggccgccgctaacctctgggtactgcttgctctcggcatcgcgggcattctcctggcgggccggcgacttagggcccctgcaagccccgaacacctaggccccgccctcaccgtcctggtcggtccccagcaccgccctctacggagggtgccccatcgtggacaacgacgtgaccatcccgcaggacgcctagttgtccctcctccacaacgtcactacctcttcttcttggtcggctgctccttcagcctggaggctgtcagtcttctctcttggataaatggaatgccgtataaaattgtctcttcttcaagcaagagatggagctttctttggtcgggctcaaaaatgctaggaaaacatcacttgcagcagctcgcagcgacacccccgcctcctcatcatggaagctacaagaacactttgagtaggtgaagaggatttgcgacactaccacattgtctttggccatgcatcatctcagtgataagataacaatccaacttgatatttcaaaattgactgccaagctacggtaagggaaggtagactcaagtgctattgacaccaaaggagaagtatgaaacttggacaggagattaaaattatgacgtgtttcgagaaaaacagttctctacaatcgtgggcaatgacatctgctaagctttcatgctagtgtgcttgtcatttcacaattcttggatagctacatctaatttatctgtggagtataacatgttccctcttggaaattgtcggataagtttttaatgtcaggatataccagctttcgaagattagtttacactctcaacctggaatgactttttcgtctaagaatctctgggcttgcttccgtaggtatatgccctacccccccaccttggtcgtacggtttttacagggatccttttattcttatcatccaaaggtcgttgaggagtaccgcgccgtggccaacggcgtggcagaggcctcctggctacgacaactcctccacgagctccacagtccccttcagcgcgccactctcgtctactgcgataacgtcagcggctcagcgcggtctacctctccaccaatcccgtgcagcatcagcgcacgaagcacgtggagattgacctgcacttcgtccgcgagcgtgtcgctgccggtgacgttcgggttctcaacgtccccaccacgctgcaattcgccgacatcttcaccaaggggttactgtcgagtgtatttttagactttcgctccagtctcaacatttgtacaggatagagttgtgactgcagggggcgttgttgcttgttagaatatcgtaatatccttccattttgtttcctgtgtcatgacggttctattacctctttaatgggccacagaccggtctgtcatcgctaatattagatcgatgacagatagttccagaagttttacttgccacaagtggctaatnnnnnnnnnnnnnnnnnnnnnnnnnnnnnnnnnnnnnnnnnnnnnnnnnnnnnnnnnnnnnnnnnnnnnnnnnnnnnnnnnnnnnnnnnnnnnnnnnnnnnnnnnnnnnnnnnnnnnnnnnnnnnnnnnnnnnnnnnnnnnnnnnnnnnnnnnnnnnnnnnnnnnnnnnnnnnnnnnnnnnnnnnnnnnnnnnnnnnnnnnnnnnnnnnnnnnnnnnnnnnnnnnnnnnnnnnnnnnnnnnnnnnnnnnnnnnnnnnnnnnnnnnnnnnnnnnnnnnnnnnnnnnnnnnnnnnnnnnnnnnnnnnnnnnnnnnnnnnnnnnnnnnnnnnnnnnnnnnnnnnnnnnnnnnnnnnnnnnnnnnnnnnnnnnnnnn

SEQ ID NO: 4509 - DNA, 589 bp, Zea mays
  misc_feature (236)..(236): n is a, c, g, or t
  misc_feature (408)..(408): n is a, c, g, or t
  misc_feature (419)..(419): n is a, c, g, or t
  misc_feature (444)..(444): n is a, c, g, or t
  misc_feature (454)..(454): n is a, c, g, or t
  misc_feature (457)..(458): n is a, c, g, or t
  misc_feature (462)..(462): n is a, c, g, or t
  misc_feature (465)..(465): n is a, c, g, or t
  misc_feature (471)..(471): n is a, c, g, or t
  misc_feature (476)..(476): n is a, c, g, or t
  misc_feature (481)..(481): n is a, c, g, or t
  misc_feature (485)..(485): n is a, c, g, or t
  misc_feature (488)..(488): n is a, c, g, or t
  misc_feature (491)..(491): n is a, c, g, or t
  misc_feature (495)..(496): n is a, c, g, or t
  misc_feature (502)..(503): n is a, c, g, or t
  misc_feature (509)..(509): n is a, c, g, or t
  misc_feature (526)..(527): n is a, c, g, or t
  misc_feature (530)..(530): n is a, c, g, or t
  misc_feature (536)..(538): n is a, c, g, or t
  misc_feature (540)..(541): n is a, c, g, or t
  misc_feature (548)..(548): n is a, c, g, or t
  misc_feature (550)..(550): n is a, c, g, or t
  misc_feature (557)..(557): n is a, c, g, or t
  misc_feature (561)..(561): n is a, c, g, or t
  misc_feature (565)..(568): n is a, c, g, or t
  misc_feature (578)..(578): n is a, c, g, or t
  misc_feature (582)..(582): n is a, c, g, or t
  misc_feature (585)..(585): n is a, c, g, or t
  misc_feature (587)..(587): n is a, c, g, or t
  Peptide Sequence Number=SeqID_10558
  Probeset Number=SeqID_18912
gacatcaaagcaattaacaaatacacaacttgtaacttcaaatagattactttcaaagaagagagagagaaagaaagatggagaagaacatgaagtttccagttgtacacttgtccaagctcaatggggaagagagagaccaaaccatggctctaatcaatgaagcttgtgagaattggggcttctttgagatagtgaaccatggattaccacatgaccttaatggacaagatcgnagaagatgactaaggaccattacacgacatgccaagaaccaccgttccatgtcacgcgcaggccccaaggttgggattaccttgtgtcggtagtcgccgatctcgagtcggcatgcgcgtcccgcggtcgtcccccccctctggccattctctggcccatttcagctgtggntgttgactacngggcccactcgacgggctttgtgcncgtgccgcgnctnngggntgncgattnctttntcttnttanctnttngcgnntaacgnnccgccngaacgaacgacctcgcnngtnagcggnnntnngagtatngnttatttnattntggnnnngttcattcgncggngtncncg

SEQ ID NO: 4510 - DNA, 369 bp, Zea mays
  Peptide Sequence Number=SeqID_10559
  Probeset Number=SeqID_18913
gcgagggagaaaagcaggggcacgcaggagcataggaccgcgcgctagtgagggctggagatggggaaggcatctgcaaactccaggaggagctctagcttccaggtcggacgccagggagcttcggccatggcgacgagcttggggagatggggaaaaccggcccgccagcgagccggagcacgggaggcacgaccatggctggagcaggagcggtcggccgagcagcttgcaggggagttccatggctaggaccagggacgtgggagctagagctgcatggcagggagatgggcgcagggaaaatctcggctagggagatccgcgcccagatgcagctgccgtatttgagcagaggatagggttgag

SEQ ID NO: 4511 - DNA, 1646 bp, Zea mays
  Probeset Number=SeqID_18914
tggcgccgccgccaccggcatgccctaaccgtggtggcttgatggagcttcttaacttctgttcgtataggagctcaagctaagaaaagtgatgtggttgagaataagagatttgtgtgttcaagggaaggattcacaaagagatgtgctcaactaaacaagcaaaagaagcactcagagacaagatgtggatgcaatgcgcgtatatatgtgaggttgaatcaggacagtaagtactatatcgcttcttttgttgaggagcataaccatggtctagtgtcacctaataaaattccttttctccgatccaaccgtacaatcagtcaaagagccaagactaccttattcacatgccacaaagcaagtattggtacctcgcaagcatatagacttttacaagtcagtgatggatttgataatattggatgtatgaagagggacctacagaactactatcggggacttagggaaaaaataaagaatgcggatgctcaattatttgtggcacaaatggagagaaaaaaagaggcaaatgctgccttcttttatgattttgttgtggatgataatgaaaagttactctatatattctgggctgatgctacaagtagaaagaactatagtcattttggtgatttagtgtcattcgatgcaacatatagcacaaaccaatacaatatgatatttgcaccctttaccggcgtgaaccatcatatgcaaagtgttttatttggagctgctttcctagcaaatgagaagattgagtcatatgagtggttgtttcgtacttttctattggcaatgggagaaaaagcaccaaggcttatcataacagatgaagatgctagcatgaaatcagcaattagaactattcttccagatacaattcataggttttgcatgtggcacattatggagaaggttcctgagaaggttggtcctcccataaatcatgacaaggagttttgggctgcattgaacacttgtgtatggggttcagaaactagagaagagtttgagatgcgatggaatgttatcattgctgcttatgatctttatagcaatgaatggttggctaatagatatcaaattcgagagtcatggattccagcattttttatggatatacctcttgcaggagtcctcagaactacttcaaggtctgaaagctcaaattcattcttcaatcgctttatccaccgaaagttatgtttcgttgagttttggcttagatttgatacggccttggaatgccaacgacatgaggagttaaaggccgatcatattagtatacatactacacccatcttacataccccatgggctgtggagaaacaagcaagcatattgtacacgcataatgtgttcaacatatttcaaaaagaagtgattgctgctagagaccattgctctgttctaggtactacacaacaagaggctattaagttagttttaattaatgatgggtcgataagggatagagtggttgagtggtgcgcatcaaataattttggtcgttgctcgtgcaaattattcgaaaagatgggaattccatgtcgccatattatattaacattaagaggtgaaaagctatatgagctacctacatcttatattttgaagagatgggaaacaagatgcaagag

SEQ ID NO: 4512 - DNA, 467 bp, Zea mays
  misc_feature (174)..(174): n is a, c, g, or t
  misc_feature (201)..(201): n is a, c, g, or t
  misc_feature (227)..(227): n is a, c, g, or t
  misc_feature (234)..(234): n is a, c, g, or t
  misc_feature (237)..(238): n is a, c, g, or t
  misc_feature (240)..(242): n is a, c, g, or t
  misc_feature (244)..(245): n is a, c, g, or t
  misc_feature (251)..(251): n is a, c, g, or t
  misc_feature (254)..(259): n is a, c, g, or t
  misc_feature (265)..(266): n is a, c, g, or t
  misc_feature (268)..(268): n is a, c, g, or t
  misc_feature (272)..(274): n is a, c, g, or t
  misc_feature (276)..(276): n is a, c, g, or t
  misc_feature (280)..(283): n is a, c, g, or t
  misc_feature (286)..(287): n is a, c, g, or t
  misc_feature (290)..(290): n is a, c, g, or t
  misc_feature (292)..(297): n is a, c, g, or t
  misc_feature (299)..(310): n is a, c, g, or t
  misc_feature (312)..(313): n is a, c, g, or t
  misc_feature (317)..(319): n is a, c, g, or t
  misc_feature (321)..(321): n is a, c, g, or t
  misc_feature (323)..(326): n is a, c, g, or t
  misc_feature (338)..(339): n is a, c, g, or t
  misc_feature (343)..(345): n is a, c, g, or t
  misc_feature (347)..(347): n is a, c, g, or t
  misc_feature (350)..(350): n is a, c, g, or t
  misc_feature (354)..(354): n is a, c, g, or t
  misc_feature (357)..(357): n is a, c, g, or t
  misc_feature (359)..(359): n is a, c, g, or t
  misc_feature (368)..(368): n is a, c, g, or t
  misc_feature (371)..(371): n is a, c, g, or t
  misc_feature (373)..(373): n is a, c, g, or t
  misc_feature (380)..(380): n is a, c, g, or t
  misc_feature (392)..(392): n is a, c, g, or t
  misc_feature (399)..(399): n is a, c, g, or t
  misc_feature (401)..(401): n is a, c, g, or t
  misc_feature (405)..(405): n is a, c, g, or t
  misc_feature (410)..(411): n is a, c, g, or t
  misc_feature (417)..(417): n is a, c, g, or t
  misc_feature (420)..(420): n is a, c, g, or t
  misc_feature (422)..(422): n is a, c, g, or t
  misc_feature (425)..(425): n is a, c, g, or t
  misc_feature (429)..(429): n is a, c, g, or t
  misc_feature (433)..(433): n is a, c, g, or t
  misc_feature (435)..(436): n is a, c, g, or t
  misc_feature (441)..(441): n is a, c, g, or t
  misc_feature (444)..(444): n is a, c, g, or t
  misc_feature (447)..(447): n is a, c, g, or t
  misc_feature (449)..(449): n is a, c, g, or t
  misc_feature (451)..(451): n is a, c, g, or t
  misc_feature (456)..(456): n is a, c, g, or t
  misc_feature (458)..(458): n is a, c, g, or t
  misc_feature (462)..(465): n is a, c, g, or t
  misc_feature (467)..(467): n is a, c, g, or t
  Peptide Sequence Number=SeqID_10560
  Probeset Number=SeqID_18915
accagttcaccacctctccggctctccctctccgtcgcgtcacaggccacggcgggcggcggcggaaacttccgtgcggttcttggcggattgaacgcctactcgagctgcgccggcggttgtttcagccgtccttagatataccctgcttcctcccgggcaaatccaagttgnccaaatgccgacattagtgaagtcggngctccccgtagtgctcctcgggttgnggcgggnccnncnnnanntcctcngcnnnnnnctcttnncncccnnncnaccnnnngcnnggngnnnnnncnnnnnnnnnnnncnncccnnnanannnntctcccctcccnnaccnnncntcncccnccncntcccccccnccncntcccccntcccttccctcnttccttntnttcnccttnntctccntcncnctncctncccncnntcctnctntcncncnctccncncccnnnntn

SEQ ID NO: 4513 - DNA, 259 bp, Zea mays
  Probeset Number=SeqID_18916
atcaacctgactggcgtgttcctgtgcgcccaggccgccggccgccgcatggtgcccaagggcgagggctgcatcatcaacctggcctcgatgtacggcgtggtggccgcgcccgaccgcgccgcctattgcgccaccaagggcgcggtggtgctgctgaccgagaccctggcggtggaatggggcccggcgggcgtgcgcgtgaacgcgctggcgcccggctacgtcgagaccgacctggtgcgcgacctggccgcgc

SEQ ID NO: 4514 - DNA, 1032 bp, Zea mays
  misc_feature (1)..(249): n is a, c, g, or t
  misc_feature (269)..(269): n is a, c, g, or t
  misc_feature (850)..(1032): n is a, c, g, or t
  Peptide Sequence Number=SeqID_10561
  Probeset Number=SeqID_18917
nnnnnnnnnnnnnnnnnnnnnnnnnnnnnnnnnnnnnnnnnnnnnnnnnnnnnnnnnnnnnnnnnnnnnnnnnnnnnnnnnnnnnnnnnnnnnnnnnnnnnnnnnnnnnnnnnnnnnnnnnnnnnnnnnnnnnnnnnnnnnnnnnnnnnnnnnnnnnnnnnnnnnnnnnnnnnnnnnnnnnnnnnnnnnnnnnnnnnnnnnnnnnnnnnnnnnnnnnnnnnnnnnnnnnnnnnnnnnnnnnnnnnnnnntggaaaattaggaatggtgnatgataaatattttttccccggaaaattttgtttgttttttttggagagaaaataaacgagagatgtggattagagaattttttttttgtttaagaggcccagtgtttattataaagccggtgggccaagtttttttgtggggtgtagatttgtttacaaaggaaattctttttccctttcttataaaggatcccgccagggggggaatttgcttaagcctacctttggttaaagccttgtttttaacattttcttgggggaaaaagggcctccaattggttttttgtgatttttagcaatcctccttgtggggtttttttagggaaaaacagttagttaaatttaaagtttcctttctattgctagtgaaggtatcttataactagccattattgtttgtgcagggacaagagggtgaggctatagttgaggaaacaaagaagagtaaccatgtgcagaggaagattgagaagccccagcaggatcgtgcactcgacactcatattgaagagcaatttggcagtgggagattgttggcctgcatttctgcctgtcctgggcagtgtggccaagctgatgnnnnnnnnnnnnnnnnnnnnnnnnnnnnnnnnnnnnnnnnnnnnnnnnnnnnnnnnnnnnnnnnnnnnnnnnnnnnnnnnnnnnnnnnnnnnnnnnnnnnnnnnnnnnnnnnnnnnnnnnnnnnnnnnnnnnnnnnnnnnnnnnnnnnnnnnnnnnnnnnnnnnnnnnnnnnnnnnnnnnnnn

SEQ ID NO: 4515 - DNA, 1269 bp, Zea mays
  Peptide Sequence Number=SeqID_10562
  Probeset Number=SeqID_18918
cgctggctgctacgttgctcgccttacacgtcaagcaagcctcccgcgtggtcgtctcggtcgcccccacgttcccccaggccactacccctagccggccgcgtcgcctgcccggaagcccgaccgccaccacatacgcgacccggaaaccccatcctcatctatcgcgacgcccgcaacgtcgtcgcgacgtcagcccccgtccgggcgccgtcccgatcgtgtggccggcgcgcccgccacgccgccgtcgcggctgacgccggcgacccccgccccgcctcttcccccctctcctccctttttggcccagccgcccccctcgcgtggcccagctggccagccggcctttctcccccctctctcccctttccccgctgtgggcctcgcggcggcccaactggccttgcgacccagcgcggcccatccgccccccactccccacgccgcccccctgcgggtcccacccgtcaggctctccccctccccaaacccctctctctcctcccctgcccgacccaccccgctcccctgccacgctcgccgaaccgccgccgccggtgctcgcccccgcgcggtaagcccctccccctcctctctcctctcccctcccccctccttcccagcgctcgccggcgccctccccgtggcgcggtcccacccgcccgcggcgttccggcgcggccccgccccgccctcggcgctcgccggctcgcccccgcccggccccgacgcgcctccccctcgcgcgcccgtgcgccccgtctggccatggcgcgacacggctccggctcgccggcgcgcgaccgtggcccggtgcccctcggcgctgcccccggcgcggcgccctccccgcgtggctcgcccggcccggttcgccggccatggcggctcgcccccgcccggccccgacgcgccctccccctcgcgttcgctcgccctggcggcctgctcgtgcggcctgcccgcggcggcccggcgtgctcgccccgcccgtccccggtcccggccacggcgcccgcccgtccccagcgcggcctcggcggtgcgagcggagccccggcgcggcgcgtgcacgcacggtgcccccggcgagctcgccgcacccacggctcgcagccgtggcgctcggcccggcgtcctcggctcgcccgcccctgcgcagcgcggccccggcccagcgcggcttcggctcgcgcggccgtggtgcccctgcgtagcgtggctcggccccgacgtgtgcgcgacccgttcgcgacgcggcagcgc

SEQ ID NO: 4516 - DNA, 710 bp, Zea mays
  Probeset Number=SeqID_18919
cctaagacaccacgatgcccttctcggtttttccatcttcgccgatctcaggacacagagcgtaatcaccaggtgcaatagctcaggcgacctgtacccgctctccgctccattgtcttccactgctaccccaagtgtcctcctcgccagtgccctctcccagctatggcatcgccgcctcggtcacatcggccgcgacgctcttcatcacttagctagtttgtcttacattacttgtaataatgacacgcatgccatttgtcacgcatgtcaactcggtcgtcatgtgtgccttcctttctctacttcctagtctcgtgctctacacaattttgaccttgtgcactgcgatctttggacctcaccaattcctagtgtttccggttataaatactatctcgtcattcttgatgactgctcccactacttgtggacattccccctacgcctcaaatccgacacgtttcccaccattgcccacttcttctcctttgtcgccacgcaatttggcactaccattaaaaacttccaatgtgacaacagttgtgagttcgacaattcccacactcgaaccttctttctttcacatggtgtccaccttcggatgtcgtgtccctacacctcccaacaaaatggtcgcgctgaacgtgtcctaccgcctacgcaccatcaacaacatagttcattccttactctttcaagccaacctc

SEQ ID NO: 4517 - DNA, 700 bp, Zea mays
  Peptide Sequence Number=SeqID_10563
  Probeset Number=SeqID_18920
cccgggcccgcgctcgcccctcgccgcggcaaggccgcccgccccgtccgttcggcgccccggctcggccgcccctccggcgagccgccccgccccgctccgccccgaccccgcccggtcccggctcggccgccccccggcgagctcggccccgccccgccgcgcctcggctcggccgcccctgtgctcggccccctccggcgagctgccccgccccttccccgccctcgcctcggcctcgtccggcgagccgcccccgtccccagcctcggccgccccctcgccggccccgccacgccccggctcggccgcccccggcgagcccgccccgtgccccggctcggccaccccccggcgagcccgcccaccccgtgccccggctcggccaccccccggcgacccgcccgcccccatgctcggccgcctctccggcgagccgccccgcctgtccccggccatggcgcccgcgcccggctcggccgcccccgccgcgctcgtccccggcgagccccgcgcccggcccggctttcctcgtcgtcgcccgtgttcgcccgcccgccccggcgtgccgccggcacccccccagacgccccgtctaccccccccccccccgtatccaccaaacccccccatccccagcttgtcagcattggaaccactgctcaggagaagatgtgaattgctgatcctggcacgtaca

SEQ ID NO: 4518 - DNA, 869 bp, Zea mays
  misc_feature (28)..(28): n is a, c, g, or t
  Probeset Number=SeqID_18921
cgattgggtaccgggccccccctcgagnttttttttttttttttttcttttttttttttttttttttttttttttttttttttttttttttttttttttttttttttttttttaaccacccccaaaaccctcccggggaaaaatatcaaacccttttcaaaggcatacaaaagggaagggaaaattttttggctgggggaaaacccaaaagggtggggcccccccaccctataccccctttaaaaaaaccccctctacccctggggggcttgcatttgctgcaatttgatttggggggcaaaaaacccggaaaaatgtcccctttgacccaataaaggcccaaattgcctttataaacgggggagggatgagaaaaggccccccacccccttccaaggcaaaaaaagcccccccttggggcctaaccgggtggggaccccccccgatcaaaaacttgatactttgaaacccttgggccccccgggggtgggtgggggcaaaaacccaaacccattttgaacaacccccccccaaaaaaaacccaaaaaaaaggggggcaaatgtttgtccactttgtttgcctcggagggctaggccccaccgattttaaaataaaaaaaaaggccccaacgtggggcccaaaagacccacccccccaaacttccaaaagggggttcccccatttcaaaagccttaattatccctggggaaggaattaaaaaaaaaggtggctggggggttaaagcggcccatagttttgagaaaataaagggttccttcttcttccgcgaagggaggggcccacccccccccttcccaataagaacctgaaaggactccttcttggagagattttataaccaccttgg

SEQ ID NO: 4519 - DNA, 1022 bp, Zea mays
  Peptide Sequence Number=SeqID_10564
  Probeset Number=SeqID_18922
gtgggtgtgttttttttgtttctttttttttttttttttttttttttttttttttttttttttttttttttagctctatgttcgagacaggagactatctgattgggcactttaatttattgaatactctgattggcacaatgaatatcgtaagacacatgggggggacatgaccactgtattatattgggttttagttgtattttgtacttgtaaagtccccgccttcagtatgtggatatacataccgttatccgtaacaggcacttttcaacttttagcatagacggggtcattacgggttgtgtccgtttaaaatctcttcattcccctcgcaaatagcccacttgtacatgccggtcggtatcaaatataatgccacgcggcgcggggttacgtcaaacaccccaccaaacgcgggattctcaagcctcctggcgttacgctgccctatagctaccagtttccttcttgcagtatcacgatgaaccttctgaccgggcttttcgcgccttcgcgtgaggcgatgacgctccctggcgagctagtggccgtgggcatcgtaggcgcgcgcgagctagaggacctccacctcgatgtgcacgagcttcatgcacaggcgttgctcgacttattaatgcgtctggccgcgcagccttgccgcgtccagatccagcagcaaccccaccgcatttcatttcagttactcgtttcattagggcaggagctccacctcgtccacgctcttgtttgtgctcgcggccgaatcacgagccgacaccgcgtccccgccggagataaacaaaaccatcgggtcgcctgtcgactgggtctggatgggatggacttgactccgatcgtgctcaaggggagggggagagatagagcttgacttgcgggaggacgggatcgggaggtaccagccgccaccgtgtccgcccgatggttggttttttcagttgctgggctctctgctgatgtggccctgttttttcgattagtaggggtaaaaaatggtctcg

SEQ ID NO: 4520 - DNA, 535 bp, Zea mays
  misc_feature (516)..(516): n is a, c, g, or t
  Probeset Number=SeqID_18923
ctagcgggcggcccgcccggccggccggccggccgcccggccgggcacgcgcgcgcgcggacggcccaccccgccgcccgccggccgcggcagccctccgccccccacccgccgccgccggctgcagtaagcaaccgccagccaccaacgcacacagcaggcaggaaccgagagccacgcacgtcgcgagcgagcaggagagggacgaacgagctggtacccaatcaaggaagggcaagtcgggcgggggcaggatcagaaagaaccatcaattgggggggggatctagcgttagtaaatcaagcgtcggggggaaaaaaaaaaataattaaggaggtggtactaagtactgctgataaacatcataaggtggcggcaccaacacaacaggaggacgctgcacgctgcggaggggagatcgtagaggcgaccatcgtcgaggagggggggggaggtgtgtgctgcttattggttgatgaatctgctgatgtttcggacaaggaacaaatggctgtngttttgcgatatgtcgata

SEQ ID NO: 4521 - DNA, 2727 bp, Zea mays
  Peptide Sequence Number=SeqID_10565
  Probeset Number=SeqID_18924
tggctcgaagcagccaagagtctgctcagtctgggtgcaccggactgtccggtggtgcaccggacagtgtccggtgcgccaggcttgcatctgtgaaattgctgctctcgggacttcgtcggcggcgtacgactaaaaatcaccggactgtccggtggtgcaccggactgtccggtgagccaacagtcggccgggccaacggtcggtcgcggaatccgcgcgcgacgcacaacaacaacaacaacaagcagagatggaccctccaaatcctccactagccagggctgatccaacagttgtagcctagatgcgaataatgcaacagatggttgatactatggcggatatgcacgcgcaaatgcttccacctcgggacaagcactgggagttcatgagccacaagccaccgacgttcgccacctctccagatcctctgcacgctgatgattggctgaagtctgtggagaagatgttaatcattgcacaatgcttctggtcgacttactagtcctgctgctgattggtgggattcttacactgctgcccacgatgctgctgatactatcacttgggcaaagttcgctacatagttcaagaactatcacataccagctggactgatgaagataaagaagaaagagtttctgtcactgaagcagagaagcatgtcagtcagcgagtaccacgacagattcattcagctctcaggatatgcacctgatgaagtagctgaagatgagaggaagcaagagcacttcattgaaggactcaatagacctctacagtatggtccagtggctcacacatttccgtcattccaaaggctgcttgacaaggccctagctattgaacacaagcgtgttcagctgggagatttgaagaggaaggcgatatcccagggtcagggaagcagcagtgttcaccctcgctatgttccaccctagggtacaccagttcgcactagaggaggccagcgtccagctcagtacacaccacaggggactccaccgactcgtcaagctgcccccactagcaccccgacgaaattctcaggacagagtgttggtaccacatgctacaagtgtggtaagactgggcattatgctaatgtttgtccacagaggattgctactacacccgtttagaacaagcagcagactccgagatctggcaagggattcactatttccagggttaatcaagtcagcgctgatgctactgctgaaggggctgacattgcacttggtatgttttatattaatgcaattcccgcaacaatattatttgattctggtgctacacattcatttatgtttgctcgatatgccaacacaaatgatttaccactgcgaaatatgaaaacaccaatgatagtaattacacctaaagggcctgttgaggcaaactatatgacacatagattgacattgacaattatgggaagagaattctgggctacccctataatattagaggaaagccgtatagactgatcctaggtatgtcatggttaagaaaggcaaaggtcgttatacaatgtggtaggggtactgtagaactcaccagccctaaaggagaaatatttgaagttgaaattacagtaactacctctaccagacgtgcgatattcttagtagatgggaagtttgttgctgacaacatccgtgtggttagggattttccatatgtctttccagaggagttactagggatgccaccagatagggaagtcgagtttatcattgatctcttacctgggattgctcctatttctaaacggccatacatgatgttcatagaagagttaaaagaacttaagaagcagttaacggagttataggaggctgggtacattcgtccgagttcctaaccttggggagcaccggttctgtttgtacagaagaaagatggatcacaaaggatgtgtgtggattatagatcccttaatgatgttactgtgaagaacaagtatccgttaccctgcattgaggatttatttgatcagatgagaggtgcaagggtattcccaaagattgatctccgatcgggttatcaccaaatgaagattaggccatctgatattcccaggacggctttctcaacccgatatggtttatatgaattcacagttatgtcatttggactaactaatgcacccgcctattttatgaatatgatgaataaggtgttcatggagtatcttgacagattcgtcgtggtgttcatcgacgatattcttatttattccaagaatgacagtgatcatgaggaacatctgagatttgtgctacaaaagctacgggataatcaactctacgccaaatacagtaaatgcgagttctggattgacgaagtgccaatccttggacatatcatttctaatggtgggatatcagtggatcctgctaaagtcaaggagatagtggagtgcagtatacccagtacaattactgaagtctggagtttcttgggacttgcaggctattatcggtgatttattgaaggattttctaagctagctaagccattgacctcactgcttgtcggagatgagcggttgccttcttcttctataaatagagcgcttgcttcactggtgtcttcacatatctctctaccgcttgttgcttactctcctcctttttattctcttctactccaccatgggcaagagcaagaaaggcggaagttcgttgcaccattctggcgacaagcgaaagcgcgagc

SEQ ID NO: 4522 - DNA, 975 bp, Zea mays
  Peptide Sequence Number=SeqID_10566
  Probeset Number=SeqID_18925
ctttgaatgaagtaaggctcaaggatgcagagagactgtaacgagacacgtgataatccaaaggcctccgtatgggtacgtgggaagacatgagaatggggggcttggttagaacaggggacgtatcacttgtgaggagagcgagaagaattcggtaatggggcccgcatcgggttacgaggatggtgctgaattgagcaggggaaaaaggatccgcgagtctagagttaattagggggggtggactgacgttggaataacacaagcgcttgagatattattattgattgaggcgcataaaaggaatgtgcgtgggtaggttttctttgtaagttatatcgacccgaggagaggtattattgatagacaacctgcgcggggagtggtgttaactcagcagagacaggcaaagaagagcacccatacattgaggtgacctgggcacgcggccagaagattgtcatgggtgtttaagggagggccaaactaggggctcggggagacgaaggttcgattggagaatgacgcttcagcatggttagtggggaaggcacgtggactcgccgccacgttactgtggtccttctcggtggcctacttcagctttcatcctcaccttcatcggtgttgcagtccaggacgcacgtgtcgctggacatgcatcatctggctggccctcctcgccttcatgtggctggtcatcaacctccacccgaaccaccgggcgcgcgtcgtccgggtgctcttctccttcaaccgcgacaactgaaattaaacaaataaagctgctctttgcctgcttattagtatttcctatcccctttggagttagcagagtggattgaaagtgctacttagtattaacgtgaacatatggttgataaatatttacgccgtgccaggagtgatgagtgattattcataaaaggattaattttggtccagtttctgggccgggcaaaaaaaaaaaaaaaa

SEQ ID NO: 4523 - DNA, 519 bp, Zea mays
  misc_feature (25)..(25): n is a, c, g, or t
  misc_feature (68)..(68): n is a, c, g, or t
  misc_feature (102)..(102): n is a, c, g, or t
  misc_feature (146)..(146): n is a, c, g, or t
  misc_feature (284)..(284): n is a, c, g, or t
  misc_feature (298)..(299): n is a, c, g, or t
  misc_feature (306)..(306): n is a, c, g, or t
  misc_feature (308)..(308): n is a, c, g, or t
  misc_feature (333)..(334): n is a, c, g, or t
  misc_feature (340)..(340): n is a, c, g, or t
  misc_feature (342)..(342): n is a, c, g, or t
  misc_feature (345)..(345): n is a, c, g, or t
  misc_feature (350)..(350): n is a, c, g, or t
  misc_feature (371)..(372): n is a, c, g, or t
  misc_feature (375)..(375): n is a, c, g, or t
  misc_feature (377)..(377): n is a, c, g, or t
  misc_feature (396)..(397): n is a, c, g, or t
  misc_feature (403)..(403): n is a, c, g, or t
  misc_feature (406)..(406): n is a, c, g, or t
  misc_feature (413)..(413): n is a, c, g, or t
  misc_feature (423)..(423): n is a, c, g, or t
  misc_feature (433)..(433): n is a, c, g, or t
  misc_feature (447)..(448): n is a, c, g, or t
  misc_feature (468)..(468): n is a, c, g, or t
  misc_feature (470)..(471): n is a, c, g, or t
  misc_feature (478)..(478): n is a, c, g, or t
  misc_feature (480)..(480): n is a, c, g, or t
  misc_feature (504)..(505): n is a, c, g, or t
  misc_feature (511)..(511): n is a, c, g, or t
  Probeset Number=SeqID_18926
atcggcacaggcccgctacagccgngaggataggtaggagagagcggcagccagcaacagagggcggncatggcaatgcccaccttccacctcgcccccganctgccgcccgtgtcccgcctctgcctcgggaccatgacgatggnggagcaaagagggccgccggaatcgctccgcctcctcgacgccgccttcgacgccggcgtcaacttcttcgactccgccgagatgtacccggggccgcagcgcgcggaaacgcacgggcgcagcgaggagctcgtcgntcggtggctgcggnnccggtgnancccccgcgacagcgtggtgctcgcnnacaaangncgnccggnccgtctggtcagatgacgtgnntcngngccggtccgctgggctctnnactccnagnaacatcncgtaagcaancgataccagnttgcgccgatttgnntgtgcatttatatcgacccncnnaccagancncatttggccccgaatccgttatgnncccaantgctttgg

SEQ ID NO: 4524 - DNA, 524 bp, Zea mays
  misc_feature (7)..(7): n is a, c, g, or t
  misc_feature (68)..(68): n is a, c, g, or t
  misc_feature (71)..(71): n is a, c, g, or t
  misc_feature (98)..(98): n is a, c, g, or t
  misc_feature (118)..(118): n is a, c, g, or t
  misc_feature (141)..(141): n is a, c, g, or t
  misc_feature (145)..(145): n is a, c, g, or t
  misc_feature (147)..(147): n is a, c, g, or t
  misc_feature (182)..(182): n is a, c, g, or t
  misc_feature (202)..(202): n is a, c, g, or t
  misc_feature (219)..(219): n is a, c, g, or t
  misc_feature (286)..(286): n is a, c, g, or t
  misc_feature (299)..(300): n is a, c, g, or t
  misc_feature (305)..(305): n is a, c, g, or t
  misc_feature (315)..(317): n is a, c, g, or t
  misc_feature (328)..(328): n is a, c, g, or t
  misc_feature (335)..(335): n is a, c, g, or t
  misc_feature (343)..(343): n is a, c, g, or t
  misc_feature (350)..(350): n is a, c, g, or t
  misc_feature (363)..(363): n is a, c, g, or t
  misc_feature (369)..(369): n is a, c, g, or t
  misc_feature (374)..(374): n is a, c, g, or t
  misc_feature (386)..(386): n is a, c, g, or t
  misc_feature (398)..(399): n is a, c, g, or t
  misc_feature (402)..(402): n is a, c, g, or t
  misc_feature (405)..(405): n is a, c, g, or t
  misc_feature (407)..(408): n is a, c, g, or t
  misc_feature (410)..(411): n is a, c, g, or t
  misc_feature (416)..(416): n is a, c, g, or t
  misc_feature (420)..(422): n is a, c, g, or t
  misc_feature (434)..(434): n is a, c, g, or t
  misc_feature (438)..(439): n is a, c, g, or t
  misc_feature (447)..(447): n is a, c, g, or t
  misc_feature (458)..(459): n is a, c, g, or t
  misc_feature (464)..(464): n is a, c, g, or t
  misc_feature (466)..(468): n is a, c, g, or t
  misc_feature (471)..(471): n is a, c, g, or t
  misc_feature (475)..(475): n is a, c, g, or t
  misc_feature (481)..(481): n is a, c, g, or t
  misc_feature (484)..(484): n is a, c, g, or t
  misc_feature (487)..(488): n is a, c, g, or t
  misc_feature (498)..(498): n is a, c, g, or t
  misc_feature (500)..(501): n is a, c, g, or t
  misc_feature (507)..(507): n is a, c, g, or t
  misc_feature (520)..(520): n is a, c, g, or t
  misc_feature (522)..(523): n is a, c, g, or t
  Peptide Sequence Number=SeqID_10567
  Probeset Number=SeqID_18927
acacggnccacacagcccaacaaaggagcgcggggggccctccttccttcctcccacttctctcgcgnggnggtcgcttacctcgcctcgcattccgntcgagcaggggagcggcagngcagaagggagggaattaaggcnagangntcatcgagagattccgcgtcgagagcccccacggngcggtacgggcccggacggnagatcgaggcggagaancggggacggacaacaatggagctgggggacgaggccaaaggacggcggccctccccgctgggtcggnccgcccccaaggnncgacnaagaacaacnnnccggagccagnaccgcgncccccaangctcggngcccatgcttggngggggnggggnaggcaacaaagncgcccccccctnnaangcngnngnncactngccnnncggggggggggnaccnncctggggnttaccaacggnncaggngnnnccncagnccaacnaanaannccaacaccancnngccagnggtttccacccancnng

SEQ ID NO: 4525 - DNA, 3067 bp, Zea mays
  misc_feature (3067)..(3067): n is a, c, g, or t
  Probeset Number=SeqID_18928
ctcatcggagtcagtcgcgcaatcatcgaacgtagtctgagcaccgacccagcaatacgccctaaaaagaaaaaaaattcgcatgatgtccattgaaaaaacggaagcaacaaaggccgaagttcaccgtctactagaggcaaaattcatcgaacaaattgactacccaacctggcatgccaacttcataattgtgcagaagaaaaataaaaagtggataatatgcatagacttcactagcctcaacaaggcctatctaaaggacaacttccccctaccaagaatagacaagattgttgactcggcaatagggtgtgaagtattttctctactggattgcttcttagggtaccattagatatacatgaaggaagatgacaaggcaaaaacaagctttatcacacccttcggcacatactgcttcgtgcgtatgcccgaaggcatggaaaatgtcggctccacattttcaaggctaaccaaaaccattctaaagagccagatgggtcgcaacattttcacatatgtcaacaacatagttgtcgcaagcagaaacaaagatgatcacctctctgaccttgcagaaacgtttgccaatatgtgcgaagccaaacttcgcctaaactcagagaaatgtatatttgggatctggcaaggcacaattttgggttgcttgatatcaaacaaaggcatagaggcaagcccagccaagatacaagatacactggacatgacaccaccgcagtctgcccgagacgtgcaaaaactaagaggaaggctcaccaccttgaacagattcatctcccattcagcagagcggagcctccccatccttaaaacgttgcgtcggggcaaaagacttcgcctggggccgagagcaagttacagctttcgagtcactaaaggagtacttgtctaagctcacaacattgattagcccaggcctcacgtcacccctcctgctatacatcatagtctcacacaatgtagtcagcacggccctggtgcaggaaagacacaaagatggcagattacaacaatgtcccatctattttgtctccgaggtcctcaccaattcaaagtgcaacatggcagaactcgaaaaatagcctatccagtcctaatggctttgcataaactaaggcactacttcgaggcatacaaaataagagtccctacagatcgaggcctcaatgatttgttctgaaatcccgaagcatcttccaaaatagctaagtgggtagccaaactcttgagctacaacatcgcatttgaaacaagaacaacaatcaaatcgcaggtcctcgccgacttcatagtcgactagacagggtcttcgacccctagctagcgcaacacagaaacactttggaccatccactatgacatcgcatggtgccatgcgagggcaggcaccgcaacaatcatttacatcaccattcggggccaagtatagatagccgcatacctaagcttcgcactcgaatcagataaatgcacaaacaacatagcatagtacaaggctatcatcctaggacttcagaaactcagagctctcggtgtaaagacttgcatagtcaaaatagattccaaaattgtcgttggccaaattgagaaagactgcaccacaggggagtcggtcctcatgttatacttattagctgtgtggagtctagaaaagcagttcaaaggattcacgctccaacacatagacaagagcaagaatgaagatgctgacatgctagcaaaggcagcagcacagggtgactcgatgtccttagatgtattcttccatatgataggcacacccatggtaagaaaccccaagggtctcaaaatcacagaagatcccaaaggccaaaggactataaacttaatcatgactgaagactagagagtgcacataacactgtacctccagggccactaccatcccaccgatcaggtcgaggccaaaaggttaaaatacagaagctacgagttcgcaataatacaagggcaactatacaaaataggactcagccaaccctgctcaaacacattacagaggtcgagggcatcaaactccttcgagaggtccacaagggcatctgcggttctcgcttgggccctagatccctcacctctaaggtcatgcgccaagggttctactagccagccattatgtgcgcagcaaaccgcgtagttcgctcatgtgaagcatgccaaaaattctcacctcgagtaggggcgccttcgcagttcacaaagctgattgcccacactgttcctttacaacgatggggcctcgacatagtcggaccgctccccactacacaaggaaacctcaaatatgctttcgtcatgatggaatacttcaccaagtggattgaagcaagggtagtatccataatcacagcgaagacaacacaaaaattcttttattagaacattgtttgttgctttggagctccctccaaactgaccatagacaacgaaaagcaatttgataaccaagacttctgagaattttgtgcctcaataggtacacgcgcagtcttcgcattagtttaccatccatagtctaacggagttgtggaatgacaaaacgataaaacctttacgtcaatcaaagagagattgctcaaagacaaaagggcaagtgggcgtaacaattacatgaagtgctatgggtactaaacacaacagatcccatgcgacaggttttactccatttcaatggatgtatggagtcaaagcaatgactccgtaggaactcaaatatggctcaccctggtctgaccccagcatgaccccaaaaatcgatgagctaacagcaaaaaaaaaactcctcgacggagaccatgtttaggccctcaacgcattgaacaaatatcaaacaacaacaaaatcttggagagacattataaggacagcaagaacagaatccaagggaaaactcgaaccaaagttggaaggaccattcttaatcaagaagaagacatctccgaactcctataggcttgcaagccaaacaggcgaagaccttgaacattcttggaatgtagataacttgagaaaatactacatn

SEQ ID NO: 4526 - DNA, 688 bp, Zea mays
  Peptide Sequence Number=SeqID_10568
  Probeset Number=SeqID_18929
aactcctttcccccctcccgttcccaactttattgtgtttaaacactgcagaaaggttttttctggctgaaatcctgtgttatgcccattttcacccttgcagtactcataactccctgattgctctcctgaaggcgacagatgaattgcatcattttatatatttttcagtactatttgcgcatggaattgcttcctcagcttcctgtatactgatatgtctgtcgatggaatacttactttccaacaactataatcttcagagctactgtagaacactaaggcgtctcttttttaaatgcgttctgggaacattattcataatgagagatgcttcccaatatcaggtgattttttttttcctccccgttccgctttgtgtgtgattctttcatgactgcgcaatacttacagaagctatgacatcttctctttcccgtgagaaacctgatgcccacatactgcctaattaacctattttccatttttttcctatatataacttttttttccttatcgactccgtaccaccatcagaggtatttgcccggcacccaattctccctattatgggtcgtattagacaggttaactggtcgaacatttaaaccgactacactgagcataccctgttagtacccaacttcatcgcctttagcacatcccccttgtcacctctgacgtaaag

SEQ ID NO: 4527 - DNA, 1141 bp, Zea mays
  misc_feature (1021)..(1021): n is a, c, g, or t
  misc_feature (1131)..(1131): n is a, c, g, or t
  Probeset Number=SeqID_18930
ctcctttcccccctcccgttccaactttattgtgtttaaacaaacaggttcatgaggctttagttacttctggaatcacgactggaatctatctattgtgtatgggcagcagagctagagaggaatcccatagatccttcattagggatgaagttcttgtaatggtggcaactatagcttttgggatgggtattgataagcctgatgttagatgtgtaatacactatggatgtccaaagagcctagagtcttactaccaggaaagtgggcgttgtggaagagatggactgccttcaatctgctggctatattaccaaagaagtgatattacaaaagctgatttctattgttctgaggcaaaaaatgaaacccagaggaaagcaatcatggattccttcatggcagcacaaaaatattgcttgcttgctacatgccgtaggaggttcttattgcaatattttggtgaagaatggaacattgactgtggtaattgtgataattgcacagcagtgaaaaatggagagggatttgtcaaaagaagtcttttttgttgctgtcctgcatcaaatcttgtggaggacgctggggcctcaatttacctattgatgttctccgcgtttcacgagccaagaagattgttgacaacaattatgataaactaccaatgcgtggtcgtgtaaaagattattctcccaactgttggaaagcacttggtggtcttcttatagcacatgcccttgaaacctgtaaagcctataaagtatactctgttttcaaggcttaacatctttctatcaacctaaacagtaggtgcattcatgtaacatctcacattatttgaaggagactgttcgcgatacatttacatttgtcagtgtcagtccaaaaggcctcaagcttctctcatactgctgacaagatagatgcagctcccctgccatctcagctgactgcaatatatgattgagctataggatcccggtagttcactcctatagaaggtgttatgaatcttgctccnacattataagctgatgattcttctgacgctactacctacctctatcactgactcttgaatgatggggatcgaaaatgcctccacaatatccaacggctcggcatgggtgnatgatggcca

SEQ ID NO: 4528 - DNA, 790 bp, Zea mays
  Peptide Sequence Number=SeqID_10569
  Probeset Number=SeqID_18931
caagctttaaaagttgcggacattttccagcacaagtcagcacctgtagcataacatggcctcccaacggaggcggtatcaaggggaagaatgtgggcggaccgggaacaacgcatgctgaccccaggaagaagtcgctaggccggtcagtcaagcccgggctgcagttcccggtggtccggatcgggcgctacatcaagaaggcccggttcgctcagggcgtgggcacggcgcaccccgatctggctccgccgccgttctggagtacctgctagccgaggttctggagttgtcagggcaaccgccgaaagtccacaagaagacgcgcatcctattggcgtcacgttcttctggcgatccgcaacgacgaggagctaggcaagttgctggtcggtgtcaccatcacgctcggtggcgtcctcaccagcatccactgcgtgctcctgcccaagaaggcggcggagaaggcggccatcggcggcagcaaggagcgcaagtcccccaagaagggcgccaagtcccacaagaaggcttagaaagtagggtcttcatttgcgctgtgcgctgtagcactgttcgcgtctagatctgtcgatgggacgtgtcattctgtagtatcgtccaggggtcttacagcatgttcgtcttcggtgggaagatcttcagcagtcagagcacgtagagttctaaaataaacccatgttctgtttctcgttggcgattcggcaataagtcatattgtttctgtaaaaaaaaaaaaaaaaaagcttatcgatggagtcgacctcga

SEQ ID NO: 4529 - DNA, 622 bp, Zea mays
  misc_feature (1)..(2): n is a, c, g, or t
  misc_feature (133)..(134): n is a, c, g, or t
  Peptide Sequence Number=SeqID_10570
  Probeset Number=SeqID_18932
nngacgaaattgcagacgtacatatttcttaacgttttatgttcctgttgtgcgattaaatatgcgtgatcccttgggtgcagcgccatgccgacatctttcgatggttcctttgcagatcgaccatgggacnngtgtgtatgcaaggttctgcatatgataagatatgtaatgtgctcagctccttagcaggtccaagaattgaagccgcaatcagggcatcagcaatgcaaagagaactgacttggttagagggtagagtcagccgagattcagtcgctttctaactggctcacatgtatggaagtgttgtagcatccctcccatccacaaatatcccactgcattgtatctggtaattgctgcctaaatgctaccatattatatcccatcctcccaccatcaaaatatctatatgcccttcttctctacatccacaccagatcaaaacataatctactaacactcagctcatcacctatcactatacatcaatccaatcacactttccaccccatatccgttccatccatactcaatcactatcccctaagcccaaaaaagtggcttctatgctttaactatcacacaataagcggcacatccaaattctttccccccc

SEQ ID NO: 4530 - DNA, 852 bp, Zea mays
  misc_feature (1)..(19): n is a, c, g, or t
  misc_feature (621)..(852): n is a, c, g, or t
  Probeset Number=SeqID_18933
nnnnnnnnnnnnnnnnnnnctcgaggctcgcgagccggctcgggctcgatcaggctcggctcggctcggtgaggctcgcgagcctaaacgagcccgagccgagcctaattccatggctcgctacactaacgagccgagccgagccgagccggctcggtgaggctcgcgagccgactcgaggctcggtccaaactattacagctatcacttgtcagttgtcagtttgtttattagtgtccagtcatctagatccagtgaccagtgtgttgttttggtcataactcacaaggaactagagtgcagggacataattttttattatatggaacatattgtgcttcaaatttgagctaatgaccgtaattaatgttgttgagtacttgagtgtacaggctcgcgagccgagccgagccggctcacgagcctatatcgagccgagccgagcctcatcatcgagctcaagaagtgaccgagccgagcctggctcggctcgccattccaccgagcctcaccgagccggctcggctcgtttccagccctacccttagccatgtgtaatccttcgcgtcgtcacgcggcactgctggaccctcgcccctcggcttcagaggagctcttggnnnnnnnnnnnnnnnnnnnnnnnnnnnnnnnnnnnnnnnnnnnnnnnnnnnnnnnnnnnnnnnnnnnnnnnnnnnnnnnnnnnnnnnnnnnnnnnnnnnnnnnnnnnnnnnnnnnnnnnnnnnnnnnnnnnnnnnnnnnnnnnnnnnnnnnnnnnnnnnnnnnnnnnnnnnnnnnnnnnnnnnnnnnnnnnnnnnnnnnnnnnnnnnnnnnnnnnnnnnnnnnnnnnnnnnn

SEQ ID NO: 4531 - DNA, 1047 bp, Zea mays
  misc_feature (1)..(1): n is a, c, g, or t
  misc_feature (949)..(1047): n is a, c, g, or t
  Peptide Sequence Number=SeqID_10571
  Probeset Number=SeqID_18934
ncagcaaggactcaaccgctccgacagctgtccctccgccaggctccatcgctcctccgacggccacgacatcacaccagctgggtgccaaaatctctccggcagggccctcttagggagggttggccgcgcggggacgaggacgaggtacgcgctcacttgaggccgcttgctccctctcccgcgtggacgcttgtaaccccctctgctctgccctaggtccgcccaccactgcttccgcgccggcgtccccaggaggttcatcctccactcccgaggcgacgaccccttcttctccacatgatcggggcttcctaggaggccatcaatgccggcgccacggaacaggcgtgactgcacgaacacccacccacagatgtcttccccgtggaggaagcgaccgggctccgggtctccgccgtggccgccaccgccggatccgcatgcctctgcgtttgagtcgccggatccacccgccctctctccatggcggcgccttcctgcccgcaggtttacaacatcggtcgggtctgcgcctctctgcctcacaaagccgccatggccgcggagcttcctcccaccggcgctctcttccctaaccgcccccctcttgggcatcgtgatcctttcactcttcttgctcgcggtcgggctccgtcgcgtcgccttatagcccacccctctctccatggcggccccttcctcgctggccctcgccgacactgaccaagatgccgaccactttctcccccgcactcccttctccgtcacagccgtcgccgtgagcctaagtagccacacgcgggcgtcgccgtcgctggcagagctaacaggcggacatcgctgctgctggtcgggcgcgcgtgcggacgctgccaccatggggttacctggcacactagccgccgccacagccagacgcgctagtagccactgtctcttatccatnnnnnnnnnnnnnnnnnnnnnnnnnnnnnnnnnnnnnnnnnnnnnnnnnnnnnnnnnnnnnnnnnnnnnnnnnnnnnnnnnnnnnnnnnnnnnnnnnnn

SEQ ID NO: 4532 - DNA, 610 bp, Zea mays
  misc_feature (21)..(21): n is a, c, g, or t
  Probeset Number=SeqID_18935
taccctcgagctcggccgggnactatacatttttaaaaaaaaaaaaaaaaaaaaaaaaaaaaaaaaaaaaaaaaaaaaaaaaaaaaacattagcacaaagaacacaatagaccactgatttcacaatgaaaagggagacaatgccttcatggctagaactgttgcttgcaacacaattctttacgacttgtgctaaccatcttcttgctagtcgcaatgaatgcaccctattttgcacccagtgtgagaccaaaccagctgctttctgtaactattgtcgttcaagtgatcattccacccaccgtgcaatccagataaggcgctcctcgcaccatgacgttgtgaggccgcccgcacattgaggcaatccttgatgtcagcgatgtgcaaacttatgtaatcactattgcaacgcctgcactcctgaatgagcggccataaatggccagcccctactgtccccccctgccaggccccccacatcatcaacacgtggcctgcgaaaatatgtaaaccgtatggctaattcccccccccccccgctttccggcgccccttgacatggcctgtcctgacgagcgccccacaataccggaactgctgcccgccg

SEQ ID NO: 4533 - DNA, 634 bp, Zea mays
  misc_feature (601)..(634): n is a, c, g, or t
  Peptide Sequence Number=SeqID_10572
  Probeset Number=SeqID_18936
acaccatatagagcaaatagaaaatcttcatagaccaattaccatggaagcaggctcagttgttctgatggatcttctatggtcagtatttgaactgctactgtcagattattattgtaagattcttgtttttttatttgttgatgtcatgatttatttgtttgatgcttaaaggtctgatccgactgagaacgatagtgtagagggtctcaggccaaatgcacggggccctggtcttgttaccttcggggtcagtatcatctgttattcagctgctttttagctggttcccatggtttatgatcttgacaccaccacagatttgacacatgacccctctgtctattgttctcatattttgtatttttatttcccttcgtgaacactcaaaaataactcacacatcaccgtcgacataattttccatgtcgtagcattagtaatcgttcctatctcactctattctccatcctccatttcatcatattccatcatttcgccatgccaccctctaccccccctagatcgccttcgcatccgtatcgttatatccgattccctcctctccctattatatattcacttactccttttatctttnnnnnnnnnnnnnnnnnnnnnnnnnnnnnnnnnn

SEQ ID NO: 4534 - DNA, 867 bp, Zea mays
  misc_feature (68)..(68): n is a, c, g, or t
  misc_feature (89)..(89): n is a, c, g, or t
  misc_feature (101)..(101): n is a, c, g, or t
  misc_feature (187)..(187): n is a, c, g, or t
  Peptide Sequence Number=SeqID_10573
  Probeset Number=SeqID_18937
cgggcccacgtgtcatagacccaaggggtctttcttctttggactcccaagtacagggcacacatccngtgatgggagggccgggctgncgcggtcggggncgatggagggcagccagagctggtcgcggcctcggcttgctcgcagctgctcgcagccaggcctgcggtggcctcagatggcctgnccatgcaagcgcgcggcgccagcttgcagcaatggcggcgcggcacctccggccatgacggggctcggactaggggcgagaacagatcaggacggcgaggggaaggtgatgatggtcccaaggcaaacgactggcgatcatgtatggcggtttgatgctacaggcggcatgctggaatagaggaggggagggagccaaggcaagcagagcgcagataggagtccaaggaagctcagagggtgcgcgacgtcccttttaaaggcgaggcacgacaggctcctagcaggaacatggccagacattagtggacgtgggcggctgctgcagatcttagatcacgtcagccagctgcagcaggtggcagagcgactttggacggacgtttttggaattttccttttagaattggaacctggtcactgtagaatatatcttccttgatgtacactttacaaatcttttacatggcttgaggtgattcgtgcactggttagagagttatagacccatgaaaattggtttgtcagtgggttagaaatcagtggaaactggtgaaatttgagtgtcaaaatatgtcaaacggaatcggatgaatgccatcttttaatatgttgtgcctctcttagttattaacaacttttatattggagaaactcgagggggggcccggtacccaatcg

SEQ ID NO: 4535 - DNA, 553 bp, Zea mays
  Probeset Number=SeqID_18938
cggctatctccttttgcttctggatggtaacatggcacatcctggtggtatgaaataatgcttcgaacgacgaaggtctttaaccattaacaattatgttgtcttgttcttgatttatagcatttaagaacaagtgaccaacagctcccaagtggaacaagttgatcttgatgaattagatgatgaagaggctccgtgtgtcgcgctaaggaacatgttcattggggatgtgtgtccaaaagaatccgaagagcctccacaagcacaagatgaacaatcatcttccatacaagcatctccaccaactcaagatggggataaggcttaagaagatgaagatgaagatcaggatgatgagccacctcaagaggaggacattgatctagtgggagatgaagatgagcaagacaaggaagatgatcaagagattcgggatcaaagaccaccacacccaagagtccaccaagcaattcaaagagatcaccccgttaactccattcttggtgacattcacaaaggggtaactgaaagggaaatagtctcaacatttcct

SEQ ID NO: 4536 - DNA, 502 bp, Zea mays
  misc_feature (3)..(4): n is a, c, g, or t
  misc_feature (6)..(6): n is a, c, g, or t
  misc_feature (16)..(16): n is a, c, g, or t
  misc_feature (24)..(24): n is a, c, g, or t
  misc_feature (31)..(31): n is a, c, g, or t
  misc_feature (34)..(36): n is a, c, g, or t
  misc_feature (38)..(38): n is a, c, g, or t
  misc_feature (45)..(45): n is a, c, g, or t
  misc_feature (69)..(69): n is a, c, g, or t
  misc_feature (75)..(75): n is a, c, g, or t
  misc_feature (77)..(78): n is a, c, g, or t
  misc_feature (81)..(82): n is a, c, g, or t
  misc_feature (84)..(85): n is a, c, g, or t
  misc_feature (96)..(96): n is a, c, g, or t
  misc_feature (98)..(98): n is a, c, g, or t
  misc_feature (105)..(106): n is a, c, g, or t
  misc_feature (111)..(111): n is a, c, g, or t
  misc_feature (117)..(117): n is a, c, g, or t
  misc_feature (151)..(151): n is a, c, g, or t
  misc_feature (162)..(163): n is a, c, g, or t
  misc_feature (170)..(170): n is a, c, g, or t
  misc_feature (175)..(175): n is a, c, g, or t
  misc_feature (178)..(178): n is a, c, g, or t
  misc_feature (193)..(193): n is a, c, g, or t
  misc_feature (199)..(199): n is a, c, g, or t
  misc_feature (205)..(205): n is a, c, g, or t
  misc_feature (221)..(221): n is a, c, g, or t
  misc_feature (240)..(240): n is a, c, g, or t
  misc_feature (243)..(243): n is a, c, g, or t
  misc_feature (246)..(246): n is a, c, g, or t
  misc_feature (259)..(259): n is a, c, g, or t
  misc_feature (264)..(264): n is a, c, g, or t
  misc_feature (272)..(272): n is a, c, g, or t
  misc_feature (280)..(280): n is a, c, g, or t
  misc_feature (334)..(334): n is a, c, g, or t
  misc_feature (345)..(345): n is a, c, g, or t
  misc_feature (423)..(425): n is a, c, g, or t
  misc_feature (428)..(428): n is a, c, g, or t
  Peptide Sequence Number=SeqID_10574
  Probeset Number=SeqID_18939
atnntntttttcgccnccacctcnccattcnccnnnancttcttntgctggactgcacttcgtcctgcngttcanannatnngnntcccttatgcntngattgannactgnctggcnaagggccgctcaccgcgacaattatgcccgcacngatgctgaagnntcgtcanagatnacnttcttcgccccgcanctttcngaaagngcgcgtccttggggtntgtgagaacccacattctncanccntacaggagccaanaggcnatcacagntggtatcntacctttattcacccttgttcctccaacaatcatcagcccttattacatcaggntaccttttggngcatttattggcacaaaaacatcagggcacaacaactacaacaacttgtgctagcaaaaccttgctgcctactctcannnaanagcagtttcttccattcaaccaactagctgcattgaactctggcttcttatttgcaacaacaacaactaccatt

SEQ ID NO: 4537 - DNA, 835 bp, Zea mays
  Probeset Number=SeqID_18940
ttcgttccagttgcattaacttggaaagacaaaagcatgattatatattgctgagcacatatcttgtgttttattgtttagaaccatttgatcctacccacttgtctaagtgttccaaacggccttagcttaggttcatactatggtagtcaatgacttggatgttactctgacacgaagttcttcatcatttggatgtggaagatgctctgactgtagatcttggtcacttatcattgaacacgtagttggtatagataaagcgcaaacactgaagctgagagcactggttcaaaacaagattatgcttatttttgtggacagtggcagcacacataattttgtcaacactgcatttgtgcacaagtgtggtctacgttcagtacatattccaccacttcaagtcaaagtagcaagtggtgaaacctggtgactaaccagtctgttccacagatggaatggtggacacaaggttatacattccatatagatatgatggtgttagacttaggtctttttgacgccatacttggctatgattggcttgatcctcttagtctgatggtctgtcactggaatcagagaactttggattttcattataaaggataagttgtgcatttgcagggtatattacctccacaacagtctctatagagtgttacttctcagaagctaatcaaatgggctattggcaatgatataggagccttggtgatggtggaaattttatcagactcacataactcagccattgtaagaattacaattatgcccctcataagggattacaacagtgactcaaacatttatggactaagaggtcattctactt

SEQ ID NO: 4538 - DNA, 481 bp, Zea mays
  Peptide Sequence Number=SeqID_10575
  Probeset Number=SeqID_18941
gttttgtcacctccgcgctcaaaccttcgaggtgactgcatccccgttcgtatcatcgctggaaaatccactccccaaccctaagcctctcaagcctcctgttctacggccattagagccatggcgaagcaggcgtgcagatgcgaatgcaacaacatcagtggaggatgatgcctcactcaggacctcttccgtgcttgacacctccccatagggcagcacatctccaacggcgaggaagaggaaggacacagaagccaatgctacgctcagctctcctcaaccaaaggtacgtatgtagcactagcaacttgcatacttgcagcagacaccactatagttccttctgtgacaatgtcttctcaaatttggtagatctatgatttccttgtaaagaggagggcaacgacaatggcttggtagatgagccgattttttagcgatagttagctcctgattctttttgtttttgaccaccaaa

SEQ ID NO: 4539 - DNA, 865 bp, Zea mays
  Probeset Number=SeqID_18942
gggagggaaattcggaagcatgcctcaaaatagcaatcacagttgaggcaccacttgtttcatagacataacataagtgcatatatatatgtataactggaaggaaacatcccagggggcaccaaattcaggagattttgaaaccccgttttgtttcaacaactccgtatatgaggcccaggacatgatcatccgcgccacgctgccggccggcgccgcctgcgtggtcaaggcgggccatctggtcgatgcgcacagcgtgcgcttctatgccccggattccgagcaggccggcctgctggcgcgccagcaggaaatcgaaaacctgcagcgcgagatcaaggcccagcagctcatcaccgaccaggcccgcgccgccgtcgcccgcgccgaggtcgcctggcagcaggtcagccaggccatcgcgccggcccgccagcgggtcgccgaagtcacccgccgggtgcacgacatccagctggagcactcgcgcctgcagcagcaggccgagcagtccggccagcacgcctcgcgcctgcgccaggacctcgaagagatctcggcgcacgaagaagacctgcgcgccacccgcgaagaggccgaagcccgcttcgaggcgctcgacgaggaactggccgagcaccagtcgcgcttcgccgacgcggaaatggacggcgagaccctggccgcccaggccgaggccgcccgcacccgcctgcgcgagctcgaacgcgccgcccaggaagccgaattcgccgagcgcggcatccaggtccgcatcaccgacctgcagcgcaaccgccagctggcggccgaccagagccagcgcggcgaggtcgaactcgaacagttgctggccgacctg

SEQ ID NO: 4540 - DNA, 600 bp, Zea mays
  Peptide Sequence Number=SeqID_10576
  Probeset Number=SeqID_18943
tgcccatggtggcattagagggaagaagaggagagtaaacaacagcaagagatgtgaaaaagccggagaggcaaaagcactatttatagaagaagaaggcaaccgctcacctcctaccacggccatggaacaatttcaaaatcgacccaaagatcgggggcttgtgggggacagatatcccctgggtccaccagaaggataaaagacctcacgaaaggcccaaaggccccataattcctcatggccaaggaaaagaaggtgagtgctcgagattcccccaagtactctacttcttgtgatgaggattctagtgatgatgaagtagattactctagcttgttcaaaggattagatagagctaaagtagaaaagattaatgaactaattgatgctttaaatgaaaaggatagacttttagaaaaacaagaggatattttgtatgaagagcatgataaatttgttagtgtgcaaaaatctcttgctttagagattaaaaggaatgaaatgctatcttctgaattatctgcttgccatgatactgtgtctctagaggaagcaaataaatctagttcatgtgtagagcatgttaatatttgtaat

SEQ ID NO: 4541 - DNA, 425 bp, Zea mays
  misc_feature (357)..(360): n is a, c, g, or t
  Peptide Sequence Number=SeqID_10577
  Probeset Number=SeqID_18944
ttattttcggatattaaaaatatcgggggtaaaatacagaaccagtcaatcatatttttgttcatgttttaccaaagaaaaaaaatcctctacaataaatattacattatgtataaaaaaattacaagtcatgaataacgcctataacaatatccatatccctgcttgtggggcttagctcatctaggtatctccatccatgacaaacatgttacttgagttctaattctagaatactcggggggggggcctacgcagctgactcgaggggggtcccggtacccaattccccctataaagagccgcattacaattcactggccgccattttacaacggcctgactggaaaaaccctnnnnttacccaacttaagcgccttgcagcacatccccctttcgacaactggcgtaatagcgaagagggc

SEQ ID NO: 4542 - DNA, 556 bp, Zea mays
  misc_feature (182)..(182): n is a, c, g, or t
  misc_feature (241)..(241): n is a, c, g, or t
  misc_feature (243)..(243): n is a, c, g, or t
  misc_feature (333)..(333): n is a, c, g, or t
  misc_feature (388)..(388): n is a, c, g, or t
  misc_feature (406)..(406): n is a, c, g, or t
  misc_feature (408)..(408): n is a, c, g, or t
  misc_feature (411)..(411): n is a, c, g, or t
  misc_feature (421)..(421): n is a, c, g, or t
  misc_feature (434)..(434): n is a, c, g, or t
  misc_feature (483)..(483): n is a, c, g, or t
  misc_feature (508)..(508): n is a, c, g, or t
  misc_feature (544)..(544): n is a, c, g, or t
  misc_feature (555)..(556): n is a, c, g, or t
  Peptide Sequence Number=SeqID_10578
  Probeset Number=SeqID_18945
aacgcgctttcctctcgccctcgctcctccgccgccgccgccgccgcatcaagcccccgccccgccgtcgcctgaggtagacaccaatccgccgccatggggcgtatgcacagccgcgggaagggtatctcatcgtcggcgcttccctacaagaggacgcctcctacctggctcaagaccgntgcctccgacgtgggaggagatgatcacaaaggcagcgaagaagggacagatgccgcgncnaaaatcggcgttcctgctccgtggaccagcacggtatcccccttggtcaagaagcgtcaccgggcagcaagatcctccggcatcctcaangggcccatggggctggcaccagaaaatcccccgagggacctgtacttcttcatcnaaaaaaaggggggggggngnatnaaggaagcanccttggagagggnaacagggaaggacaaagacttctaaattcagggttcattttttgggggnaaaagaaggattccaccggccttgnccggctactacaagcgcacaaagaagcttcaccccncccgggaaagnn

SEQ ID NO: 4543 - DNA, 738 bp, Zea mays
  misc_feature (648)..(648): n is a, c, g, or t
  Peptide Sequence Number=SeqID_10579
  Probeset Number=SeqID_18946
atcgaaatcaatcgtgttgttcgcctccacgacgagaccccgagaccaatccagccgccgccgccgcctccgccttcgccttcgccttcgcctcgcctagtattccctccgattcagaggccgatggagtgcatcgccgagatgccccgcgcgccgctggggctgcggaagcgcaagcgtcagcgtctcggctgggacgtcggccctgccgagatgtataaggccgtgcggccgcggcacggggggggccccggccccgccgagatgttacagcttggactttgtggacaagtaattgtgaatggtgttgcagctgcggggtttgggctttcctggggttcttcttaagtcaaagaagagcaagatcaggctcatcctcgttcccctcctcagggagaagatgacgggcatgatgattatgtttttgctgttggagataacctcacatctcgctataagatgaaatggaaaatgggagctaattgatttgggatggtatgatcttcagaattcagtctaaaaactcaaatacgatttgctggattggcattgtagcatctgctgttgcatagctttgttttcaatatacattataccctttgtagcacagtgattgtagtgttgccactaggaaaggaaaagaaatgntggctatcagaatcgctaggggcattataaagtacaggtatgctgcaatgatcgaaattggcatgctcaagcagcttgataaatatgatg

SEQ ID NO: 4544 - DNA, 438 bp, Zea mays
  Peptide Sequence Number=SeqID_10580
  Probeset Number=SeqID_18947
taattttaatgtccgtgatccaaaaaaacggtgtcgcataatggtgtaaaaagtacccactgccgctgcaactcatctatagcattagcagcatctttgtagtgcagaaaaaccgtgttcagacatttttttccagaattttatatatcgggcccccaaaaagaaggctgcgcgtgacgctaagtctaccttatgcctctgcaatgcaaccagattatcagcagagtttttgtaaacccgcatttaagtgtggcgagatgcagttcctaacttgtattctgaagggggaactccggagagatcggcaagtcctgattaaaaaaaaaaaaaaagggggatgattgcacagtgctctggaaatgaggatttttcttgtggcgagatgttgtgagtaacttgtattcaggaggggaactctcaaaagatcctcaagtcgtg

SEQ ID NO: 4545 - DNA, 1043 bp, Zea mays
  Probeset Number=SeqID_18948
ctgtaaacagcaagagaaggaaaccctacgggagtactaccgcaagttcctgactctcaagtctcaactgccttcggtcgacgaccacattgccatacactacgccatcagtggccttcgggctggcgtactatacagtcactgcattagggacccacacaaaaatctccaagagctctatcagctgttcgagaagtacgccagatccgaagagctccatcagcgtaaggtcgagtctcacagaaagcccaaggaccctccgcagttcagccgaacctggacaaggccttcgcagtcagactccggacgggatagccgcagtcagcagcaggtgcacaacatagccaaccagcaccccgccggggaggcagctcgccgtcaagaatatcccctagggccacggcaatggcacgcgaggccggggccgaggacgggtgcaccccttgcttccccagccccccccttcgctgctttccccgccgtacccggtcaaggccttcgctactctgactcttggacgcggacagccaccagttcagcgatcatatgccaaaccatagccaaccccgccacccccgcctgctcaggacagttccctccgtccatgaattatccccccctttgctcgccgttaaatggaccatgttaaaatcccggggtttcgagtaacggtccgccaccaaacccgcatcaagaatactttacttgccccacgttttttatggagaaaagaaactgtgtcgttattacccataatgcgggaattggcccctacgaaaccttctcacaccaccgccgtagtccgatattggtcatctggggcacaactcccacgcctcacataccacttaacaagttctcccctttctgcccgttattatacccctcacccctgccccaaataccttctttatcaaacggcccctcgccccacataaaccttcctttgcccaaattcacctgctgattcatgaactcacccaggcacgcgtacaatgtgcggaaccacattcctggttcccgaggcaccccaaacccactcc

SEQ ID NO: 4546 - DNA, 587 bp, Zea mays
  Peptide Sequence Number=SeqID_10581
  Probeset Number=SeqID_18949
cgattgggtaccgggccccccctcgagagcgttcccagagatccttcgagcttgagagcgactattgccctgctctgtacaaaggtccctggtccactcattacaaccgggcacgctggctcctcttcacatcacacaaaaagttccctatgtcatttccatcagtcatcggcctggtagcagaacacgctggtgacaaaacgatttgctcaacccaagcgaaacgcgccagtgccaagcgcgactgcggtggatctccattgagtgaaggatattggaatggagagccttgtatctggattgcaccagcaatgattttcctaaaagcgaagaaacagcgatcacttccccttgcagctctagtcaaaagctgcagcaggattcatttccttggtgggaagatacacgagctggtgccgacaaaagccacatgtacccgaagattgacattcaccaccaccaatccgtccatcacgaatttcccaaagtgctgggattcagacgatttgaaaggcgctcgtggcactggcctcattctccccgcggaccctgcaccccagacaacatcatggggtcttacgtttgaa

SEQ ID NO: 4547 - DNA, 290 bp, Zea mays
  Probeset Number=SeqID_18950
ataggcaattctgaaaactgcaacatacaagatggtttgagtacaccctagagttaagctgttcagcaggaaaaaacaactcggatatcctgaaacgagcgtacagtctaatggcagaaaaaaaaaaaaagatccagccaagcacatgcctagagtgggtcatcatctttcactttctttcacagcatctgcccagatgcactctttcagttcagaaatcaccaaaaaaatccctagaagaattcaaactctagataattatctggccccttttggttaggggctggcgc

SEQ ID NO: 4548 - DNA, 416 bp, Zea mays
  misc_feature (7)..(7): n is a, c, g, or t
  misc_feature (14)..(14): n is a, c, g, or t
  misc_feature (56)..(56): n is a, c, g, or t
  misc_feature (74)..(74): n is a, c, g, or t
  misc_feature (77)..(77): n is a, c, g, or t
  misc_feature (139)..(139): n is a, c, g, or t
  misc_feature (143)..(143): n is a, c, g, or t
  misc_feature (149)..(150): n is a, c, g, or t
  misc_feature (159)..(159): n is a, c, g, or t
  misc_feature (162)..(162): n is a, c, g, or t
  misc_feature (169)..(169): n is a, c, g, or t
  misc_feature (173)..(173): n is a, c, g, or t
  misc_feature (188)..(188): n is a, c, g, or t
  misc_feature (198)..(198): n is a, c, g, or t
  misc_feature (206)..(206): n is a, c, g, or t
  misc_feature (218)..(218): n is a, c, g, or t
  misc_feature (220)..(221): n is a, c, g, or t
  misc_feature (226)..(226): n is a, c, g, or t
  misc_feature (229)..(229): n is a, c, g, or t
  misc_feature (234)..(234): n is a, c, g, or t
  misc_feature (237)..(237): n is a, c, g, or t
  misc_feature (242)..(242): n is a, c, g, or t
  misc_feature (244)..(244): n is a, c, g, or t
  misc_feature (253)..(253): n is a, c, g, or t
  misc_feature (255)..(255): n is a, c, g, or t
  misc_feature (261)..(261): n is a, c, g, or t
  misc_feature (265)..(265): n is a, c, g, or t
  misc_feature (269)..(269): n is a, c, g, or t
  misc_feature (281)..(281): n is a, c, g, or t
  misc_feature (283)..(284): n is a, c, g, or t
  misc_feature (290)..(291): n is a, c, g, or t
  misc_feature (294)..(295): n is a, c, g, or t
  misc_feature (301)..(301): n is a, c, g, or t
  misc_feature (303)..(303): n is a, c, g, or t
  misc_feature (307)..(307): n is a, c, g, or t
  misc_feature (327)..(328): n is a, c, g, or t
  misc_feature (335)..(336): n is a, c, g, or t
  misc_feature (349)..(349): n is a, c, g, or t
  misc_feature (351)..(351): n is a, c, g, or t
  misc_feature (353)..(353): n is a, c, g, or t
  misc_feature (355)..(355): n is a, c, g, or t
  misc_feature (358)..(359): n is a, c, g, or t
  misc_feature (365)..(365): n is a, c, g, or t
  misc_feature (370)..(370): n is a, c, g, or t
  misc_feature (374)..(374): n is a, c, g, or t
  misc_feature (382)..(382): n is a, c, g, or t
  misc_feature (386)..(386): n is a, c, g, or t
  misc_feature (390)..(390): n is a, c, g, or t
  misc_feature (393)..(394): n is a, c, g, or t
  misc_feature (396)..(396): n is a, c, g, or t
  misc_feature (398)..(399): n is a, c, g, or t
  misc_feature (402)..(404): n is a, c, g, or t
  Peptide Sequence Number=SeqID_10582
  Probeset Number=SeqID_18951
acatctncagcggnttcttccaaagctccacttccgacgagaaccgccacacctcnaatctcgaaggaattttntgnggggacccccttctgacgggacccatgggagagggctcccccggcgatcgccaggaaggtcnccgngttgtnnggaaacccnccnctggggnaccncacaaaagggcccangggggggttngcccggtncccccccaaacncnnttctntgnggccnggnccccngncaagaaaanantgggtnaacnattncccccccccccnanngaaaannggnntttttncncccnggggggggggggtttttttnnaaaaaanncataggggggaananananggnnttgggnggggngggntttttttngggngggnggnngngnnggnnnaaaaaaaaaaaa

SEQ ID NO: 4549 - DNA, 503 bp, Zea mays
  Probeset Number=SeqID_18952
ccgccaccgtcgacccgggtccccgtcgcgtctccgtcgccgccgaggagtccccggagcccgccttgagagtagccccgccgccgagccgccccgccgtgaatcgccccctccggtgcctctgccccgacccagaccctaccggagaactccccgcgccctccccgacctccccgaccactcggattgccccagagccccgccagtcgcccgtgcccctcgtctccggcgagccctccgccgcggggacgagcgccgtcgccccagctagcccgatccagcggcccaggcccactgcccccctcaccccgtctctctgcccgctaggccccacttgtcagctcgcccgcgcgcccgcgctgtccgcccggtcccgcttgccagtcgcccgcgcccgcgctgtccgcccggccccgcctgtcagccgctcccgccgccgcgcgcccgcgcgcccgcccgcaggatctaatcctagccgccgatctgagatccaacggctgtag

SEQ ID NO: 4550 - DNA, 721 bp, Zea mays
  Peptide Sequence Number=SeqID_10583
  Probeset Number=SeqID_18953
aggaaggcccatgcgcgcgcccatcggggtgaggaaagtgatatgctcccagatgtccgaagtaagcaacgtacattactgtcccaggtccatgcgcccgtgcgcttactcttcactgtcattgtcgtatcatgacgcgaagttacgtcggtaggtagcaagtgagtcgagatcacatctatagcttgcgctagtacgttaatctagttcagcatgctcgagtagcatgcagcgatgcattcgtgtagcatgaaaaacagttttataaagagacttctcacgctctcaatgatttatcgggtcagaacaacatgatgtgatgtcttgcgatcctcaattgcatctgaagcatctgagatcgactgggcacatgtcgccacaggtcatagaaagacgcaaaaacagatcttttgttacgcgtgagaatgaaaaggcgaggcttgtcgcttgatgcaaagggcagcctagcacaccgacatttgaatcgcgcaagctctggtgtctgtgcttcacttcagttgaccagaaggctccaaaaacagaagagacgcgtggcccaagtcagaaccccggtcaaaattcctccttgcgcggaaggaaatggtagttcgtggggggttatccctcgtggtccggggttgtagaacaatatgcatattctcattccagggacggatacggcattcccaggagtacagactcggtcaaccttctcagggtg

SEQ ID NO: 4551 - DNA, 824 bp, Zea mays
  Probeset Number=SeqID_18954
catggagtgcgattagggcctttggtcaaaacaccaaaattctcatagggggaggtaccttaggggatataacctgatcaaggctcttgctattcaggttggataccttttggatagtcgagcgttgtgtcctaatcgttataccacacaaggggaattggggatgtcttttagttgtataggatgtgtacgacttggttttctcttcaaaaaggagtagattgacgcgcccatttaatgtgaatttttacacaatagtggggatttggatttgggcatcccgcccatgcaggttttttatctttttgtatttgtgtgaggaaaggatttctttcatgactcaattacctggtgaaaggggcgattaaatctatgggccttcagacagtgtcccccacggtcttcgtcagtcaatctcctttaaaggcaccgaaagaaaagattaaaattattactaatcagagacgatttcagccttggcacagcatcggcattggtattcagattgttcaagtgttaagcatgttattcataagggagttacgctatatacaccatctaactcaagttatatgatatacgatacatcaagtatgcggtccaacctaagcaagtatacgtcctcatgtcctcgcatctcaatgtgaagagaatggctctgcacgtcttcttggttgttcaggggcatgtactgagccatgatgacacggatctcggagtccagtgtacgtccggatcctgtacttgtaccaagcatatcctgcaattcagtgctgcaacaagcacaaagaagatgggggggggggggggggggactagtgagc

SEQ ID NO: 4552 - DNA, 689 bp, Zea mays
  Peptide Sequence Number=SeqID_10584
  Probeset Number=SeqID_18955
acatatgcactgagggtgtgagtcgtcggatggcgtatcgtatagggctcttagttattacgccagcagggaaagggggatgcaaagcagtcgactaagctgcgagacccagggtcattacagtcgcatcgtcgtaaatagcgtacactgagcgcgattgatacggctcattattgggagaggtgggtatcggggcagacgtccgaggtaggacggatagatacaatcttatgctttcagcatccagggagatggattgtaagattacgaatatcccgatgcgagtggtcatatcagtcgctagaccgcgctagcaggtttagtgtgaggcaacatcacataatagattatcgatgataagagtcggcccagtgcctgtgcgaatactattcaggtccacctcgggaccagccatcgtctttctgggctctggatgcaggctgatatagcaggggtttatgatcagtgaaagttacagcgagcgtcatccacattattcatagggtgtcggtagggtacatgatctgacattagaagggaggtgcgatatcagtgccctgtcatgttatactctcgtcaggcatgggtggcaaattgagagagctagtccagcacagtgaatgagtatgtcagtgaggtgcacgtggaagtcacgagtgcagagttctcaggtacagaatagtggggtg

SEQ ID NO: 4553 - DNA, 429 bp, Zea mays
  misc_feature (278)..(278): n is a, c, g, or t
  misc_feature (316)..(317): n is a, c, g, or t
  misc_feature (354)..(354): n is a, c, g, or t
  misc_feature (356)..(357): n is a, c, g, or t
  misc_feature (364)..(364): n is a, c, g, or t
  misc_feature (379)..(379): n is a, c, g, or t
  misc_feature (392)..(392): n is a, c, g, or t
  misc_feature (408)..(408): n is a, c, g, or t
  Probeset Number=SeqID_18956
gccgggactccatcttccgcttcctcccttactcgcgctcggcacgcaggcgacgggagcggcgctcaggctcgggctctcagcggcgacttcagcggcttcccctcccgcatcgcgccctcgcctccggtcctccgtacatcggccggtgatcctgctttaagatgtcagaagcactcgagaaagataaagaaattgatgaagaggaagaggagtatgtattgctcgagttggccccttgtctttgttcgggcatgtcgccgggtgctccgttcgtnctctccggtttggctcccttgctgtttttggggtatanngtcttcccctgccccccgggtggtaaaaggtctcccntnncctcttncttcggctttttccngaccccccccgcngggtcccaccccgggngcgcgcgggcccggcggagga

SEQ ID NO: 4554 - DNA, 277 bp, Zea mays
  Peptide Sequence Number=SeqID_10585
  Probeset Number=SeqID_18957
gagctcactagtcggcgtccgccctttttttttttttttttttaggaatagtactctcagaatagttcacaaaaaatggactgaatacagctagggaagtttcaaaataggatgacagatgaaaacgatttctttgagggtgaacaccaaacaagctccatgatagacctgcttagctgttctgctttcaatgaggtagtgtattgtcatttctttctatttcgacaacatcttacaaattcatgttggggggcggggcttttttttctcatttact

SEQ ID NO: 4555 - DNA, 630 bp, Zea mays
  misc_feature (1)..(2): n is a, c, g, or t
  misc_feature (603)..(630): n is a, c, g, or t
  Probeset Number=SeqID_18958
nngtagatctctgtttgagcattttcagttagccatattttcagttagcattttcagttagccagttcagttagcattttcagttagccagttcagttcagttatttgtgttcatattacatcttatgatccaagggattcttttgccaactttgatttagagaagttaattgagctatcatatttttatgatgctgattttagtaattatgaacgtacatgccttatggaccaacttctcttattcattgatgaggttagaaatgatgatggatttagagattgtaatgatcttggacaccttgctataaagatggttaaaacagatagacacatatgtttcagtttagtgtatcgtcttgttgagcttgcttaatcttgccagtggcaactgcaactgttgagagggccttttctactatgaagattatcaagactggaagaagaaaataaaatgggtgatgaatggatgaataacaacatgctatgctatattgagcgggatatatttgtagaaatttaagatggaaagattttgaagcatttttaaggcttaagaactcggaagataaatttacctcgcagcatcaactcatgaacggnnnnnnnnnnnnnnnnnnnnnnnnnnnn

SEQ ID NO: 4556 - DNA, 806 bp, Zea mays
  Peptide Sequence Number=SeqID_10586
  Probeset Number=SeqID_18959
cacatgcgggatacagcctgtagctctggccgagcatgctagcttcattggataaattacccactgaatacacatcgccagagatctgcataaggcgatcactgatcaggcagcgtttaccacgctggagctgtaatgtcgccacgcatgagagatgtctagacgagagattcaaagatcgcgctctgtcatcgaggacgctcgcatctccatccgacgtccactgtcattgcctgaagctataccacatttcaagcacctgacactagagtgcctctctgaaaggaatacagtgcacgggtcaactcaagctcactcacagagatactatgcattggctgtagaccaccccagatataattgattgaatgctgctaacaacaaaatacgtcagcaatgactaattgagtatcaccaagcttgttaactatcgtaaacctgcatgctgtagagtatgcacagtgataacacctgctatcggagcatcgtccattatatattctatgcccacagcttttacagttcatagtgaagtgtctattgccatgtacgtagattacatactatggaaaacccatggcattatatgaccacatgatttaccgcacaacattgccatgtcacccttggaaaagttattaagattttgttcgggagggttccacaaccccctccggaggacctgcaaaatttaaggttctgtgacagcaaaactttttaaaagttcctatgcaatacccggtttggaccacacgcacatatttttaggcccggggtggttattcgctcctggaacttggtttcac

SEQ ID NO: 4557 - DNA, 1234 bp, Zea mays
  misc_feature (4)..(4): n is a, c, g, or t
  misc_feature (11)..(12): n is a, c, g, or t
  misc_feature (19)..(21): n is a, c, g, or t
  misc_feature (23)..(26): n is a, c, g, or t
  misc_feature (33)..(34): n is a, c, g, or t
  misc_feature (45)..(45): n is a, c, g, or t
  misc_feature (47)..(48): n is a, c, g, or t
  misc_feature (51)..(51): n is a, c, g, or t
  misc_feature (53)..(53): n is a, c, g, or t
  misc_feature (71)..(71): n is a, c, g, or t
  misc_feature (73)..(73): n is a, c, g, or t
  misc_feature (80)..(80): n is a, c, g, or t
  misc_feature (82)..(82): n is a, c, g, or t
  misc_feature (84)..(84): n is a, c, g, or t
  misc_feature (88)..(88): n is a, c, g, or t
  misc_feature (90)..(90): n is a, c, g, or t
  misc_feature (95)..(95): n is a, c, g, or t
  misc_feature (98)..(99): n is a, c, g, or t
  misc_feature (105)..(106): n is a, c, g, or t
  misc_feature (118)..(118): n is a, c, g, or t
  misc_feature (123)..(123): n is a, c, g, or t
  misc_feature (125)..(125): n is a, c, g, or t
  misc_feature (133)..(133): n is a, c, g, or t
  misc_feature (136)..(136): n is a, c, g, or t
  misc_feature (138)..(138): n is a, c, g, or t
  misc_feature (142)..(142): n is a, c, g, or t
  misc_feature (144)..(145): n is a, c, g, or t
  misc_feature (150)..(150): n is a, c, g, or t
  misc_feature (156)..(162): n is a, c, g, or t
  misc_feature (166)..(166): n is a, c, g, or t
  misc_feature (172)..(172): n is a, c, g, or t
  misc_feature (177)..(177): n is a, c, g, or t
  misc_feature (180)..(181): n is a, c, g, or t
  misc_feature (184)..(184): n is a, c, g, or t
  misc_feature (189)..(189): n is a, c, g, or t
  misc_feature (198)..(201): n is a, c, g, or t
  misc_feature (205)..(205): n is a, c, g, or t
  misc_feature (207)..(208): n is a, c, g, or t
  misc_feature (215)..(216): n is a, c, g, or t
  misc_feature (219)..(219): n is a, c, g, or t
  misc_feature (224)..(224): n is a, c, g, or t
  misc_feature (227)..(229): n is a, c, g, or t
  misc_feature (239)..(239): n is a, c, g, or t
  misc_feature (245)..(246): n is a, c, g, or t
  misc_feature (257)..(258): n is a, c, g, or t
  misc_feature (264)..(264): n is a, c, g, or t
  misc_feature (268)..(268): n is a, c, g, or t
  misc_feature (276)..(279): n is a, c, g, or t
  misc_feature (283)..(286): n is a, c, g, or t
  misc_feature (291)..(291): n is a, c, g, or t
  misc_feature (297)..(297): n is a, c, g, or t
  misc_feature (300)..(302): n is a, c, g, or t
  misc_feature (304)..(305): n is a, c, g, or t
  misc_feature (307)..(307): n is a, c, g, or t
  misc_feature (310)..(310): n is a, c, g, or t
  misc_feature (312)..(316): n is a, c, g, or t
  misc_feature (318)..(319): n is a, c, g, or t
  misc_feature (323)..(323): n is a, c, g, or t
  misc_feature (329)..(330): n is a, c, g, or t
  misc_feature (332)..(335): n is a, c, g, or t
  misc_feature (341)..(341): n is a, c, g, or t
  misc_feature (344)..(352): n is a, c, g, or t
  misc_feature (355)..(359): n is a, c, g, or t
  Probeset Number=SeqID_18960
cccnccccccnnccccccnnncnnnnccccccnnccccccccccncnnccncncccccccccccccccccncnccccccncncncccncnccccnccnncccccnncccccccccccnccccncncccccccnccncncccncnnccccncccccnnnnnnncccncccccnccccnccnnccnccccnccccccccnnnncccncnnccccccnnccnccccnccnnncccccccccncccccnnccccccccccnncccccncccncccccccnnnncccnnnnccccncccccnccnnncnncnccncnnnnncnncccncccccnncnnnncccccnccnnnnnnnnnccnnnnncaccgccccccccccccgccccccccccccctccccaacaatgccccccccccccccccgggccccccgccccaggagagagctccctagtccccccccccccccccgtcgatttcttcaacccggattctcaatcggttgagtgggcaacgccatggtcgaagaccgccgagaatttcgcgaactataccggcgatcagggataccccggtgggagattcttcgatccgttgggtctcgccgggaaaaaccgcgacggtgtttatgagccggactttgagaagctggagaggctgaaattggcagagattaagcactcgaggctcgcaatggttgccatgttgatcttttactttgaggccgggcaggggaaaacgcctctcggtgctcttggtttgtgagaaaacggcatgatgtttttgattctgtagatacaatttctcttccaaaaacctaatgtttctcttcttcaatgtgacatttgggaaaagatcaaaaaagaaaaaaaaaaaaaaaaaaaactcgagggggggcccggtacccaccccgcctccttaataccagtgcaggtccgaaccccggcggcaccaaataaatacacttgaccccaccacactagcctctccctttaaaatagtatgtgcccctatctctctttgacaccaccctctccctccccacaacacctacctaccacaacacaaaactcctactaaatataacacccacctttacatcttatctctatatactatttcacccccccctacttcctctcctttttctctttccgcccccactcctcttctccctcatatcgctttccattcctgcccccccttcctcgccccccaccaactcccacccgcccccag

SEQ ID NO: 4558 - DNA, 515 bp, Zea mays
  misc_feature (1)..(209): n is a, c, g, or t
  misc_feature (219)..(225): n is a, c, g, or t
  misc_feature (228)..(267): n is a, c, g, or t
  misc_feature (269)..(283): n is a, c, g, or t
  misc_feature (285)..(288): n is a, c, g, or t
  misc_feature (290)..(291): n is a, c, g, or t
  misc_feature (294)..(295): n is a, c, g, or t
  misc_feature (298)..(300): n is a, c, g, or t
  misc_feature (302)..(305): n is a, c, g, or t
  misc_feature (308)..(310): n is a, c, g, or t
  misc_feature (313)..(315): n is a, c, g, or t
  misc_feature (317)..(317): n is a, c, g, or t
  misc_feature (320)..(320): n is a, c, g, or t
  misc_feature (324)..(324): n is a, c, g, or t
  misc_feature (326)..(326): n is a, c, g, or t
  misc_feature (335)..(335): n is a, c, g, or t
  misc_feature (349)..(349): n is a, c, g, or t
  misc_feature (364)..(364): n is a, c, g, or t
  misc_feature (372)..(373): n is a, c, g, or t
  misc_feature (395)..(395): n is a, c, g, or t
  misc_feature (445)..(445): n is a, c, g, or t
  misc_feature (461)..(461): n is a, c, g, or t
  misc_feature (491)..(491): n is a, c, g, or t
  misc_feature (495)..(495): n is a, c, g, or t
  misc_feature (505)..(505): n is a, c, g, or t
  misc_feature (512)..(512): n is a, c, g, or t
  Peptide Sequence Number=SeqID_10587
  Probeset Number=SeqID_18961
nnnnnnnnnnnnnnnnnnnnnnnnnnnnnnnnnnnnnnnnnnnnnnnnnnnnnnnnnnnnnnnnnnnnnnnnnnnnnnnnnnnnnnnnnnnnnnnnnnnnnnnnnnnnnnnnnnnnnnnnnnnnnnnnnnnnnnnnnnnnnnnnnnnnnnnnnnnnnnnnnnnnnnnnnnnnnnnnnnnnnnnnnnnnnnnnnnnnnnnnnnnnnnnnncccccccccnnnnnnnggnnnnnnnnnnnnnnnnnnnnnnnnnnnnnnnnnnnnnnnncnnnnnnnnnnnnnnnannnncnnccnntannncnnnnccnnnatnnngnctncctncncgatcgtgncgatcttctcggcncgtgatgccgactcncatcgtcnntgcaggatgagagcggcctacntccagccaagactctctcggacgcccatcgtgctccgtccgcctgtcganctcatggtcactcggntcccgatgctcagagtgaaaggagcaatanatangtacagagcntctttcnagt

SEQ ID NO: 4559 - DNA, 536 bp, Zea mays
  misc_feature (64)..(64): n is a, c, g, or t
  misc_feature (73)..(73): n is a, c, g, or t
  misc_feature (86)..(86): n is a, c, g, or t
  misc_feature (89)..(89): n is a, c, g, or t
  misc_feature (188)..(188): n is a, c, g, or t
  misc_feature (201)..(201): n is a, c, g, or t
  misc_feature (238)..(238): n is a, c, g, or t
  misc_feature (272)..(272): n is a, c, g, or t
  misc_feature (285)..(285): n is a, c, g, or t
  misc_feature (289)..(289): n is a, c, g, or t
  misc_feature (324)..(325): n is a, c, g, or t
  misc_feature (328)..(328): n is a, c, g, or t
  misc_feature (334)..(334): n is a, c, g, or t
  misc_feature (340)..(340): n is a, c, g, or t
  misc_feature (344)..(344): n is a, c, g, or t
  misc_feature (348)..(348): n is a, c, g, or t
  misc_feature (370)..(370): n is a, c, g, or t
  misc_feature (380)..(380): n is a, c, g, or t
  misc_feature (382)..(382): n is a, c, g, or t
  misc_feature (393)..(393): n is a, c, g, or t
  misc_feature (398)..(398): n is a, c, g, or t
  misc_feature (405)..(405): n is a, c, g, or t
  misc_feature (416)..(417): n is a, c, g, or t
  misc_feature (426)..(426): n is a, c, g, or t
  misc_feature (430)..(430): n is a, c, g, or t
  misc_feature (433)..(434): n is a, c, g, or t
  misc_feature (438)..(438): n is a, c, g, or t
  misc_feature (446)..(446): n is a, c, g, or t
  misc_feature (458)..(458): n is a, c, g, or t
  misc_feature (460)..(461): n is a, c, g, or t
  misc_feature (483)..(484): n is a, c, g, or t
  misc_feature (499)..(499): n is a, c, g, or t
  misc_feature (501)..(501): n is a, c, g, or t
  misc_feature (510)..(510): n is a, c, g, or t
  misc_feature (520)..(520): n is a, c, g, or t
  misc_feature (523)..(523): n is a, c, g, or t
  misc_feature (529)..(529): n is a, c, g, or t
  misc_feature (533)..(533): n is a, c, g, or t
  Probeset Number=SeqID_18962
gctggggagctccaccgcgggtgggcgggccgcctctagaaactaggtgggatccccccggggnctggcaggnaattcgggcacgnagnctcacctagttccccccccccccccccccgggaacaatgggggaggggaatattccccccattttatggtggaaataattgggaaggggggcttcccantttccggtattcnttccccgggaaattcttaccaatggacaaacccaggncccccctccatgggctaatcctgggctggggaanattggcaaaaacnaaancccccccaaaatgggatgggttttggggaggcaannaantttccncccccngggntttnccccccttggcttggggaaaanaggggccccnanaaaaaaaaaanttttnccccccnggggggggaannaaaattttncccnttnntccnaaaaaacnccctttttaatntnntttttaacccccccccccccgnngtttttttttccccncnaaaaaaaangggggggggnaanattttntttnaaa

SEQ ID NO: 4560 - DNA, 2911 bp, Zea mays
  misc_feature (1)..(478): n is a, c, g, or t
  misc_feature (2574)..(2911): n is a, c, g, or t
  Peptide Sequence Number=SeqID_10588
  Probeset Number=SeqID_18963
nnnnnnnnnnnnnnnnnnnnnnnnnnnnnnnnnnnnnnnnnnnnnnnnnnnnnnnnnnnnnnnnnnnnnnnnnnnnnnnnnnnnnnnnnnnnnnnnnnnnnnnnnnnnnnnnnnnnnnnnnnnnnnnnnnnnnnnnnnnnnnnnnnnnnnnnnnnnnnnnnnnnnnnnnnnnnnnnnnnnnnnnnnnnnnnnnnnnnnnnnnnnnnnnnnnnnnnnnnnnnnnnnnnnnnnnnnnnnnnnnnnnnnnnnnnnnnnnnnnnnnnnnnnnnnnnnnnnnnnnnnnnnnnnnnnnnnnnnnnnnnnnnnnnnnnnnnnnnnnnnnnnnnnnnnnnnnnnnnnnnnnnnnnnnnnnnnnnnnnnnnnnnnnnnnnnnnnnnnnnnnnnnnnnnnnnnnnnnnnnnnnnnnnnnnnnnnnnnnnnnnnnnnnnnnnnnnnnnnnnnnnnnnnnnnnnnnnnnnnnnnnnnnnnnnnnnnnnnnatcggtctgtggcattgccgatcagaaggaacatctattcctgcttcacattcgtggatcctcgattgctcatttcatttcaagtacggaactgagatctgtttatggacatcggctttatcccagacggcatagacatctccaggatgacctcacagcgccgctcctacctcattgtaggagctggagtctttggtgtttctacagcctatcatctgattcagaaataccctgatgcagatgtcacgctggttgatcgcgatgcttatgacagcgataacagagtggctgcctcatgggactggaacaaggttgttcgtgcggattacgatgatctgatctattgcaaattagcgattgaagcgcaagatgtcttcaaggcagacccgctgtggcagccgtattttcatgaaaccggagtctactggatgtgccgtggcagctatgctcaggatgtaatccggaattacaagacactgggacgcaaggctgagatttcagcactgccagtcgcagaagcaaaactactttatgatggcctattcaaagatgccgattataatggagtcactgaggttctcatcaacaagacgagtggatgggcagctgcgggagactgcttgcaggcggtgaccaaaagagccatggagctcggggtcaagtatgttacccaggaggtttcgacgctcatcatggacaagggccgatgcaaagggattcgcacaagaagcggacaatctctcctcgccgaccatgttttgttgtgcacaggagcttacacgtccaaactgctggagctcagtgctatcgaggctggcaatgacgatcttcgagctggctcccggattgtcgctggtggaatcacaactggcatggcaatcctggatgaggagctatatgggcagtttgagacgatgcctgtgggtttccagggctatcctgctgatatcggtatgtttcttcaacagccacaatcgtccacagagaaactcaccattcataggacctttcatgggcagcctccctccgacaaaggatcgagagctcaagtggtggggaccgaccatattccgcaacacggttgagatgtcgcctggttatcagatttctgcacctccagaaggccgagactttggtcagtggaaggtgtcgaagaggctgcaggaggacattcaagcagcgaagaaactgttctatggtgagaagagtgagaagtggccaatggcgaaacatcgcatttgctggtaaggcggaacgtcctcacttggaaattagacaacctgtgactgacaagcaattagggacgctttcacgacaagcggtgatttcattatttcgcctcattcatccgccaagggcttgtacattgccacctgtggttcattccacggcttcaagttcttcccggtactgggcaagtacatcacacagatgttagagggctcactggcacctgaattggtggagaaatgggcgtgggatcgtgaacgacccgaccctgccttgaacccggagtggccgcgcgctgagatgaatgacctgcaagacacggtggccaaactttaatgatacagatccttcactcagcatttcgcacccgagcagagctagatagccttccatagaaccactccaggaattaatattgtcagggagccgttgagcgaatgtggctttgtcactcattgttggccaattcctcatggactctcaagagaaccgtggctcaaaggagcatcctggaaacgactgaatccccatcccccgcgaataaccctttctggaattccccttatcatgattggctcacgcggcgtctccgagaatgctgccgatatcgtcatggatctcgctgcaaggtgccagacaccaccgtgcgatgtcttgaaagtctatctaagtgtaccccatgtcgacagatatgactgatcgaagcccaggtcacaagatcaggtttcttcaccgactctagcatcctcacccatgtttatcgggtgcaaggggtccattcgcttactaggctcgccctttgttctcttccagccatccatcgctgcaacgccccgactcaagagataacgagggggcgatatcgnnnnnnnnnnnnnnnnnnnnnnnnnnnnnnnnnnnnnnnnnnnnnnnnnnnnnnnnnnnnnnnnnnnnnnnnnnnnnnnnnnnnnnnnnnnnnnnnnnnnnnnnnnnnnnnnnnnnnnnnnnnnnnnnnnnnnnnnnnnnnnnnnnnnnnnnnnnnnnnnnnnnnnnnnnnnnnnnnnnnnnnnnnnnnnnnnnnnnnnnnnnnnnnnnnnnnnnnnnnnnnnnnnnnnnnnnnnnnnnnnnnnnnnnnnnnnnnnnnnnnnnnnnnnnnnnnnnnnnnnnnnnnnnnnnnnnnnnnnnnnnnnnnnnnnnnnnnnnnnnnnnnnnnnnnnnnnnnnn

SEQ ID NO: 4561 - DNA, 948 bp, Zea mays
  Peptide Sequence Number=SeqID_10589
  Probeset Number=SeqID_18964
gaagataaaggccgttgagtaagacgtggccctccaatttcccttctaaatgacatagaatctttaccggtgttcgaaggaagaatgatacctggtttcttcatgccactttggagaatttatctgagaataagtgttgccttccattgctcttcattgctcatatgggtgattcgtgtgcagtcttatctcgatctgggcaaatcgaggaattgactgattatcaccgtccatatggaagcagtagagcagctattcaggaagtgaaaagggtcaaagaagcagggtggatggattgtcaatggaaggatttgtggagacatagctgtatctcgtgcttttggtgacatccggtttaagacaaagaagaatgatatgtaaagaagggtgttgatgaaggaagatggtccgagaagttggtttccagaatcgagtttaaaggggacatggttgtggcgactccagatatcttgcaagtacctctggcgtctgatgtggaattcattattttagcttctgatgggttatgggcctacatgaagaactcagacgtggttagttattttagggatcagctccgggaacatgggaatgtgcagcttgcttgtgaatctcttgcccaagtagctttggaccggcgatctcaggacaacgttagcatcattattgttgatctagttagaacggagtggaagaatttcctctcgcagcgacaaaacgtagtggttgaactggttcaggctgcaacgactatcggtttagtttctgttggcatatgagaaatcttcacatctatcttaagggaaatgagcgagagagagagagagagagagagagagagagagagagagagacctacctcagtgcaatatctttttttcgcatcagctgaagatacctcgcaaaaaaaaaaaaaaaaaactcgagggggggcccggtacccaatcg

SEQ ID NO: 4562 - DNA, 2547 bp, Zea mays
  Peptide Sequence Number=SeqID_10590
  Probeset Number=SeqID_18965
gcaacggctacatgcgcgcaacggtcgactctgacaggaacagtgcagaacagtgaacgcgacagaagtcagagcagttggtcagaaggtgcaccagactgtccggtggtgcaccagacactgtccggtggcacactggactgtccggtgccacatgaggacaaagcctccaacggtcgaccagctccaagccctaacgggaggatgacatggcggcgcaccggactgtccggtgcgcccatcgccgcgactttcagtcgccatccacctccggctccgacactccgtccgtcacttctaagtgccatgagcgcaagaagtttagtaagatccctctatgctatccccgcatttccaaacacactcctttactttccgtcccattaggcaaaccaccggattttgacagtgaagattattgtatgtggagtgataaaatgaggcattatctaacctcactccacgctagcatttgggacattgttgagtttggagcacatgtaccatccgtggggggtgaaggctacgactcggacgaggtcgctcaaatccggcactttaactcccaagccactactatactcctcgcctctctatgtcgagaggagtataataagatggaagggttgaaaagtgccaaagagatttgggatgtgctaaagaccgtgcatgaaggggatgaggtgaccaagatcaccaagcgggagacgatcgagggggagctcggtcgattcatcctcaaccaaggagaggagccacaagcgatgtacaaccggctcaagaccttggtcaaccaagtacacaacctcgggagaactaaatgggatgaccatgaaatggtcagttattcttagatcactcgtatttcgtaatcctactcaagttcaattaatatgtggtgatcctagatataagctaatgtctcctgaggaagtgataggaaagtttgtgagctctgagttgatgatcaaaggctccaaacaaattgtcgagcaaggcggcacctccacactcgaggtgcaacccgtcgcattcaaagcgacggaagaaaagaaagaagagtctacaacaagtaggctccccatcgacgcctccaagctcgacaacgaggaaatggcgctcatcatcaagagcttctgccaaatcctcaagcaaatgaggggaaaggattacaaaccccactccaaaaaactgtgctacaattgtggtaagcccagtcatttcattgctaaatgttcattatctagtgatagtgacaggggcgacgacaagaagggaaagaggaaggaaaagaaaagacactacaagaagaagggcggcgatgcccatgtatgccgggaatgggactccgacgagagcaccaccgactcctcctccgacgaggacgccgccaacatcgttgtcaacaagggcctcctcttccccaacattggccacaagtgcctcatggcaaaggacggcaaaaagaataaggtaaaatctagagcctccactaaatatacgatatctagtgatgagggtagctctattgatgataagatgatttgcttgctctttttgccaacttaaacatgtacaacaaaaagaaaaattgaatgaattgataggtgtcattcatgagaaggatgaactcttggatagtcaagaggaattcctcattaaggaaacaaaaataatgttaaagtgaaaaatgcttatgctaaggaaatagagaaatgtgaaaagttaactagtgagcttagcatttgccatgacactatccccaaccttagaattgaaaatgctaatttgatcgctaaggttgaaaagagaaatggttgtgatgattcaattgccaatcttaaaaatgataatgctagtttatttgctaagattgataaatttaatgaatcaatttctagccttaagattgagaatgataaattaatttctaaggctaaggatttaaatgtttgcaatgtatctatttcctgtcttagagatgaaaatgccatgctaaaatctaagatagatgaattaaaatcttgcaaaccctctacatccactgttgatcatgtttctatttgcatgagatgtataaatattaatgttggtgctattcatgatcacctagctttaattaaagaacaaaatgatcacatagctcaactaactgctaaaattaatgagcatgagatagagaatgaaaaatttaaatttgctagaagcatgctctataatgggagacgccctgccattaaggatgacattggctttcaacagggagacaatgtcaagcttaatgcccctaagagattgtccaattttgttaagggcaaggctcccatggcacaggataacgagggttacattttatatcctgctggttatcctgagcataaaattaggagaattcattctaggaagtatcattctggtcctcatcatgcttttatgtataagaatgagacatctagttctaggcagaacgtcgagtggggtctcgagcgaatcgcgacttatcctttcttgacttcagagaatgtgtcttatggtagtttaagcgca

SEQ ID NO: 4563 - DNA, 531 bp, Zea mays
  misc_feature (214)..(214): n is a, c, g, or t
  misc_feature (263)..(263): n is a, c, g, or t
  Peptide Sequence Number=SeqID_10591
  Probeset Number=SeqID_18966
gatgtgttcaggccccccctggggtggcgggaacgataactttttttttttttttggggggggctgagggggaaggataatttcctgtacctgggcccaagaattggaatccaccagtcccattttttgagggattcggtagcccccttccatctttagctagagttctttacaatggcagttactttcatcacttggccggcttgtttctctntaccattttggtaacgggaggccagcccagccagagggaaaccaaggantgctatgctcagacgtcaaaatttctgcccggtccagtgagtcagtgcatagagatcagtcatgccacctgaggagcatgacgacgcatctcatggcgatgtacaccttggccctctgctccctgagagatctgccgaaccctccagctccagcggctgctcggctcccagccgccttggtcttcatcctcaggcttccttactaacttgtgcgacagaagcggcaatgacagaataggttagcttagcttgctgcgatatgttggtt

SEQ ID NO: 4564 - DNA, 574 bp, Zea mays
  Probeset Number=SeqID_18967
tttctaatacgtacgttttaatattatcctctaaagcatcctttaactatacgagaacgatcctccatctttatacatggaacccatgacgtccaaatagcttgtaacccctagagtacatttccatttataatataaaaataataaatattgtaaatattgtgcaatacaaatgataggtattgtaaatacactagtgcgttacgcgcgcaggcgcgcgcgtgttgtcttttttttacaagcttattttatttcaaatagcaagtatctaagaacacttgctgaaatttcaacaattttttttaattccaatagcagtagtaatataaacttagattacaatacatagcaagttggattaaagtagcatacttcagtgtccaacaatatagggcatgtaaagtttgcataaccaagcatagttataggaaggcttcaacagtaaatttatatgtacacaaaagtctattgaccaaaagtgatgaagcctttcttacataaacacacacttctacgaaggcttcaacatcaggtttcaaaaatatcgtagcatattactaccgaaaatatcact

SEQ ID NO: 4565 - DNA, 889 bp, Zea mays
  misc_feature (889)..(889): n is a, c, g, or t
  Peptide Sequence Number=SeqID_10592
  Probeset Number=SeqID_18968
cagtccctaaggactatataatatatataggcagtagacctgggccttaacggttcctaccacaattgtttcagatcgagattgtacctttatgagtagtttttggcaacatctcttccaactgttggggaccatgttagtctctagcacagcgtatcacccacagacggatgggcaatcagagcgcgtcaaccaatgcttagaaatgtacctccgttgtgcagtttcagcatctaccaaagattggtcagcttggctctcgctggcagaactctggtataactcggcacatcattctgctattggtttggctccattcaaggctctttatggtacagacattaatatgggtattcttcctcagtaacaggatgtaacacctgctgacaatgtgttatggtcactagatcggtgagggattggagaggggtatcgatgggcaagaacgtcggccaggggcctttgcccacggtcgagcaagaggagggtttctcccttctaattcttgcctactttatttcccatccattaattacataaataggccagctggctgcccttatctagctagagatccttatctccttaaaattctcctaaaaactctcaagaactagtaactgataaccttcctatataatctcaactaatcttctaatcttatctctaactatccttatctaatcctccttggagggcccatggctgctgctgccgcagccccctccgtgggcctccttaggccctgacacctgctgattcccactggaattgaacagtggtaggtaggatggaaaccactgatcccagccactgggctatcaccctgttctctcgaaaaaaactgttattgtcactttagcaatattgacactatgtaaaaagctan

SEQ ID NO: 4566 - DNA, 675 bp, Zea mays
  Peptide Sequence Number=SeqID_10593
  Probeset Number=SeqID_18969
ggggttccattggcaaattttctccctccaatccccggggtgccccaagggttgtttgatgcgcaaccccccggtgttttaagggggagccaaggcccccccgctttggaccttttttcccacattttcaggagccagccaaaagctggggctcttgggctttcttaacctcaaagggaaaatttaccggaatcgcatgcggtgtgccaactccaaacctttcaggtggttggccttaagtcgtgccagtctcccaagaaaacttttgctgaagaagtcaatgctgctttcagagatgcagctgagaaaagagcttaaaggtatccttgacgtctgtgatgagcctcttgtctctgttgacttcaggtgctctgatgtatcctccactattgattcttccctcacaatggttatgggagatgatatggttaaagtgattgcttggtatgacaatgaatggggttactcacagagagtcgttgatttggctgacattgttgccaataactggaagtgaagactcaacaacctcttgatgtctgctccattattttttactgttacatgattcggaatgtataattgtagttcctgagtttattatgtatttgtgctctataatttatagtaataaacttgattcaaacatattactcctctgcttaatcacaactc

SEQ ID NO: 4567 - DNA, 984 bp, Zea mays
  Peptide Sequence Number=SeqID_10594
  Probeset Number=SeqID_18970
gggtcgacatacctatcttcgtacaggtgcattttctccgcctggtcttccgttcactcccggcaaggaaggtgctggagaagtcgttgcagtaggtgatggggtcacggaattcgctcggggcgaccgagttgcctacgtcgagacattgggcgcgtatgccgaacaatgcgttgtgtccgaacattttcttgtgcatctgccagaggcaattgatttcgaaacagccgctgcctcaatgttaaaggggctgactgcgcagtaccttctgcgtcgcacgtttcgagtcgagccgggccacacggttctaattcatgcagccgctgggggggtggggctcattttatcgcaatgggcgaagcacttgggcgccacggtcattggtacggttggaacacccgaaaaagctgaagccgctgctcaatacggctgcgactacgtcattaactatggcgaggaaaacttcgccgagcgcgtgcgtgaaatcacccagggcgaaggttgtgacgttgtgtatgacggtgttgggaaggccacgttccctgcttcgcttgactgccttaaacccatgggatgcttcgtgagtttcggcgtttcatcaggccctatcgaatcattcaacatcatgatgctggcggagaaaggatctttgtacgccacctggccggtcctgacgcaataccttgccaagcgagaggacatactctcgatgagtcaggagctcttcgacgtaattggcagtggtgcggtggccattcgcattcatgacaggttgccgcttgccgaagcagcaacggcgcatcgattgatcgaatcgcggaagatcgtgggaggcaccgttcttttaccgtgagccggtacgatttccactggaatgtagagactgaggaataccgctacccggccggcaacgcccttgcgcagcgaatggcgagctttttttgaacgagcgctcgcacatcaccaaaagcaacacactcatcc

SEQ ID NO: 4568 - DNA, 990 bp, Zea mays
  misc_feature (1)..(93): n is a, c, g, or t
  misc_feature (865)..(990): n is a, c, g, or t
  Peptide Sequence Number=SeqID_10595
  Probeset Number=SeqID_18971
nnnnnnnnnnnnnnnnnnnnnnnnnnnnnnnnnnnnnnnnnnnnnnnnnnnnnnnnnnnnnnnnnnnnnnnnnnnnnnnnnnnnnnnnnnnnnaacatacaaccggctcaggacccttatcaacaaaataaggagctacggaagcacgcgatggacggatcacgacgtcgtccgcctaatgctaaggtcatttaccgtttttgatcctcatctcgtgaacaatattcgtgagaatcccaggtacacgaatatgacgcccgaggaggtactcagaaaattcataagcagccggatgatgatcaaggaggcaagatacgtggactacgccttgaatggaccgatctatccgcctcaaccccttgctgtcaaggcaacaagaagcaaggaggcgctacctagcatggtggcacaaattgatgcggccggacttaatgatgaagagatggccctcatcatcttttttttttttttttttttttttttttttttttttttttttttttttttttttttttttttttttttttttttttttttttttttgcaaagacagctgccaaccatacatgcaaatgcaagcgggtatcggaagtcaaccaaatgaatatgaatccattggtctcgttgaatctggtaactacatccttaatggcggacagcatcaccgcgttgagccgctgctcgccgaacaagggccaggccaccatgggcacgccgtgcaccaggctctcgagcgtggagttccacccacagtgcgttaggaacccgccggtggcgccgtgggccagcacttgtgtatgcggcgcccacgagggcaccagcagacccgcctccttggtcctctcgacgaagccctccgggaggnnnnnnnnnnnnnnnnnnnnnnnnnnnnnnnnnnnnnnnnnnnnnnnnnnnnnnnnnnnnnnnnnnnnnnnnnnnnnnnnnnnnnnnnnnnnnnnnnnnnnnnnnnnnnnnnnnnnnnnnnnnnnn

SEQ ID NO: 4569 - DNA, 692 bp, Zea mays
  Peptide Sequence Number=SeqID_10596
  Probeset Number=SeqID_18972
ctgttctgtaccatggacctctggctagctcatccgaggttcatctctatgacttgctcctaaagcgcgcttgaccgttattcctagagaatcacaggccatgggtaaggacagtattctcttccatgctacgtccactagatcgtctctaccatgtatacccctcactacaggactgggcatgcattgtctgcacgatacgtgccacatcacgatgctcagcgatacgaattgactggatgatagaatttgcacgcttacatgataacagctggcagagctaactactgatatccatggcatgctcatgggaccagacaggaatgctcttgcctcatggcccggcatttccccgccctggtccttcgccgccctctttcgtgccggcgtggactgcccacccctccccgcccccctgttctctccttgagcggatgggtggcagcgcctcgcccccctgccctgtagtactggtgcgatagcatcggcttcccctgcctgcccggcccgccctgccaccccccccccctcccaatcgcttcccgctcctcggggggggcccccccccccttcgttggcccccaatccgtttaccccccccgggggcgttttcctgttccccccccaataattcccccccgcccccctgtttttttttttttttttgggggcccccccaacccacaaaattt

SEQ ID NO: 4570 - DNA, 505 bp, Zea mays
  Peptide Sequence Number=SeqID_10609
  Probeset Number=SeqID_18973
gagagctcactagtcccccccccccccccctggcggcgcgtgtgcgttgtgtcgtgctgatctcgccatgtctcgacacatcgctgagccaccctgagctctttgagatggaaaagaatgacccatggcttgccgtcgatggcatgaaagtgctcatgccgtatctttctggtggtcttcccatggacgatccacgtgtgagccctctccacggcgagatagagggactgccgccggtgatgatgcttgctggcacacacgatatgatctgctcagatgctcggcgattaagtgcgaaatatcaagggaaggggacagatcgcggagtgcctggaagctttcacaatgacaagcttacgtacattgagtatccggagatgatccatgtctatccgctgctgccgcacgctgaaggcgcagaggctcgtggcttcattatggacttcattagacaacatatcgcatggaatatagaggtagttcagaaccgagtcgtccacaagtt

SEQ ID NO: 4571 - DNA, 1369 bp, Zea mays
  Peptide Sequence Number=SeqID_10610
  Probeset Number=SeqID_18974
gataacggtcgtgagttcaacactctacctctcgctatttctttctctcccacgtcgttcagttgtgactgttgtgcccttacacttctcctcagaacggtcgggtcgaacagatcattcgcaccaccactaacatgatcctctctctctcttttcaagtgtctcttcctactagctactgggcagaggtcctgaacaccgctacccatctcatcatccaccttccctcgtaggtgatgagtcaccccacccccactttgccctatatggcacaaccccctccagccctcctatgaccaccttctagtctttggttatgccttttatcccaacacctctaccacttcccctcactagctatccttgctatcttttgctttgttactcctctgaccacaaggggtaccgctgccttgacctcctcactcaccgcatcatcatctcttgccatgtgatttttgatgaggatgttttcccctagctggatcctccccgcctaccgatcttgactcactcctcgattctgaccctgtcctccctcctgcaccccgatcgacccagcccatgcacgctcgtggccccgtcgatctcgcctatgccctgcatgacctcgatgcctcagcctgcgacgcgtgcagccctgttgaccccgcctgcaccctgcacagccctatcacatatgatgtgcgtgaacccatcaatgagtatattcctaccatctttgcttgcgccggtgcggcctcattgcctgtgccctagctaacacatttcatcgaccccacatgcgtctaccaccatcgtgggcggattgctccatcggtccccgatgccccatcggcccatttttgtgccgagctggcggagtaccacccagtcaccatccaccatgatcttagccaagttcacccgatggggactggccgctcgattagagttctctaccccgtcgactagctagtcctaacgatcgatactcctccagatgcctcccccgttccctcctccattcacactaccctcgtcgatccctgttagcatcatgctatggaggaggagtacgcggccctgctagccaaccacacctgggacctggtgccacgttcaccaggcacaacatggctaccgacaagtggatcttccatcacaagctgacctcggatggttcactcgatccctacaagtcccattaggtcctttggggcttcacccagcaccccagagtggactacaacgacatcttcaaccccgtcgtcaagtttgtcgccattcaggttgtcctctcccttgccttctcctaggattgggtggtccatcagctcgatgtcaagaatgtctttctccatggcactctgatagagatggtctactt

SEQ ID NO: 4572 - DNA, 1247 bp, Zea mays
  misc_feature (1)..(29): n is a, c, g, or t
  Peptide Sequence Number=SeqID_10611
  Probeset Number=SeqID_18975
nnnnnnnnnnnnnnnnnnnnnnnnnnnnngggagaggcaccgccggcggccggtgcagcgggacgacaatccctccccggaaccagctcccgcggccgcgtcgtccgccgtccctagccccgaaacaccgctcgcgtacccgcagagcggcggggacgacgacgcgccgcccaaggacaagggcgaggccgccgccgctgttcgcccacgggaccaggtgccgcgcgcgagggacccgccatctgcaagcgcgcctctgctgccgccgccgcgacctccgtctctcccgttgttcccgtcgctcccgccgccggtcccgccggtcccgcgaccgcatgagcattttcatgttggtcagaatgtcggccacctccagctccaccgcatccacgtccatcaccgacgccggcgccgcatcctccttgcccttgggcgcgtgatccaccttcgaggtcgcctcctccatgtgcgcctcggagcagcccgacgccggccatcgaccaccggccaccaccacccccacccaccccggcctcattccccgcgctataccacccactggagctccgcgcgccggtgcggtgccgccctgctccccccctttgctgccccctcccataccgactgtcgctcgtctcacgacagccgcttcccccgggagctacaccccctttttaaacgcgatgctctctcccgccaaagctccccctcgccgcccccgccaccccttttgcctcccacccgccccttcccgctgttttcgctgcctcgccgcggaccaccaggttctgattgcccgggtgctaaccccccaccctcgccgctgttcctccagcccagcacccgccccctgtgtccccgtgtcagctgccccttccctgaggagtcctcgctgtcgccgggcgcggccgcccccgccccaccgttgaagctcaccacccccatgtcaacctccctcccctcagctccaccacgccgccctccggcaccctggcaccacaccccgattgccgccccccttgccacccccgccccacccattaccccccagtgacgttcccccccatccgcccccagctcccccgttgccgatgcgggcctcctcagcctcgctcccctcccacttggcacctccaaggcatccgcttcccccggggatggcgacagcgtccccgcctgggaaggacggattcttactagaacggagctcaaatcactaagaaagtcaaacgagtgcgcaaagacga

SEQ ID NO: 4573 - DNA, 1364 bp, Zea mays
  Probeset Number=SeqID_18976
gttcgttgagagaccacccgggataacagtgcaaccatgagggtggaatggggtgcccttagcctaattaattaaaggaactagaagtgtacttgcttcgccgacgtgccgtcaatggggtccaggcacagtgcttgctctgccgaggttctttcgttttgctttttagtcgccctcctgcggggagaggtactgtgtttatcaaactggagaaacctaacgggcagctatgacctctacggaatctttgcaaaggcttcgaatcaatccctgtacattcaccttgccagagaataacggtattgcaagcccggactagaaagggaatcacggctatgtgtaaagagcgcgacctctgcataggggaaagaaactgctatatcagaccgtactcacgggtaagagcatccttgggatcctctttgattagagatacaaatggatcaagctacaaaggatctatttatgattgtgggtcgatgatgattatgatgttcctacatgaggaaacgggtcacggggttgatattactaaaatgaggctagcactgattataaaatacctgaccaagtagaagcaactgcttgagcttaaccccacatattgcccctccagttcagacaaacgggagtttaaacgagggagccagatgttctccctaccttgctcttccacccccagcagcagcagttgccccatgcattgcttccctcctctccctggttggatgcgcgcaccaccttcttcctccctctctcttccccacacctgcgtctcgtctcgcatccgaccggatcgccaccgtccttcgtgtcagcctcgacgtgtcctaccgtctacgtcgttcgcttcctcgacgcgcccatcgttcatgctcgtctcgttgcttatcactgggcgcacgctatgtcccctttccatcttcttcccatggcaacgaggagcgcggagccatttcccatggagccagcgcctctccctagtgtgttcttccacccccagcagcaggagtggccccatgcatggagtccctcctctccctggttggatgagcgtagcaccttcttcctccctctctcttccccacacctgcgtctcgcctcgcagccgcccggatcgccaccgtccttcgtgtcagcctcgtcgtgccctaccgtcgacgtcgttcgcttcctcgacgcgcccgccgttcatgctcgtctcgctgtccaccagggcgcgttcttatattatacggtctacgccaccgctcatctatcatcatctaccacatgaatactctttccccctgcgcaaacctcaacaacgtgcgtttagatagacgcctctccgttgactttccacatcccttatcctccccccc

SEQ ID NO: 4574 - DNA, 592 bp, Zea mays
  Peptide Sequence Number=SeqID_10612
  Probeset Number=SeqID_18977
ccatcgaaacttgtatcatcacttcactagtacagcttacgctagtttgtattgtaaaaaatgtatgtcatatatgcctggcgatggacggacagctaacccagtccttaaactacgatccattgaaaattaattgtttcatacatctgtatttttattttattatatgcaactcccacgcagctctaatatgttagatggctcttaaataagaaatcaagtggcaactgtacactttctaccagtagattatcaatatatatagaaaaataggatacaatactgcatactcagaaatattgagtacaattttaaaacgcacacagtactctcggctggaactcacacgagtctggtctcttgcaaacctcaacctcgcatccaattttttttgacaatgttaagtacatttagagttgaccgatccggctaccaaaattttcgctgctacggtagcatacatgcgtacgccgtgcacagtagtagttggtatggtacgtgatgagcactcgaagcaagcacgcgcacgcacactgtttcggtcttggcgaagtccgaggcgtggaaaaaaaaaaaaaaaaaaaaaaaaaaa

SEQ ID NO: 4575 - DNA, 358 bp, Zea mays
  misc_feature (12)..(12): n is a, c, g, or t
  Probeset Number=SeqID_18978
gccttatacttnagttgttgatgatgcccacaaagcggggctagaaatctatgctgctgattttgcagcgcactgctctccctccccgccccgccgcctcgctccattactcgcctctccttcctccgctcccctccgccccggcgccgtccttggtgcgccggctcatcgccctgcgtctccctacgcggcggtggcggccttcagcaaccgggacgaccgcccgagcctcctcccttctccgctccgcggccctcctgctcctcctgccgctgccctccctcgccgccccggccgccctgatgggctccccgtggccgaccctgcgcggctcggtgactgtcctgttcaagtgacc

SEQ ID NO: 4576 - DNA, 299 bp, Zea mays
  Peptide Sequence Number=SeqID_10613
  Probeset Number=SeqID_18979
tttatgaccctgtagtttagagaaaggtagccccaaaatatagagtgctataatcgccccctatccctccctccgtttctcacagaatggcctttaggggtgtcaggttgatcaaaactcacgtaaatttcaggctaaataacaaattctttttatgccgttttacattccaggcgtaccgaacacccccttaaaccgtcgctgaacgtgaacgcgtccttgttgtcaccgtacatcaacggcatgctggcggttatgtcggcaactcgctgccctcctggaagtagtttgctgttctc

SEQ ID NO: 4577 - DNA, 700 bp, Zea mays
  misc_feature (670)..(670): n is a, c, g, or t
  Probeset Number=SeqID_18980
tttgtttaaaaaaagggtggtttttcccaaaattttacgccggatttttacaaaaaatttaacgtttcaaatttcctttcccccttcgggttgccaaatttttggaaaggcaattctgtggggccttttttgtttttcccccactggggaaaaggggaatttttcccaagccctttaattgggttacccccggggttttcccatccccccgtttttaaaacccggcccctgaacgcccgttaatcgactcccttttgggggaaatgggttccgggcccccccccaaaaataacgggtttaaaaaaccttttttttttttttccggggttttttttttttttctttttttttttttttttttttttttttaaaaaaaattttttttttttttctttcttcttcttcctgttaaaatggagtcgctgagctttagatagtacagtaaacatatgtacatcaaacatgtcgtcattgtcactacggttacatccgggggcaagctagggtccagtatatcacctatgtccagtcccgacatgttggggacccagggacaaagcaaccgggacccgggcacctgggcacgtccctcgctccgggcccaaccggggactgggccggaggccccgcccggggccacgggcccgcgggaggggcggggcgatgtaangttgggaactgggaggggggaaaggagtct

SEQ ID NO: 4578 - DNA, 1807 bp, Zea mays
  misc_feature (1)..(624): n is a, c, g, or t
  Peptide Sequence Number=SeqID_10614
  Probeset Number=SeqID_18981
nnnnnnnnnnnnnnnnnnnnnnnnnnnnnnnnnnnnnnnnnnnnnnnnnnnnnnnnnnnnnnnnnnnnnnnnnnnnnnnnnnnnnnnnnnnnnnnnnnnnnnnnnnnnnnnnnnnnnnnnnnnnnnnnnnnnnnnnnnnnnnnnnnnnnnnnnnnnnnnnnnnnnnnnnnnnnnnnnnnnnnnnnnnnnnnnnnnnnnnnnnnnnnnnnnnnnnnnnnnnnnnnnnnnnnnnnnnnnnnnnnnnnnnnnnnnnnnnnnnnnnnnnnnnnnnnnnnnnnnnnnnnnnnnnnnnnnnnnnnnnnnnnnnnnnnnnnnnnnnnnnnnnnnnnnnnnnnnnnnnnnnnnnnnnnnnnnnnnnnnnnnnnnnnnnnnnnnnnnnnnnnnnnnnnnnnnnnnnnnnnnnnnnnnnnnnnnnnnnnnnnnnnnnnnnnnnnnnnnnnnnnnnnnnnnnnnnnnnnnnnnnnnnnnnnnnnnnnnnnnnnnnnnnnnnnnnnnnnnnnnnnnnnnnnnnnnnnnnnnnnnnnnnnnnnnnnnnnnnnnnnnnnnnnnnnnnnnnnnnnnnnnnnnnnnnnnnnnnnnnnnnnnnnnnnnnnnnnnnnnnnnnnnnnnnnnnnnnnnnnnnnncatcaagagtcttccgctgagaggagcccatgtggtcatcgctgctcgatactcagaagctgcatcagaagcgagagaggccatcatggagaagaacccaacggcacgtattgatgttctgaagctagacctcagctccctcaagtctgtcagggcttttgtggaccagttcaactcgatcaaactccctctgaacatcctgatgtaaccctattcacctcttgttcatgcttgttttttattttcatatatatgaaagtttcctttgatttcgttgaatctatctccagcatatacgtattattacttttagcgcttgttttttttcattcatatatatgaaagtttcctttgcttgttttttctttcatatatatgaaagtttccgcctattttagcgctttcctctttgcactggatcaaggcttgagggaatccttttctgttccacagaaataatgcaggcgtcatgttttgcccttttcagctgtctaaagacggggtcgagatgcagtttgcgacaaatcatctaggtattctctcactgacagcatgacttgcttgaaattcgttcttaatacctccccttcccgctcccctctccctccctccttacctgcactacccgctactttccccacccctctgcctcgctattcatctcttcccgccccccatatccctccccccgccatctctcacaccgcctcttccccactcacctcacccctctctcttccaccactccaatcctcatccctacacccccattacacctccatacccccaccctcccctctatttattttacaacttccactctacagtacgaacatccatcctactccaaactcttgatatatttcatccccgcacccttcgaaacctttcatgtatacagccacagccacttccactcccgtaattctctcgccatcccactattgctatacctcctctcagaccggcccgctcccacctccctcttcctataccacgtacgtatcctatatctcttctccatacatcttccctctcacttatctgtcaataccccccagacgatccaaactaacccatcgaagttactctacttactctcgtacccgcgtctctcacccacctactcctgtgctatcagaacccctctgaagcttcccgtcagacccgcctactcttattg

SEQ ID NO: 4579 - DNA, 351 bp, Zea mays
  Peptide Sequence Number=SeqID_10615
  Probeset Number=SeqID_18982
cgcctgcgggaccgggtccggaatttcccgggtcgaccccgcaggaccgcgtcaacaaggacgacttcctcaaccggaagcgcctgggcttttccggcatgaacattgcggtggccggcgagaagatcgtggccggcctgggcgacatcgcgctcgatgacttctatggccgcatcctgttgaacgcccagggccgcctgaacgtcatggacctggtggccgcgcccggccaggccggcggctccatcacccaggacacgcagacccccggccggcgcgccgaagcgccggcgcccgcggccaagggcggcggcatgcccgacatctcgctcaacagcgtcaccctgacgc

SEQ ID NO: 4580 - DNA, 611 bp, Zea mays
  misc_feature (19)..(19): n is a, c, g, or t
  Peptide Sequence Number=SeqID_10616
  Probeset Number=SeqID_18983
gcctgaatcatttttatgngggttgaattgcttattgaatgcctgactcattttcatgcggcttgaattgcttattgaatacttgcgactgttcagcgagcgtggtaggaagtgaacggtcactcccggcctctataaatagcctgcttgcaccgttgttctcatcacttatccttcgatcatctattgcttttcttctaactccctcttctcctccatctgaccatgggcaaggacaaaaacggtcaaggttcgccccatcgctcaggaaacaagcgaaagcacgaaccaagtcttccatcggaggacatcagcgactctgagtacacggaggaggaggtttccttcgattccgaggggtcgtcggtctatgcttcccccggcgtcgtccgatgactcggacgactcccaagggatagccgccgaggtgtggacgtacatccggtccatcgagcgcgccaggctcaaaggctcggatgagtcagaggtctcctcgaacgaggagaactcttccgactcgtccggaggaagggagcagcgggcatacggtgacgacagaggcggcgatcgtcccggccacagcggtggacgtggcggcggcgacagcgacg

SEQ ID NO: 4581 - DNA, 874 bp, Zea mays
  misc_feature (1)..(273): n is a, c, g, or t
  misc_feature (874)..(874): n is a, c, g, or t
  Peptide Sequence Number=SeqID_10617
  Probeset Number=SeqID_18984
nnnnnnnnnnnnnnnnnnnnnnnnnnnnnnnnnnnnnnnnnnnnnnnnnnnnnnnnnnnnnnnnnnnnnnnnnnnnnnnnnnnnnnnnnnnnnnnnnnnnnnnnnnnnnnnnnnnnnnnnnnnnnnnnnnnnnnnnnnnnnnnnnnnnnnnnnnnnnnnnnnnnnnnnnnnnnnnnnnnnnnnnnnnnnnnnnnnnnnnnnnnnnnnnnnnnnnnnnnnnnnnnnnnnnnnnnnnnnnnnnnnnnnnnnnnnnnnnnnnnnnnnnnnnnnnnngcgctaccacggcaagaagcgccccgcgcatagtttgagcgaacagtacgagaagaaacgcgcacaggatgagaaggctaacagagaccaggatgcagcagttcaggcgaagagggaacaccgggagaagtccgaggcaaagcggagggaactgagggagaagatgttcaagaagacgagatctggccagcctgtgatgagataccggatcgagcatctcttggagacggcactgagcaaataacacgatgcccccctcatgttcgcacattttgtagttcggctgccccatcgacggcttggtggcagccggcggtgtcgccttttcaggtcgcgcacatggacggtctaactgcgccaggcagttaagaccaacaaattggttgggctgcggaactacaaaatttgttggtcaatataccaaggcgatggtggccccacctagagctaggccagaaaagcctcatccaccggcagcccttaagccgtagtagtagggttctattctgttgtcggcagcccttaagaagagactgttcaccagtggagacacttccacttaaccaataaattacctgtgaaatcaatcattatgtcgagn

SEQ ID NO: 4582 - DNA, 363 bp, Zea mays
  Peptide Sequence Number=SeqID_10618
  Probeset Number=SeqID_18985
cagctctgagctgctcagcttccagacacccctcacacgcccatacgaccttccaatggtggcattccacggcattgcagccctgcaagggttctctgagccgtaaaggtttcagatacataagggctacggttgcagaagaaatctatagtcacctccgacttgcaattaatgttgaatgattgctaagaacatatcccaagatcaccccctaaatcttcctttggtcttcctccgttagtctcacggcgggtcctcgatccgctcacgaggttgacgcgaagctatccaaatgttgctttactcttcctcgtcccgggagccccctgcccggcatgatctccaggaacaggagaggtgagt

SEQ ID NO: 4583 - DNA, 1224 bp, Zea mays
  misc_feature (1)..(5): n is a, c, g, or t
  misc_feature (771)..(1224): n is a, c, g, or t
  Peptide Sequence Number=SeqID_10619
  Probeset Number=SeqID_18986
nnnnnctccgcctcgcccgaccccagagctctgactcaacctcgactccggaagacggtctccgcctcgcctgaccccagggctcggactcaacctcgacctcggaagacggtctccgcctcgcccgaccccagggctcggactcaacctcgactccggaagacggtctccgcctcgcccgaccctagggctcggactcaacctcgacctcggaggagtcaccacctcgctcgacctcgggctcggaccgaccacgtcacagggggggccatcattaccttacccctagctagctcaggctacggggaacaagaccagcgtcccatctggctcgccccggtaaaacagcgccgccgccgccctctccctgccctagcgccgccgccgccgctccctccccagcgtcgccgccgcgccgccctcccccgccgcggtgaggccccccctctcatcccctctcctcccccctctccctcctccttcctcgctcgtccggccgctcggcgagccgcccggctcggccgcccccggcgtcccccgcccggcctcgcccggccgcccccgcgccatcctcgaccggccccgccgcgaccggccccggctcggccgtcccgcgccggccccgtcccgctacgccccgacctcggtcggccccgcctcgccgtgccccgtgccccgtgctcggcccgctccggcgagccgccccgccccttccccgcccccgtctcgccccggctcggccgcccccccggcgagcccgccccgccgcgnnnnnnnnnnnnnnnnnnnnnnnnnnnnnnnnnnnnnnnnnnnnnnnnnnnnnnnnnnnnnnnnnnnnnnnnnnnnnnnnnnnnnnnnnnnnnnnnnnnnnnnnnnnnnnnnnnnnnnnnnnnnnnnnnnnnnnnnnnnnnnnnnnnnnnnnnnnnnnnnnnnnnnnnnnnnnnnnnnnnnnnnnnnnnnnnnnnnnnnnnnnnnnnnnnnnnnnnnnnnnnnnnnnnnnnnnnnnnnnnnnnnnnnnnnnnnnnnnnnnnnnnnnnnnnnnnnnnnnnnnnnnnnnnnnnnnnnnnnnnnnnnnnnnnnnnnnnnnnnnnnnnnnnnnnnnnnnnnnnnnnnnnnnnnnnnnnnnnnnnnnnnnnnnnnnnnnnnnnnnnnnnnnnnnnnnnnnnnnnnnnnnnnnnnnnnnnnnnnnnnnnnnnnnnnnnnnnnnnnnnnnnnnnnnnnnnn

SEQ ID NO: 4584 - DNA, 350 bp, Zea mays
  Peptide Sequence Number=SeqID_10620
  Probeset Number=SeqID_18987
tcggtggcctgaagggaatccgacaactgccgctatgcaggaaatcctctattggcaggggcacaccatgtccatgatgtacaagattgtcgcagatgctctaagaaaggagggttcacatgaaaggcactaacaggagtatctgaacttctattttcttggcaaacgtgaagtctcgaatgaagttccgcatacaggcaattctaatgagaactctgcagcgcgtttgccccggaaattcaggttacacatgatctatgtgcactcaaaagggatgatttattgccttgagtatgttctcatcggatctgaagttacgaccaaaggcaattctaatgagaactctgcaa

SEQ ID NO: 4585 - DNA, 631 bp, Zea mays
  misc_feature (598)..(631): n is a, c, g, or t
  Peptide Sequence Number=SeqID_10621
  Probeset Number=SeqID_18988
tatccacgctcgcgttggcggggtcctggcgcggccgccgctccggcccgcggcctcctactcggcgcgccccccctccccccccctctcccccctccggccccttctcacgtctcccctctctccccctcctcttcttcctggctctctccccctctccggtcttcctctccccctccccccttccttccccccccccactaacctccctcccccgccgcccccgccccttccccgcgctcacgaccgcccccttgccccactcctcctcattcgtccagagttcccactcgctattgacactttaagatacctggttctttattttcttctctccgagctaagcaacccttcaatttcgcatattcagtgcccattaactgcagtctgctggaaattctctctctggtatattgccttgcaccgctcaagctcttccctgcagatccgtaacagcccaaacattagcatcaacttttttttgtttattgtaaagtaatatgaagcacaagggttctcctgtgtcagtcaatcggttacactgtttaaacacaataaagttggaacgggaggggggaaatgacttccaacccccccnnnnnnnnnnnnnnnnnnnnnnnnnnnnnnnnnn

SEQ ID NO: 4586 - DNA, 676 bp, Zea mays
  Peptide Sequence Number=SeqID_10622
  Probeset Number=SeqID_18989
ctcccgcgccgtgggccgaccccggccggcccaaccgcccctggcgcccccctttgggctcaattggcccatgccgccccccccctttatttttcccaaaaccccccaatccctctccctctctctcattttccctctctctcccctagcgccgcccctacccccctgccctagcgccgcccctgccccgtcgccgatcggccgccccgctcggccgccccgccccgtccccgtcgccggtgagccccctccccctccccctctcctccctctcccatcccccctcccctttcccctcgccgctcggcgccatggccgccgccatggccggctcggccagcccccggccgtgccccccagccggcgcgccccctagccgcccagccgtccgcccgcccggccccttggccgcctggccgccctggccccggccggccttggccgcgccccggccgtgccccccagccggcgtgccctcggccgcccgcctggccgccctggccgcgcgctcgcctggccgcttggccggctcggccgcctggccagcccgacccccccgtgcgctcgcctggccgccggttcaaccgggccggctcagccgccccgccgcccagctcgccgcccagccggccggttcaaccgcccctagggccggttcaaccgccccccccccctc

SEQ ID NO: 4587 - DNA, 865 bp, Zea mays
  misc_feature (1)..(1): n is a, c, g, or t
  Probeset Number=SeqID_18990
nttgccccccggggaaaacaaggtttgtggtgcccgggccttgcccactggggcgccacaagtgtaagccttccccttatagggacaccaaaaggctcgaagctttccgtccggggggccggccccctcctagtacctactggaatccaaccgggaccgcaggagtttcgcaaaaaacgccttgcctggcgcaccctaatcaataaaacaaagcgttggcggtgtccgtagcgttctttagcagcagttggtagggggaggcaaagcggtagccccattcgtaacgggccgaatgcaccgcacgcagcaggcgtcgtaggacgtccgccgcgcaaagccatcaaggaagcagctggcctccaaggcagcgcgcgaatttgccccggcggccgtcgaagagaagaagcccctccgttatcaccacggccccgtcgcactccgtgagctccgcaattgccagaagagcccggagctgctgatccgcaagccgccgttccagcgcatggtgcgtgagctcccccaggccttcaaggtcgacctgcggttccagagctccgccgtcgccgcgctacagtaggcgtccgagtcctacctcgtcgggctcttagagggcaccaacctgtgcggcattcacgccaagggtgtcgccatcatggccaagggcatccagctcgcccaccgtatccgtgcggagagggcccaggcatcgtgtccggtggaggtggatagtagtagtcaccgtttttgtcatcactgtctgtctagaagttgtagagatgtgcccgcttctctaattgcggtcatccgtcacatcatgatgcagctgggtcttccctgctgtaaataactatgcctaacaaaagca

SEQ ID NO: 4588 - DNA, 1540 bp, Zea mays
  misc_feature (1)..(1): n is a, c, g, or t
  Peptide Sequence Number=SeqID_10623
  Probeset Number=SeqID_18991
nccacgcgtccggacccacgcgtccgtctcctttggcatttgcttcttgactacagcacaaccatttggactaggaagggagaagaacctcaagttcattgtgcagggttgggatcgagatgcccacgatcaaggtgcggtcggcaatagtagcttccccaccgtcctcaattgcgtcgtcaatagtcaacacgcctgagcttccatatatgcaaggcagaatatgttgatcaatgtcttgcgtgccattcctacatgtttctgcaaggaggagtgtcctgccgtgctcccacatgcgcttgttgtagcgttcgtcaagaccgataaagatttctaggctatggctgacatttgtgataatagatgagtgggttgtgactagcatctgtcggtgattcacattgcatacgagaatctacttaggatcaaaggccatggaaaggaagctcactgggtcagaactctattcgagaaattgaaagctccaatgaagtaattcctcgtcagtcatcttcaaagagatgccatgattcccagaaagagaaccttgttgagggctcagaaaataaggctgattcagattcagaagggtcacttgctactaatgatggcgtggcagataaactgaattattcagaaaataaggctaatcattagtcactcttaacaattcttttgctttttagattgtgtgcttgggtcgtgattcgatggatgatgagacagtggaccaaactgaaaaggattctcaaggaggtaataaaggagcccattgtacagtggaccaaaaaaattatagaggcagagctgaaccgactaatgggagcagagctggacaagtcgatgtgatggtcataacgtgcatttggtggtctgtcatcatctcaagaactcgcctcctcctcctcctggtaccaacaccagccgcctggttcttctgcacgcaggtcgcgcctgcggctgcgccgacgagcccgaggaggagatcagtggcaagacgaagcccacccaggtgagaggaaaaaaaagatctggagaaggtaggactggatccacacttggaggccctagatccagacaaccactgactggatgcccctaatgctgctaatgcggggggagcaacgccgatggggccatgggggagcggggcgcgactgggggagcggggcacggctgccatttctccacgcgatttgtggcgatctcgccgatccgtctcacgtcgcgcaaggaaagggggagcggggcacgcgggcaggcatggatggaagccggcgctgctgggggagcggggcgcggctaggggagcgggggatggaaggagcggcggcggcgcggctggggcggctgcgggcgggcgcggagggagcgcgggagggatgcgcggctgcgggatgcgggcggcagaacgtggatcccggccggccattatcgtttggtagctggaacattttattacagaatgctctatttatatcgatctcagacaatttctgggacctcttgacacttgagggctagaagatgtaaattcatg

SEQ ID NO: 4589 - DNA, 523 bp, Zea mays
  misc_feature (15)..(15): n is a, c, g, or t
  misc_feature (19)..(20): n is a, c, g, or t
  misc_feature (57)..(57): n is a, c, g, or t
  misc_feature (69)..(69): n is a, c, g, or t
  misc_feature (78)..(78): n is a, c, g, or t
  misc_feature (88)..(88): n is a, c, g, or t
  misc_feature (91)..(91): n is a, c, g, or t
  misc_feature (95)..(98): n is a, c, g, or t
  misc_feature (155)..(155): n is a, c, g, or t
  misc_feature (161)..(161): n is a, c, g, or t
  misc_feature (163)..(163): n is a, c, g, or t
  misc_feature (184)..(185): n is a, c, g, or t
  misc_feature (205)..(205): n is a, c, g, or t
  misc_feature (214)..(214): n is a, c, g, or t
  misc_feature (217)..(217): n is a, c, g, or t
  misc_feature (224)..(224): n is a, c, g, or t
  misc_feature (228)..(228): n is a, c, g, or t
  misc_feature (254)..(254): n is a, c, g, or t
  misc_feature (259)..(259): n is a, c, g, or t
  misc_feature (266)..(266): n is a, c, g, or t
  misc_feature (285)..(285): n is a, c, g, or t
  misc_feature (293)..(293): n is a, c, g, or t
  misc_feature (299)..(299): n is a, c, g, or t
  misc_feature (305)..(305): n is a, c, g, or t
  misc_feature (310)..(311): n is a, c, g, or t
  misc_feature (405)..(405): n is a, c, g, or t
  misc_feature (414)..(414): n is a, c, g, or t
  misc_feature (416)..(416): n is a, c, g, or t
  misc_feature (427)..(427): n is a, c, g, or t
  misc_feature (431)..(431): n is a, c, g, or t
  misc_feature (433)..(434): n is a, c, g, or t
  misc_feature (443)..(443): n is a, c, g, or t
  misc_feature (445)..(446): n is a, c, g, or t
  misc_feature (457)..(457): n is a, c, g, or t
  misc_feature (459)..(461): n is a, c, g, or t
  misc_feature (464)..(465): n is a, c, g, or t
  misc_feature (467)..(467): n is a, c, g, or t
  misc_feature (469)..(469): n is a, c, g, or t
  misc_feature (471)..(471): n is a, c, g, or t
  misc_feature (475)..(477): n is a, c, g, or t
  misc_feature (485)..(485): n is a, c, g, or t
  misc_feature (496)..(497): n is a, c, g, or t
  misc_feature (500)..(500): n is a, c, g, or t
  misc_feature (504)..(505): n is a, c, g, or t
  misc_feature (507)..(508): n is a, c, g, or t
  misc_feature (510)..(512): n is a, c, g, or t
  misc_feature (515)..(515): n is a, c, g, or t
  misc_feature (517)..(523): n is a, c, g, or t
  Peptide Sequence Number=SeqID_10624
  Probeset Number=SeqID_18992
gagagagagagaganagannttacctactccccccctcctccttcgccgtaggaacngctccaagtaantaatatacntgactcgacnctncctnnnntattgtatggtagtgcgctgactcgtcggacggtcgacagccaacagggagaaaggncaaggncnagggcagtgtaccagttcgtnnacaagtacggccgcgaacgncgacggatncantccaatntacnacgaggatgactggtctcccaccggngacgnctacgtnggtggaaccactgggcttntgatctgngccgtnaccctngctgnnatcctcggcggcggcgccctcctcgtctacaacaccagcgccctctccggctaaggatatccaatgcatgcgcttcttgcgattcgtcatgtanaatcagggngnctgtctataanctancnnccatggatnannctcacccttcncnnngtnncnanancccnnnctcccctncctcacccccnnccnacgnngnntnnnttncnnnnnnn

SEQ ID NO: 4590 - DNA, 2119 bp, Zea mays
  Peptide Sequence Number=SeqID_10625
  Probeset Number=SeqID_18993
gactttgccgattctcttcgagtgcgtacctgatgatgtgacgtacacgaatttattacatcttctcgacaaccattaacgggttagacttcgtattcttcatgcggggtcgcggactgctgaacattgtagatccggcgcgagacacatccctattaaggcaaatgcgggaagaccaacgtgctgcagggcgaactgagctagtaaagcctggggtgtcccgccgagaccgttgcattccacgcgcattgcgttgtcttccgcgcccctatagggccgattgggtaccggggccccccctcgagttcgtcgccaacgaagggttcatccacatgccgagcagggtatttaccaattgtctttcgaacacaattccttactcgtgattgctaattcagtcaccacgaacgaagaacctgatgcttctagattatttttaaatttcagctgatggcgcacctgggtgacctggagaatgagattgtgctgttgcggagcacgtagctgcccaaggccaccttcatcaagctgcagccacacaccatggacttcctccatgtctcctacccgaaggaactatgagtgcaagacgacaaagttttgttttgtttccctctcttctttttcaggctttgcagttgaaagcattcaactaaccatttgacgtctgtcctatgtatttacccaagcgtcgcaagagtacaacttcagcaagttcctatgtgtgaccgccggtgagaagatcacgatgacggaaggcgagcgacaatgctacttgacatgctgggggcacgatcagccgatgtggtatgctccgtcgacatggactgcgcagtggacttcatgctgctgctcgactacacggaggagctcgcgcctaccgccatccaaggcagcaatgagccgttgcagccgtccaggttccccggcactaggaggcgagtggatggcaagccagtggagctacccacgccatctccgacagcagtgagtgtcgtagcttctatatgtccttatagaaggtatctggtagctaaatcaatctaattatgttgaaagttggactataattcagtacatcattttccttgaccagaataaaacaaatgcaaagggaatgttattgctatagaactaaacctatgcatctgtttgtgttaaatgcatgcctacaatcttatcatcttttttcttagacttctatttattttcactacataaaacgcatgccctacaatctgaacggaagaaaagtacagttatttctgctggtacatttactgcactttgtgtggattgcccacttgaatgatcaaacactattagctctagcagcgtgagatccagggatttgtttagataactctgcattaggacacctgtgtatgttctaccatatcaattaatttggcacagttaacttagggggtgtttgtttccatccataattatataatgcgatttattttttacagattatataatctgaattatataattcattttatataatccagtcaaggtgtttgtttactcagattatttggatggattaattaaactcatatcattcagcacaaaactatgaaaatatgaaaacatgatgttatccagactgacgatatcagttttcagatttgaacatgatgcctagcttgttgtatggatcacattcagtttttagcatgtcttggatgaagtgaatttgggggggggggggggggactagggagttctctctctctctctctttcctggaaccccggggatccccttagtttcaaacgggccccgccccggggggggagccccatttttcgtcctcttcagggagggttggttccaagctgggggaacgcagggccacaacctgtttcccgggggaaaatgtgtttcccccccaaaatctcccccaaaatttagagccggaaagtttaaaggggaaaaccccggggggcccccggggggggccccccccccccttttttggggggggggcccccccgcgccctttttcacgggggaaaaaactgtgggccgcctctttttttataataatccccccccccccgcgaggaaaagaggtttttttaaaataagccccctctcctccccctcc

SEQ ID NO: 4591 - DNA, 462 bp, Zea mays
  Peptide Sequence Number=SeqID_10626
  Probeset Number=SeqID_18994
cgcctcgcgggaaccgggtccgggaatttccgggtcgaacaagagcgtgccgggccagaagcccgtggtgggcgtgaccaatggcgtgccggtggtcaacatcgcgccgccttcggccggcggcgtctcgaacaaccgctacacccagttcaacgtcggcccttcgggcgtggtgctgaacaacagcggcgcggccagccagacgcagctggcggggcaggtcgcgggcaacccgatgctgggcaaccagcgcgccgccaccatcctgaaccaggtgacggcgcccaacccgtcgcagctgatgggcatgctggaagtggcgggcaaccgggccaacgtcatcgtcgccaaccccgccggcatcacctgcaacggctgcggcttcctgaacgccaaccgcgccacgctgaccaccggcaagccggtcatcggtccggatggcacgctgggcttcgatatcac

SEQ ID NO: 4592 - DNA, 579 bp, Zea mays
  misc_feature (520)..(520): n is a, c, g, or t
  Peptide Sequence Number=SeqID_10627
  Probeset Number=SeqID_18995
agaatggcaatgacgcggcctggggtggatgcagcccatcagccgccccctgaagatcattccgcggtaaccaagcttctgccaccgctagctggcaaattggcgcccccagtccctcgaacagctactctatacgggctgacaattaacatccccagtactccaccagcgttgacgcctgcaccgaccacgggcgacgcatacgctcatgcattatctcgtggggctgtacctgggagacacagcgagcgatagtgagacggacaccgctcatgaaagacacgagctctctaaagatggcaaatctccgcctagccaggaacccacaccgaggccgcaacaagtgttcacctcctccgcaacttgggggcggtgctgctgggtgtgtggtgcttatgggactaggtggtcaatcggttctgtcatgtcctggggcttctgtcccggacgggtcacgttgttcggttggggctgcgggggacccaaaggtcccactgcggcctcatgaaaatggacctgntggagctaggataatggggagtaaccatagtcgaaatgaaaagactcagaacttatcct

SEQ ID NO: 4593 - DNA, 541 bp, Zea mays
  Probeset Number=SeqID_18996
atgctgcagcgtagtagctgcatggcgtggcgatgtaatgtaattcttcagacattgctagtcctcaggttggtgcagcataagagtatagaaaaagcacgcatattgtggtgactaggaaagcaatatttaccaaaagagtgaattatgttgaatggggttcagagctccaaaaatcatgggacgataatcaggtaagagaagggttgatgaaaggtgtcatgggtttcaatttttagcaggaagcgtttcttgaattccttcgtcaattattatgcttcaatctaggccaaggttcagcgtcttacgtctgcttcaccactataggaccctaggtcttatggctgctatagtatctagttatactagctttggatttgaagttataggattattttcaaatatgcttaatgtttaatactttgagttgaagttataggatttacagatatatgttttgaagttatatgattctctatgggatgaaatatttgtgttgaacaaatatgtgatgtgtaatattccatgacgatatgaattc

SEQ ID NO: 4594 - DNA, 860 bp, Zea mays
  Peptide Sequence Number=SeqID_10628
  Probeset Number=SeqID_18997
cctcggctaaattaggacgttggttttccctttgggattggagtaccacgttccttatcaaggggctgatgtcccaacctggactacttctcagcccctatccagggatatcatgtgcatcattacggactgttgcgagttcggtctaaatggttcaaagaatcgagtgatatgatcacaaatttaacgtgatagttactcaatattaacgattacaatctccatgcgacattcagaatgctcacatgttaggaatggcaatctgtcaggtcctattcgctagtacgtcagctggcgacaggaggatgtatatcaagccgattaagttgtgtcacgtcaggttttaagcagtctcgacgtagtaagacgacgtccagtgagcgagcgtaataggtctcacgatagtgcgaatcgagtcacggatctcccatcgcggtcgctcggtatcgatcagctttcatagaactgtatcagacgggggcccgcgcctggtgtattatgcatatcagggacaggcattatctaggcaaggatagcccaggagcaaaggggcacagtatgcggggggtctgtatcaccatcatcacatctcattttgagcaatctgtgagcatagggcatccctagcaggtcggtgctgccactttattagtgtcttctatgcgagaagcaagctcatcatccatgcgcggtctgttacaggtccttcctcgagagagccctgatctgtggtatcaaaaagagaggacgtgatgcgagagccgggccagagaaagcgggttccagaatctgggtaccaaacatcgagaaccttctgacagatgtttaaacacaataaagttggaacggggggggggaaa

SEQ ID NO: 4595 - DNA, 586 bp, Zea mays
  misc_feature (267)..(268): n is a, c, g, or t
  misc_feature (270)..(270): n is a, c, g, or t
  misc_feature (274)..(274): n is a, c, g, or t
  misc_feature (277)..(277): n is a, c, g, or t
  Probeset Number=SeqID_18998
gatagcagatccaatcagcagcgatgagtgttcgtttgttattttgattgcgagaactgaaatatgcagcaaggaacgaaaccagacctaggaggacatattaactcatttttaatgatctacacgcatgcgaggatagatatctacacctaacaagttgatacatatttacagtccacagagcctgaactcctaaagcacaaagctaatatagtgtttctgtctccactgagatgcaagttacatgctcgagaatcctgctttagnngnaganccnaatctcacgagacgtttattttagtggtgctctcagcccagattcgcacaggacacaacaggttacagcaaactagtgtgttaattatatcttccttccgtcacccgctattaaaaaaaataatccgactttatatattccgtctcctataattaaaactaatcctctcctgatagcgcatactcctatcaacttttcatccttaccaaaccccttaacccccatttgatccgtatgataccctatcatttaccgataccccctcctccctattcccgtgtatattccttaatcattcgcctattcgct

SEQ ID NO: 4596 - DNA, 710 bp, Zea mays
  misc_feature (652)..(652): n is a, c, g, or t
  Peptide Sequence Number=SeqID_10629
  Probeset Number=SeqID_18999
ccaggctccgctgctgacaccgtcatgaaccacctcttacatgagaccagctccaccaaaggggccctcgaagaacagagaccagaaagagtaaaaccttttatgacagggcctgcagaacagatcccgcacagccttgcgcctttcatgaccggcccggcctgtgttggtgaagcccttcctcccgatggcctagatccaccagtggactaccgtgaggatggtgtgaccccttttttggtgatctcttgagtccgtttagaaatggtaaaatgctaacaaatgtggcaattattgtggctctatcaccggtcttcttaactggcttctgcttgtcgtcctcatgtcaccagaactgaagactagtgggactgatgtcttcgcgggtgcttcccttattttcactacgattgattgtgggtcaaggcggtgtttttacgataaacttgtcttgtaggttgtctctatcgcctgtccccttaatcgcctgcggctgaccgccctttcgtcttctgccccttttgtcctaagtcctcctgtagtgttcctggagaagctagagcctgattgtaggctactactcatcaattaacttctacagtggagactacttctgggactggaatatataaaagaatcataggttctgatnttgagttgcaataaaggtgaagaccatgcttcatagcagtgccaacatctgaggtgtg

SEQ ID NO: 4597 - DNA, 709 bp, Zea mays
  misc_feature (94)..(95): n is a, c, g, or t
  misc_feature (103)..(104): n is a, c, g, or t
  Peptide Sequence Number=SeqID_10630
  Probeset Number=SeqID_19000
gttcgtcattatctacaaccatcttctcacctgacgcattctctacttcagatgattttcctttaggaataggtaaaccgtcttcgtcttcatnncttcgctnnttccaaaactggggcatcggcgcccgccacccccccctttcccctctttgcttgcgcgccggcgctcccccgactcttccgcttggttgggtttgcccctttttctgggccagggttctcctctccttctcccccctcttttccgccccctctcaatgcccctgctgcggtccccctcccccccgtttgccccccttgttcccccttttcggccggtgctcttcctcgcgcggtcttttcctctggggcccccccccctgtctcacctcttcaatacccccctttcttcgcggcggcgcccctcatcgcggcgccggtttttccccccccccccccttggcccccttcgtcccccctccggggcccccattgtctcttctctggctccccccccccctttggacacttcgattttgttggttttatgaacccaagcttttgtcccccccccctttttacctccccccttcttttttggggcccgggcccggccggacagtcccgggcacaggaaatttttccgggcctttttttggaataaaactgggggggtccccaggttttctttagcccccaaaaaccctttttcccaagagggatcctcg

SEQ ID NO: 4598 - DNA, 535 bp, Zea mays
  Peptide Sequence Number=SeqID_10631
  Probeset Number=SeqID_19001
tcatccggggccccgttcccctgtcgctggaacggctgtcccccctccaaaagctggactttagctacccccccctgtgcgggccgctccccaaggggcccggggtcttcaagcccgggtgcaaaccgtacgggcccaaccagttccccaaagggacccccctcccgggctgcccggaccttgagtggagtgagttacccgggggccctggttttttataatttggtctgctttccccccccggggtggttttcgcttcccgatcgtggggtgggtaaggaactaaggaccccggtgcctggtttaggcgtttagctataaacgaaagcccgttcggccgcgtgcctggtttaactacccggccggttgatttttacccctttaacgtgttcgaaaccccacctgtgtacgtgtgtcctgtttgctgaagtgtgaaatgtcctgtgtgtatttggtatggatccccccggcctatgtattaaaaggaggttttcgtctattctattatgtggatggaaaattgtatttccccccc

SEQ ID NO: 4599 - DNA, 646 bp, Zea mays
  Probeset Number=SeqID_19002
ctagcggcccagctcccgctgcaggcttgcgcgcgcgcctagccacctcccccatgcgctccgcgtctccccagctgcgtcgcgacccagcgccaccgcgtggcccatccctgcgccccagcgcgccccagccgctgtgcgcgtccgcagcccacctagcgcgcgccccagctctccccacgcccgcgtcccggcccctgcccgcgagctcgctcggctcggtggccagcggcctgccagcgcggcggcgcggccaaccaacccgcgcctcgccttgctgcgcaacggctcgccgccatcgtgctcggtcgttcccaagcgccgatgaagaaaaagccgccatcgcgagtcgctcgacgtcgcgccgcgcgtccctcgatgtcgcgccgcgcgtccctcgatgtcgcgccgcgcgtccctcgacgtcgcgcagcgcgtccgcccgtcgtctgtcccctggcctgtgtgcccaggttgcgccttgcctctacgtcgttgctgcatcccgccgccgtccgtcacaactcgccttgttgcgcagcggttcgccgcgtcgtcgccgttcaccacccgtcgtgagctcggcccgtcgtcacccacggcctcgccggagcccgtcgcaccgtccatgttcgtacctaggtga

SEQ ID NO: 4600 - DNA, 714 bp, Zea mays
  misc_feature (1)..(70): n is a, c, g, or t
  misc_feature (671)..(714): n is a, c, g, or t
  Peptide Sequence Number=SeqID_10632
  Probeset Number=SeqID_19003
nnnnnnnnnnnnnnnnnnnnnnnnnnnnnnnnnnnnnnnnnnnnnnnnnnnnnnnnnnnnnnnnnnnnnntcgcacatctgtggatgattcaagttacaattttttatgcaaaattggtttacaagaacccagctttgctcatgcacaaattgaatataatagctaagcttcgttacattcatcaattgtggctggtccatttcacacataagcaaaccctattagcaacatccaagggtaatacatattaaaaataaatgcaaaataaattttttacaaagaaatcattatcagcacttgtctacagtgcttaatgacttactctgttcttcagccgctgctctaaccttcagaaagagcgttgcgagaccgggctccgacagcgagggccaaccacgaggcgtggccggcgccgcgcgaccgcaaaccggccgtccagcaccgcgcccgtcccgcgccacgacggcctcccggccggcgaacggcgcggccgccgtcctgcggaggaagcgggcggaccgggcaggggaaggcgaggcaagggaaggcagtggcgctccgaggacgcggcccgtgaggggggcggagcggaccgcgcgacctcacggcgacgacaacggcggcggctgtgcgggacaaatacgccattttctctccccctgccttctcnnnnnnnnnnnnnnnnnnnnnnnnnnnnnnnnnnnnnnnnnnnn

SEQ ID NO: 4601 - DNA, 3149 bp, Zea mays
  Probeset Number=SeqID_19004
aaatgtaaatatccaatgttggttgggggtgatttcaacatcctaaggaaggagtctgataaaaacaagcctgggggactaacagttggagttccctgttcaattctatcattgacattcatagccttattgaacttgatttgagtggtagattatatacttggtccaataatatggatcctcccacatttgaaaaattggatagatttctggctagtccagaatgaatccttcaattcaaaaatgtggtggtcactggtcttgacaggaccttatctgatcatgttcctttgtgcctcaaaactgactctctttctatcttgaagagagattttagatatgagctttgctggaaatttaggccagatttcaaagatattatctggaacaattggtctcttccagttagaagtcgatcaagtatcgatatttggaaggagaaaactaagagactgaaaaaacattgaaggggtagaatatcaatgtagaaggaaaatattacttgaaaagttggatatggagtggaacttaaaaatctgatggttgaagagtgttgtaagagaaaacaaatggcgagagaaaaatttattaatgagggtgatgaaaattctagatattttcatcttatcgccaaaggtaaaagaaggaaagttaaaattctctccttagttcatgaggaaaacactgttgttgatgacaatgatattaataaagtggctactgctttttataaagatttattcggtccttctattctttccagtatcaatatgtcgaatttacatatgaataaactaagtgatgaagatcgtgctttactcactgtttttctattgaggaaattaaaaaggtcgtgtttggtttaaaacacaatagcgctcctggttctgatggttttccagctgaatttttcaagaattttgggatctcattcacattgatctgtggaatttattcaaggattttatgatggggttcttgacattaaaaggcttaactttggtttagtgacactattacctaaagtagataaccctattgatatgagaaattttagacctatctgtctcctgaatgtctgctataagatcattactaaagtcctgactaatagacttgcttcctgcatcactaaagtgattagtgagtatcagtatggctttattaaagggaggtacattatggatggtgtggtttctctgaatgaaattcttcatgaagtgaggaaaaaaagcaaagtggggtgattcttaaaattgactttgaaaaagcttatgataaagttaattggcaatttcttcattgtatgttggaaaaagggtttcggtgatatttggtgtgattgggttatgaagactatcagaggtggtaaagtggccatcaaaactaatgatttgattggtccctatttttctactcataaaggtgttagacagggtgatcctttttcgccccttttgtttaaccttgttgcagatggcctggcctgtattattcaaaaagctcaagaaagaggtctgatttgtggccttattcctcacatcattcaaaatggttgttgttgccttcaatatggtgatgatactattttcttaattcaagattgtttggaaggtgctagaaatcttaaatttattctttgtctctttgagcacatgtctggtctgaaaattaattttcacaaaagtgaaattttctgcttagggaaagctaatgagtttgttaatttgtatgctgacatttttacttgtcccgtggggtgtcttccgatgaaatatcttggtgttccaattgataacaagaaaatcagtaagtctctttggtgtcccatgatggaaaaatggataaaaggcttgctggttggcagggaagatttttgagcctggggaagattgactttattgaatagttgtctttctaatgtttctttatacatgttatcgatttatccggctcctaaatctgttattaggaaactggatttatacaagaagagacttttatggcaaggtggctcgcaaacaaaaaaaattcatttggttaactggaatttggtttgctctcctaaaagtcaaggaggattaggggttttgaatttgggttatatgaatgatgccttgttgacaaagtgactttggaatttggaaaattcaaatggtttatggcaaagtattattactgaaaaatatattaagggaaaacctcttatctcagttaagcaaagacaaaatgattctcagttttggaaaaagcttctaagtctcagagaggttttctttaagtactgtaaagttgttgttggtaatggttgtaaagctagtttctggaaaaattcttggattggtgatggtcctctagctgttaaatttcctgttctgtttgatttggctctggataaagacgtctcggtaaataaggtcttgtcatcaaattttgatgccctttctttcagaagaagaatgatgggtagccttcaagtgctctatgatgaattagttgctttatgtatactttgtcagatcaagaggatagagttaattggtgtatgggtaacaaaggttttactgttaattctttgtataagaaaaattcgattgatcaggcctacagattcttgtggaaatctaagttaccacaaaaaatcaaagtcttcatttggcttgtgataagaaataaaattcttacaaaagataacctgaaaaaaattggcatggttctagtgagtgctgtttttgtggtggtctggaatcgattgagcatttgttttttaaatgttctattgctagatttgtttggagattgatccaaattgccttaaatcttgatttcattccaaaaagcattggggaactttgtgacagatggctgaacaaatctaaagacagaatctcaaaatttaatgatatttggatgtggagctatgttttgggctatttggagaaccagaaatgacctcattgatcatagtgctctaaacaatagttacatagacaaggttctagcagaaacttattttggtggtttcactgaatgttattgtttgaggaaaaacaatgtgaagtacatttcaagaatctatgatcaaggatgcttggaagcatgtcaagggcaccaaacttacaactggaattgtcacataccagttggtc

SEQ ID NO: 4602 - DNA, 739 bp, Zea mays
  Peptide Sequence Number=SeqID_10633
  Probeset Number=SeqID_19005
cgaattgggtaccgggcccccccactgtccgatcaccggtgcaccaccggactgtccggtggccccacctgttagagctccaacggtcgaaccctaacggttgggtgacgtggctggcgcaccggactgtttggtgcgcccatcgacatcagcccctcccaacggccattttggtgacctctccacctactctccccacccacccctacccgccgctctcacgccgtctttggcccctcctctcacgatcttcaccgctcccccccctgccgccgttcttccgttcagtcccgtccctctaacctccctctcgtggctcgttactacccacttagctcctcaactacactctgctagacacggctcgtcaacccgcctggcaaatacactccaatccctccgcctccatcatttgcttttctctcccgtccgcgctcgttctttcgccccttcctcacgggccggttccttcacttccacatctcatctcccacccgctctatgcctcgttgctctgttcctccacgacatcccttcccgcgcctactcactccatacaagtcacctaacagaatgtcgcccgacactgtctcctcgccacactcaccgctatacacagcgtctcgcgaccgcaccctgccccttcgtgtcctattcacttaccgcctgcctttacggcctaccactcctcgattctaacactccagctagtagccgtaccgctctcatcctgccttaa

SEQ ID NO: 4603 - DNA, 539 bp, Zea mays
  misc_feature (12)..(12): n is a, c, g, or t
  misc_feature (30)..(30): n is a, c, g, or t
  misc_feature (147)..(147): n is a, c, g, or t
  misc_feature (163)..(163): n is a, c, g, or t
  misc_feature (203)..(203): n is a, c, g, or t
  misc_feature (253)..(253): n is a, c, g, or t
  misc_feature (264)..(264): n is a, c, g, or t
  misc_feature (267)..(267): n is a, c, g, or t
  misc_feature (311)..(311): n is a, c, g, or t
  misc_feature (333)..(333): n is a, c, g, or t
  misc_feature (337)..(337): n is a, c, g, or t
  misc_feature (356)..(356): n is a, c, g, or t
  misc_feature (385)..(385): n is a, c, g, or t
  misc_feature (410)..(410): n is a, c, g, or t
  misc_feature (415)..(415): n is a, c, g, or t
  misc_feature (428)..(428): n is a, c, g, or t
  misc_feature (440)..(440): n is a, c, g, or t
  misc_feature (461)..(461): n is a, c, g, or t
  misc_feature (489)..(489): n is a, c, g, or t
  misc_feature (509)..(509): n is a, c, g, or t
  Probeset Number=SeqID_19006
ggagctcactantccccccccccccccccncactgagaaccgcagagacaggcgtcttcgtactcgcctatctccgcgactcaaagctttccccaattcccccccttctcccatttctcaccaccgccgccgctccccccgttcaanaaacccatgagggagngcatctcgatccacatcgggccaggctgggtatccaggtncggaaacgcgggctggggagctgtactggcctcgaagcatgggcattcangctggatgggncanatggccggtggaccagaacatttgggggggagggggatggatgnttttccaacaccctttcttcantganaactgggcgctggggaaanacgtccccccggggctggtttttgttgancttggagcccactggtcatccaatnagggngaggactgggaanctaccggccagnttctttcatcctggagaaggntcattcagggggaagggagggatgcagncaacaactttcgctcggggncactacaccattgggcaagggagaattggt

SEQ ID NO: 4604 - DNA, 799 bp, Zea mays
  Peptide Sequence Number=SeqID_10634
  Probeset Number=SeqID_19007
ggggcggccattgctagcgcgcccatgccccctgcccctgtcatcggcaccagaaaccgctcccctcgcacgccggccacgactagctcccaaatccgcccctccgcctcagatccctacggggggatgcgagggaacgacaaccacgcggcctcccgtccttagagcctcaaatccgatgccccctccgtaagccattccctcggcctcgacatcaactaaatcgaacatggccccgggataccaccaccacttcacctccgccgcccactacggctccgccgcggtgaaaccctacccctcccccactccccccaacggccccaagccgcggacccgcgagcaaacccccaggacgtttcgccgacaccgggctaggccctgtccccgtgcccctgccccggcggcagccaaggacccgaccgccttgagcgacgatttaatcacctggcgccgcgccgcctggcgcggtggcgggcgccgacccccaccgggccgaagcggcagctcctgcggccgaagaccgtggacgccgtgcggggcctggtgcgctggcgggcacgcttctcccaggggctcatgggcgtgctgctgcgctcgacgtccgccgccgggtcgctacccggccgtgcgggatgtgcgacgcgccgcgggccgaggcgctgtcggcgcgcagggcgactgcgcacctgctgcgccgggacgagcgcgggaggctcggggggtcgcggcgggcgaggggcgggccgccgcggggggctggggcgccggggcagcgcccggccgggcgggacgcgcg

SEQ ID NO: 4605 - DNA, 993 bp, Zea mays
  Probeset Number=SeqID_19008
tcattcagtttcatcgacctgctctgctgctagggccaagctcgcacggtggcccggcagtaggggcacgcgcagcgggaacgcagctagcgctccaggcatgccgagtggaagacgtgcctgcagcgcagccggggccaccgcacctctccaggcatatgtcagcttgggacgaagcttcagcggcctcgccgtcttctgcttcctgcagctcggagacgggcctggggaacgctgtgatcggtacgaactcgtctgcgttagcgacggcagggacgaccacaggctccgtcgccgcgccttcttccgccttgctggccggtgacgggttcgccgggctggaagcgactgccgactggttagagtgccctgtatgccgtacacagcaccgaagtcagtggtgcgagttagccgcgcccagcccaaaatggttccgacggccgtgtcttttgcatgttcgttgccggagaaggacacaacgaagacatgggcatccgcaccaggcgtcagtccgagaagggcgagagaatgcgagtgtcttcccagccccgcgtcaacgagcgtcggtcggctcgcggctgcgaccgtgggcggggcagtagattggggtggaagaacatgacgaaggcgcctttggcccattaggcccatgtaggagccgcgcctcctctccccaccctgctgccaccttccttctacctcctctccctgctcacagtcgccgccgcccctggtctccagccgcgccctcctctcatttctctctcctccccttccctcccaacgcgcagccgccaggagcaccgcgcacccgcgccgaccacccagccccaaccgtgccccggcaaccctgaccgacaccgcccgaccccgcgacccggccttcccgcgcctgcgcagcagcgccaggagtcgcgaccccgagcgccccttctcctctataaaatccgacgccgtgcctgcgagccccttgccttttccctgctcgcccat

SEQ ID NO: 4606 - DNA, 385 bp, Zea mays
  Peptide Sequence Number=SeqID_10635
  Probeset Number=SeqID_19009
ggaattcccgggtcgacgccacgcgtccgcccacgcgtccgcccacgcgtccgcgattcagcaaccgtggggattactgtccatgaaccgaggtttgggtgatgttgtctacgtggagctgccagaagttggcgtcagtgtatccctttggaagaacaccagtgctgtcgagagcgtgaaggcgaccagcgatatcaattcgccagtgtccgggagtgtgtggttgcgatgaacagctattcaccgatgtctggagaggtggttgaagtgaacgagaaactcagtgacaagcctagattgttgaatacaacaacagttggtaatggatggcttattaaggatcaagctcatcactatcaggttagcttaattcgctcatggatga

SEQ ID NO: 4607 - DNA, 858 bp, Zea mays
  misc_feature (150)..(150): n is a, c, g, or t
  Peptide Sequence Number=SeqID_10636
  Probeset Number=SeqID_19010
ggaacaacccttcaacccattttcgggtgtattctttgggttaataaggggactttgccgaattccggccctttggtttacagaagaaggtgattaagcaaaaaatataccggggaattttacccaaaattttaccggttcacaatttgngccttcccccatctcaggtttgggcaaacttttgggaagggccgaatcggtgcggagcctttttcgcttattacccccagcctggcggaaagggggggattttctcccaaagccgattaaagtttggggtaccccccagggtttttcccaagtcacggccgtttttaaaaacggcgggccaggtgaattgtaaataccactcactaataagggcgaaatgggttcccgggccccccctcgaggagcgccaggggggagcctcaacaacctcaacaacaggaaggggggaaggtggagccttcccgtgcgttgacagagaggtcaacgtcatcttcggcggacacagggtcggcaagaaagcaaaagacaacaaaagctcaacgatcgtcagatactgatggcggccaccggtcctcccgccccgtaccgatggtccgaacactcgatcaccttcactcgagcagatcagtggctcaactttgatcacccgggcaagtacccgctcctcgtcgatccggtgatctgagaaagccgggtgaaaaaggtcctggtggacgagggaagcagcatcaacatcactttcccccggacgcttcaaggcttgggagtcaacctcaaagagttccatgagtcagacactcctttcttcggcatcgtgccgactgagggagagtatccgctcggacacatggggggggggggggggga

SEQ ID NO: 4608 - DNA, 931 bp, Zea mays
  misc_feature (44)..(44): n is a, c, g, or t
  misc_feature (83)..(83): n is a, c, g, or t
  misc_feature (90)..(93): n is a, c, g, or t
  Peptide Sequence Number=SeqID_10637
  Probeset Number=SeqID_19011
tctttttccttttccccctttttcccctcccccccccctctcanaccccccccccccccccccctccccacccccctcccccnccccccnnnngtcagtacgtttattccgcaggcaaccaactcacatacatctcactaatgcctgactacaggactacttctgccaatcaaccaccagattcatcagatgcctcttgggattattttattcattcggttctgctgtgcatctgctgaatccggcgctgcttatcaaggggattgagcctcctagctactacaacagccccgcttcgacactatcaggcgaggtgagctgtcacagccttttcaggctcttcttcctggcatccaccttcttcttctcggctgggattatgacgacaagcgccccgtccttcttgtgtgccgatgatggtcctacagaaggatcagaaggagcagcgttctgatcctgtatgcccaaagaactttggacgaggtggatgcaaaaactactgctggcgccgatgagatgttcttgctcggaacggtgttggtgctcctgcccaacgattaaagctgtggctgacccaacaaatggcctccccctccttgaacttgttactaatgattaaggcgcatgaaacgccccgaggaaaaaccccttagctaggcggggcaatacctccctcgcaaatttttcaaagcaaaatatttttcccagcgtcggtccattaaagggaaacattccggaagaaatggcctccaaacaaaaaaggcttccctaccaaccaagaaaaaactgggcctcacaaccaaaaaaaaaggcccccccagtcttttttttcaagggtggcccacaaaattccccccccaactaagtcgctaatggctcggaatggcaatatttttgggacaaaaacaaattcctttcggggagagagggg

SEQ ID NO: 4609 - DNA, 1046 bp, Zea mays
  misc_feature (1)..(1): n is a, c, g, or t
  Peptide Sequence Number=SeqID_10638
  Probeset Number=SeqID_19012
ngcaccctctgttattcacgcggctcaacgcttttttcatcctcagtcggccatcggatggccgcatgccttctctggccgtccctgttcccctcgcccctccctggtgatcgcgcgccgggcgccttgtcctgctcggccagaacagactgccaaccatggcgttggtcctcaacatctaggcgtcggtcgccccagcttcatcttccttaggtggcccctgcgcgcgcttctcccccatgacgaactcacccgcaactccctgcctgctcgagctcacccaggctgcgaccttgccaaactgcacagtccctgctctctttctccagccgtacatacaccagtccagctcccttgccatcacccatggttgcctctccttggcccccttcctgcagcaaaccccatctctgctggcaccctgatcttcagtcatcccccttggccgacgtcctccccattttctacaggtacgctagctgaaaatcgtgcgaagcgaagggtgtggatcaaagcaacccacaagacgatgtcgaccgatgatcctgaagctagatggactaagcgggtgtcagaataaaagttgatcgtcaaatggccatcatctaacaacactaacatagtgttatcccaggtacgctagatgattatgcgagctgaaggacatggatcagagcgaaccataagatggtattggtggattaatcttgtggatgcatcaagccagcaacagaatggaagatgctcaccaagtggtcgtcaattaagttaacaacactaacgtagtgtttatcccaggttgtaattttgttctgttgtggatggtgctaagtgccggtgggctcggccttcttctataagtatatcccgtctttagtttctctattgaggattgtcacttaagctagcatgtatttgaaaacctataaatattttatacattttaaattgtaattttttttaatcactttcttttgtaatcactccgataattgtataatgtaaacttattgtaataagaaaaaaaaaaaaaaaaaaggccccta

SEQ ID NO: 4610 - DNA, 585 bp, Zea mays
  misc_feature (2)..(2): n is a, c, g, or t
  misc_feature (4)..(4): n is a, c, g, or t
  misc_feature (6)..(6): n is a, c, g, or t
  misc_feature (9)..(9): n is a, c, g, or t
  misc_feature (12)..(12): n is a, c, g, or t
  misc_feature (16)..(17): n is a, c, g, or t
  misc_feature (26)..(27): n is a, c, g, or t
  misc_feature (35)..(36): n is a, c, g, or t
  misc_feature (38)..(38): n is a, c, g, or t
  misc_feature (41)..(41): n is a, c, g, or t
  misc_feature (45)..(45): n is a, c, g, or t
  misc_feature (47)..(47): n is a, c, g, or t
  misc_feature (50)..(50): n is a, c, g, or t
  misc_feature (54)..(54): n is a, c, g, or t
  misc_feature (56)..(56): n is a, c, g, or t
  misc_feature (58)..(58): n is a, c, g, or t
  misc_feature (62)..(62): n is a, c, g, or t
  misc_feature (64)..(64): n is a, c, g, or t
  misc_feature (68)..(68): n is a, c, g, or t
  misc_feature (70)..(71): n is a, c, g, or t
  misc_feature (75)..(75): n is a, c, g, or t
  misc_feature (78)..(80): n is a, c, g, or t
  misc_feature (87)..(87): n is a, c, g, or t
  misc_feature (90)..(91): n is a, c, g, or t
  misc_feature (93)..(95): n is a, c, g, or t
  misc_feature (107)..(107): n is a, c, g, or t
  misc_feature (109)..(109): n is a, c, g, or t
  misc_feature (116)..(118): n is a, c, g, or t
  misc_feature (126)..(126): n is a, c, g, or t
  misc_feature (131)..(132): n is a, c, g, or t
  misc_feature (138)..(139): n is a, c, g, or t
  misc_feature (148)..(148): n is a, c, g, or t
  misc_feature (151)..(152): n is a, c, g, or t
  misc_feature (155)..(155): n is a, c, g, or t
  misc_feature (159)..(160): n is a, c, g, or t
  misc_feature (165)..(165): n is a, c, g, or t
  misc_feature (168)..(168): n is a, c, g, or t
  misc_feature (171)..(171): n is a, c, g, or t
  misc_feature (176)..(178): n is a, c, g, or t
  misc_feature (180)..(180): n is a, c, g, or t
  misc_feature (184)..(184): n is a, c, g, or t
  misc_feature (187)..(187): n is a, c, g, or t
  misc_feature (190)..(192): n is a, c, g, or t
  misc_feature (197)..(197): n is a, c, g, or t
  misc_feature (201)..(201): n is a, c, g, or t
  misc_feature (203)..(203): n is a, c, g, or t
  misc_feature (209)..(209): n is a, c, g, or t
  misc_feature (213)..(213): n is a, c, g, or t
  misc_feature (216)..(216): n is a, c, g, or t
  misc_feature (220)..(221): n is a, c, g, or t
  misc_feature (223)..(226): n is a, c, g, or t
  misc_feature (231)..(231): n is a, c, g, or t
  misc_feature (234)..(235): n is a, c, g, or t
  misc_feature (241)..(241): n is a, c, g, or t
  misc_feature (243)..(243): n is a, c, g, or t
  misc_feature (250)..(250): n is a, c, g, or t
  misc_feature (252)..(252): n is a, c, g, or t
  misc_feature (254)..(254): n is a, c, g, or t
  misc_feature (256)..(256): n is a, c, g, or t
  misc_feature (259)..(261): n is a, c, g, or t
  misc_feature (263)..(267): n is a, c, g, or t
  misc_feature (269)..(270): n is a, c, g, or t
  misc_feature (273)..(275): n is a, c, g, or t
  misc_feature (278)..(279): n is a, c, g, or t
  misc_feature (281)..(281): n is a, c, g, or t
  misc_feature (283)..(285): n is a, c, g, or t
  misc_feature (287)..(287): n is a, c, g, or t
  misc_feature (292)..(292): n is a, c, g, or t
  misc_feature (294)..(296): n is a, c, g, or t
  misc_feature (300)..(302): n is a, c, g, or t
  misc_feature (307)..(311): n is a, c, g, or t
  misc_feature (316)..(316): n is a, c, g, or t
  misc_feature (330)..(330): n is a, c, g, or t
  misc_feature (334)..(334): n is a, c, g, or t
  misc_feature (342)..(342): n is a, c, g, or t
  misc_feature (348)..(348): n is a, c, g, or t
  misc_feature (351)..(351): n is a, c, g, or t
  misc_feature (357)..(357): n is a, c, g, or t
  misc_feature (360)..(360): n is a, c, g, or t
  misc_feature (366)..(366): n is a, c, g, or t
  misc_feature (387)..(387): n is a, c, g, or t
  misc_feature (390)..(390): n is a, c, g, or t
  misc_feature (405)..(405): n is a, c, g, or t
  misc_feature (421)..(421): n is a, c, g, or t
  misc_feature (429)..(429): n is a, c, g, or t
  misc_feature (439)..(439): n is a, c, g, or t
  misc_feature (444)..(444): n is a, c, g, or t
  misc_feature (451)..(451): n is a, c, g, or t
  misc_feature (462)..(462): n is a, c, g, or t
  misc_feature (564)..(564): n is a, c, g, or t
  Probeset Number=SeqID_19013
tngntntcnggnagannaaatgactnntggcgtannantanaatntnagngtcnangnaaantntcantnngttngcnnnttttaantannannntgtcgcagccgngnctcattnnngtcggggnggtgnngttttnnttaaaagtntannttncgtnngggancgntanacatnnngngtanggnttnnngtcantggntnagtttntcantantggnntnnnntgcanttnnactccngntgtgagnangntnaannntnnnnngnnatnnntcnngntnnncnccctngnnngatnnngtttnnnnnaaccntgaagggtcggttntgcntggacagnttgctngtnaggaancgntcggangcgaggaagaagatcagcccngtnggggagggagagccncaaggaggaattgagnccgagtgnccgacgctancgccnctgccgncgcagtcgtgntgcgtgctcctcaggccgcccatgtcgaccgcaccagatcagtactcgtcggtggcagtggtactagttggcggacgtatgcatctagtctgccaaacaccntaatttgctgaatatagtagt

SEQ ID NO: 4611 - DNA, 410 bp, Zea mays
  Peptide Sequence Number=SeqID_10639
  Probeset Number=SeqID_19014
tacctggcgctggccggcaattgcatggcctgccacaccgcgcgcggcggcaaggcctatgccggcggcacgcccatcccgacgccgttcggcacgatctacggacccaacatcacgcccgacgagaagaccggcatcggcgcctggagcgcggacgatttctggcaggcgctgcacaacggcaagtcgcgcgacggcacgctgctgtacccggccttcccgtacaccgaatacacccgcgtgacgcgggcggacgccgatgcgctgttcgcctacctgcgcacgatcacgccggtgaaccagcccagccgcgcgcccgatctcgatttcccgtacgaccagcgcctcctgctggccgcctggcgcgccctgtatttccggccgggggtgcaggaagccgatccgggcca

SEQ ID NO: 4612 - DNA, 1088 bp, Zea mays
  misc_feature (1088)..(1088): n is a, c, g, or t
  Peptide Sequence Number=SeqID_10640
  Probeset Number=SeqID_19015
gcggccgggttcgaacggcatacgtggtgggcggcagcagagcaagaagagaaccagtgtgctagtgctacagctacggcctagctacctactacggcgcagctagcagcggcggacatgagcggcgggcgcgaggagagcaccagcagcaggtggccagagctggccgccctgcgcgcgctggcgcgcgacgcggcggcccgggccgggagggagacggcggggtggcgcggacggctatatactacgacgtccacctgtactacgacgtgctgctgtaccatactaaatactagtgcgctgctgctcccttgccttcttgcttgcgccagccactccgcttttttgctcgaacgatcgactgctcgtgtcgcgtcgggccacggccggtcgtcagtttgggtgtgtccactccactgtaaagctccttttttgggtactccctgcatgccaaagttagcggacgtgtactaggtgattagcgggcatccattgggtatctcgaagcacccctcgtaccacgacacactgccagccggcgttgctcgttttgctctgcctgcaatccgccccgcacggactgtactgtacctatacacctatatactacgacgtgcacctgtactacgacgtgctgctgtaccatactaataccagtgcgctgctgctcccttgccttcttgcttgcaccagccactcccgctttttttgctcgaacgatctactgctcgcgtcgcgtcatcccaccacctccatatccgcctattagataccacactcagtcgactcccggacccttctcttcggtgacaacacggtcaccgtctttgacatcatctaccctgtaagaaatcacatattttttacgccgatcccccccatgtcgtgtagtccaccgaggtcttcactgaccaggacaagaataaagaacatctcaaggttggtgcccacaaggttgttatctctgccccaagcaaagatgcacccatgtttgttgttcgattctatgcagacaactacacctcggatgttaacattgtttccaatgctagctgcaccacaaattgccttgctccccttgctaacgn

SEQ ID NO: 4613 - DNA, 842 bp, Zea mays
  Peptide Sequence Number=SeqID_10641
  Probeset Number=SeqID_19016
ataattatatattttttcttcccccccacccccccacccagacccacacatccatcttcatttttttttctttttcacagcaacctgaagatggtttctctttctcccagtcccagttgacgaatgggggatacagcagtggatgccacgtatccaaaatcatgcaaattgcaactagcggcctcctcgtcctcgacactgacgcacacatgatcccaaatcaactttacgcagtatcccagtataacagctacgaagtagtactactcctacacgggcttccccgcgggtcccaccattaagcagtcaagctcggcgttgcggaggcccagcgcggcgcggaacacgccgccgacggcgtcagacaggcggtccagccgcggcgcgagctcctcggtgcgcctcccaacctcctgcgccgccgggcgcacggctcccctcgccgtccggcccccgaggcccccccccgcacccgccgcccgcacggccccgccccccgcccggcaccgtcgccggcccccgacccccccgcccctgccgccccaccgcaccttgacgccgcccgcccgcgcccggcccccctcccccccccccccaaggccgcgggcccccgcgccccgcccccccccccccggaacgggcaccctgcccgccccccccgccgccgtccctcacggtgttcacctgcactatgaatcccattttcccgccccccccccttccttctaaagataaatggcgccttcccgaggtatattctagggacccccccagggcaccccccccccgtctcatctccccaccgcggtctacgccccccaccccggccctctccccctgtt

SEQ ID NO: 4614 - DNA, 1165 bp, Zea mays
  misc_feature (1)..(32): n is a, c, g, or t
  misc_feature (1113)..(1165): n is a, c, g, or t
  Peptide Sequence Number=SeqID_10642
  Probeset Number=SeqID_19017
nnnnnnnnnnnnnnnnnnnnnnnnnnnnnnnnctgcccactcccatcccacgcgagcacaaccaccacctactccctactccctacactactccccccgcaagcacgcccagcgccatggccatggcggcagcgcgcacgggggcctgctactccgcctccgcttcctctcctctcctgcactactagcgggtccgctggcgacgatggcggcggtggcgagcagggagaggctctccccgggcgccgcgccgcaggtggacgcgggcaagtacgtgcggtacacgccggagcaggtggaggcactggagcgcgtctacagcgagtgccccaagcccagctcgctgcgccggcagcacctcatcagggactgccccatcctccgcaacatcgagcccaagcagatcaaggtctggttccagaaccgcagatgccgggagaagcagcgcaaggagtcctctcgtctacaaaccgtgaaccggaagctgagtgcgatgaacaagctgttgatggaggagaatgaccggctgcagaagcaggtttcccgtctcgtctttgacaacgggtatatgaagaatcgactccacagtccttctgtagccaccaccgacacaagctgtgagtctgtggtgacaagtggtcagcacaaccaacagcaaaacccagcagttctgcatcctccacaaagggatgcgaacaacccagcaggtctactcgctattgctgaggagacattggcagagttcatgtccaaggcgactggaactgctgtcactccttgcaaatggtggcgataaggcgtgctgcggattccgtccgatcatcgctgtttcgggcttcgcgtacctccccggtggcgtgtgtgtgtcgagcatggggcggccggtgtcgtacgagcaggcggtggcgtggaaggtcctgagcgacgacgacaccccgcactgccttgccttcatgttcgtgaactggtccttcgtgtgagaaccggggggcgtagtagtcagtagagccaagtcgcctagcgtttgcggctctgttgtttgaactctgtaccccatgtaccgcccattttgcctgtgtccaggcaacctatgaaacacacctttgtggttgnnnnnnnnnnnnnnnnnnnnnnnnnnnnnnnnnnnnnnnnnnnnnnnnnnnnn

SEQ ID NO: 4615 - DNA, 822 bp, Zea mays
  Peptide Sequence Number=SeqID_10643
  Probeset Number=SeqID_19018
tcaaggcgccggccggggaaagacaggtctacccccacggtcggcggtttcccgttcctctcggtgggccggggcattgcagcgccggtttccccgcccggtacagacgagctcgcgcgggccagtccgggcccagtccctcaccattgaccaggtccatgaggttcttaacactcttgtagatgcgagggacgaaatacttcaaaagtctgagaacacccgaagaagcatcacaataaggaagggccatgttatctaacagtcgtaatggtaggtcttcacatgaccaccttcgcctatgtcaacaggtggataagtttggaatttgaatatgaaagactaaagaaagatgccagcatttaccataatcttcatgagcagcttcagctgtcatcgtgatacaatctgatggaggagagcaaccgatgaagcggagaagaaaatccgtgaagcagccttcgccaaaggggtacgcgataccgctttcgaggacctgctggctgtggagaagaaggatgacgccttctggcgtcgtcacgggaagctgaggtcgatctcggacagcatgtaggcagcgagacagcagactaggcgatcgcactgactgtcatcgtcgttgccagtctaagactccaggaactagaaactgaatttgtcccttggtgagaacttgtgtgtgttgaaaccatggacggtgtgatcgtgctcgtcaagctcttgggcctccccctgtgccttgaactcttgagtcatggctatgaataagatctgaactgggcagatccaaatgaaaatgtgttttccttgaaaaaaaaaaaaaaa

SEQ ID NO: 4616 - DNA, 657 bp, Zea mays
  misc_feature (476)..(476): n is a, c, g, or t
  misc_feature (550)..(550): n is a, c, g, or t
  misc_feature (561)..(561): n is a, c, g, or t
  misc_feature (601)..(657): n is a, c, g, or t
  Probeset Number=SeqID_19019
tcccgttccaacttcattgtgtttaacatcctaatcgatactgaaaaccaaaaggtaaaagaagcaagatctgccgcggctccattttctggtcgcctcctccgccactgccatctccctcctctgtcctccgtaccactcgtcttcgtctagccgccgaccgccaccaccatggcacccggcctctacaccgacatcggcaagaagaccagagatctgctgtacaaggactacaacacgcaccagaagttctgcctcaccacctcctcccccaatggcgtcgcaatcacagccgcaggaacaaggaaaaatgagtccatctttggtgagcttcacacccagattaagaacaagaaattggacagttgatgtcaaagcaaactcagaatcagatcttttaacacatcactggtttgaatggagtcggtactccagggctaaatcattatcaaatttggttgtcccgaaccagaagnccagggaaagctttgaatcccatacctaatgaaaaaatgctggggggaaaggcaaacggtccggcttaattccnatctatggggnaaccctttctggggggccttgggaagcaagacttctcacnnnnnnnnnnnnnnnnnnnnnnnnnnnnnnnnnnnnnnnnnnnnnnnnnnnnnnnnn

SEQ ID NO: 4617 - DNA, 2302 bp, Zea mays
  Peptide Sequence Number=SeqID_10644
  Probeset Number=SeqID_19020
ttgaatacccgggccggccgacgcgtacgcacagattgaaaaattaaaggttagaatagacatgattgggagtgcatgccaaactgctagtaaagttattgcacggggccgtaagagctatgggctgggaagccgtccgtggacaaatcttggtcctacattggacaaagcacaagctgcaaagatacaggagcaggaaggcctacttagagcagcagtaaattatggtgaaggattacgggtacctggagatcagaggcatccacaatctcttcctatccatctgatagaagtgcttcctttaggagacggtgcacaaaattttggtgatagttctggtagttatcccaaaaatatgtcaacatttgcacctaatagtgtcaacagccagggaaatcagattcaggcatccggaggacagttacttggaaggcctgcgccatcacctggaaccacaggaacccctaatttcgagaatgtgtccactcctccaatgccatatgctaactctcctaggtcaggcaccaatatgatgaataccccttccccccagcaacatctaacaccacaacaacagaggcaaaaactgatgcaacattctcaaccgcttcaccagccggtgaggccatcagctgctgggatgctagcacagagcgcacttcctcaactacaagatttacaggggcaggctcaacaaaaactacaggtccctggtcaacagcaaatgcaatacaaccaagcattgtcacaacagtttcataacagacagatgcaacctggacgtatgcaaccaggcatggctcagagtcaattgaatcaaggaactcagctacgaagtcatttaggccagtttactggagctgcaaataatgcgatgttcaatgctgcacaggcatcatcaaactcacaaatgatggcaaatatgcatggatcacagtcgcttatgccacaaatgcagtatggtatggctggtgggcatccacataggagccatccccaaatgctgactgaccaaatgttcggtatgggagccacaaatagcagcatgatgggaatgcagcagcagcagcaagggctatacgggaacatgcaggcaggtgcacagaacgtgccacagggtatggcgggccttcagaaccagacccagaatcccaacttcactcagcagaggcaacaaaaccaacaatgatttaacactaacgttcacggaggttgaaagatgagcaatatatccgtcgttttgctgcttgtctgttggtctttactcagcttatctgtgagactgatagtagccccaggttagccttcgttttgctgtaaatcattagcgagatgcaggtcaattataattatatacgttgtaactgtgtttcggatatgtctaatatgttttgttggaatcgtgttacgcgcgttccttttatttataattaagcctcgcagcaaggccggcaatcgaattgcatacggctagacgggtgggtagttcaccaggatgaaaatcggtcatcaggtggaccctagaattatttgaggaactcacagatgtactgtaatatgtattccctgttgtctttctggataaatatcccaagatgttattacgtctttaaaaaaaaaaaaaaaaaaaaaaaaaaaaaaaaaaaaaaaaaaaaaaaaaaaaaaaaaaaaaaaaaaaaaaaaaaaaaaaaaaaaaaaaaaaaaaaaaaaaagggggaaaaaaaaaaaaaaaaaataggggccgcccgaaaaattttcccccccccccccccgaaaaaaaccccgttttcctcctggggggggcaaaaaacctgggtgaaattgggggcaaataaatttccccccaaaatacgattcggaggcttaatgggaaaaaaattttggccccccaaaaataaaacaaaaaaacgtgggggggcaaaaaaggggggtgcccgctttttttttggggagcctcccccgccccttttttaaggaaaaaccccccccccccaaaagtaaaaaaacccccccccccccgggttggatttttttttataatgggggacggggggtttttttttttctttcacgggggggcccttttttttttgcccaaaaccgccccccctcgttgtgcccctcccccgccgctccccctgtgttgttgccaacggggaaaaaaactttggggtgggtttaaaaaagttttttataagtggggggttatagggaaaatataccaccccccccctggtttttggaacaaattgcccccagatatattttaatagggggccataatgcaacaaattgtattccc

SEQ ID NO: 4618 - DNA, 543 bp, Zea mays
  misc_feature (459)..(459): n is a, c, g, or t
  misc_feature (465)..(465): n is a, c, g, or t
  misc_feature (467)..(468): n is a, c, g, or t
  misc_feature (470)..(471): n is a, c, g, or t
  misc_feature (473)..(474): n is a, c, g, or t
  misc_feature (477)..(477): n is a, c, g, or t
  misc_feature (483)..(484): n is a, c, g, or t
  misc_feature (488)..(488): n is a, c, g, or t
  misc_feature (490)..(490): n is a, c, g, or t
  misc_feature (498)..(500): n is a, c, g, or t
  misc_feature (507)..(508): n is a, c, g, or t
  misc_feature (513)..(513): n is a, c, g, or t
  misc_feature (517)..(517): n is a, c, g, or t
  misc_feature (521)..(522): n is a, c, g, or t
  misc_feature (526)..(526): n is a, c, g, or t
  misc_feature (529)..(532): n is a, c, g, or t
  misc_feature (536)..(536): n is a, c, g, or t
  misc_feature (538)..(538): n is a, c, g, or t
  misc_feature (542)..(542): n is a, c, g, or t
  Peptide Sequence Number=SeqID_10645
  Probeset Number=SeqID_19021
gcggcagcagtcccccctccttcaatcatatcggcctctggaaagctagtgacgctgcctatccgcaagcacaggtccgtctcgccgatatggatggtgatggccgtgctgacttcatcggcttatctcctaatggagacgtgcgcatctggcgcaacggttgggtcaaggacaagcctgagtacttccaggccctgggcctacgtttcccgggccagaacaaaggtgatctccgcggcgtacgcttcgaggatatcaatggcgatggtcgtgatgactggatgtgggtttcgaataccggcgctacatctaccttcacaaactctcgcagctgcgccaggggcaagttaggcgatggcctgaacattgcctggcgagaagcattcaatgggaacgccaacagcggcccgactcatcttggaggcttcggcgacgacgtgaggaaccgcatccaccccnaacctngnntnnanncgnaatatnntttncnccatatcnnncttatannccctnaccntccnngcanttnnnntccntnctcnt

SEQ ID NO: 4619 - DNA, 849 bp, Zea mays
  Peptide Sequence Number=SeqID_10646
  Probeset Number=SeqID_19022
cgggccccccctcgagttttttttttttttttttttttttttttttttttttttttttttttttttttttttttttttttttttttttttttttgaaaaagaagggttaaaagggtttcttcaaaaatggccccccaaaacccaaattttggggggggggaaaaaagggcaaaccccgcttcccgggggagtttttatttttggcagggaattggagggcaaaaaggggggattcccgggaacttggggggctatcaaaaggggccgggggataaaattgtccccaaatctccccgggggaaaaaggggggccctcccccctgattgattggaaagggggttggaggaaaaaaaaaaaaaaccccccccctttgtttccaaaaaaaaaagttgttaggaaacacccccccgggaaaattgtttttattgggattggaacccgccaaacctgaaaagggaaaacggctttctattaaaaaagggggaaaaaagctataccgaactatttttccaaaagggcccaggcctaaaaacccaaggcgggataagggggggttggccccaagtccaaaatttaggatcccttggttgggaaaaaaaaggggggatgctttttttgaaattaagaaaaaaatttgatacccccccggaaaaaaaaaaagttttttcaaaaccttttttttcccccacggccgaaaaaggggaaaaaaaaatagatatccctcccaatttttttttagggttaattaaggaaaaaaggtttaagccaaaaaagatcaaatttttggtccccgggagtttaaccccaaaaaaatattgggaaacccttttccccccttctttctttcc

SEQ ID NO: 4620 - DNA, 402 bp, Zea mays
  Probeset Number=SeqID_19023
aaaaaagaagagggggggaagcaaattttcttttccattttttgttaggacgtaaacattctttttatacattaggcccgtcgggtcccttccaaatacacacagtcaggacattttacactttaacaaacaggacacacctccccagggctgtcgtttcgtacacctttaactggttaaaaaaaaccggccccgtaattaaaccaagcacccggccctacctgcttttttttttagctaaacccctaaaccaggcccccgcgtccttattttcttacacacacccaaatcgggaaacgaaaaacccccctaagtggttaaagccacttggaatgtaaaaacttccctgccccgggtactgcccccacttcaaggcgggtgaaccaaagtgggggccccctt

SEQ ID NO: 4621 - DNA, 860 bp, Zea mays
  misc_feature (837)..(837): n is a, c, g, or t
  Peptide Sequence Number=SeqID_10647
  Probeset Number=SeqID_19024
aaaactggttaagtttatgggactcagcgccctcgatggagattcaacatccggccctattaatcggatggttaagaattttatgagtattttttcgggattgtggcccggggtttcccttgaaaggattttgggggttgttttgtccaaggaaaaccgcttcgaggggacatggggctttaaaaccttcgtggccgagtggaaccacccccagaaaaaatttgggggaaatggggccccgtttccaaacttccagaaaagtgggggggaaaatccaacccccgggggggtggtttttttaagaaattttaggaaagggggccccccatgggggcccccctccaagggggggttccggggggggttctcaaggccccattccagggcttttggaaccttcttccatttggccagtttggtttttttggaacccaaaaaaaacccgggggcggaaacgaaaaataacttttttaaaacgtccaagaaaaaccccccccttccaatacaaaggtttttttactgccaaatttgttgtggggccagtgcccctctttgggtgggggtccttatataaggtttccaaaggaggtccgggtgccaaatttttaactgcttttgggggtttttccggccacccccggtttttaaaaatttggaaaaaatttttttccctccaagaaaccaatttccaagggttcccttggggttgaacaaataccgccgttaaaattgaaattggggggggttaaacttttgaaaaaaaaaaaaaaaaaaaaaaaaaaaaaaaaaaaaaaaaaaaaaaaaaaaaaaaaaaaagaaaaaaaaaaaaaaaaaaanctcgagggggggcccggtaccca

SEQ ID NO: 4622 - DNA, 341 bp, Zea mays
  Probeset Number=SeqID_19025
ggtgctgactgaactaggggaatcggaacaccggtatgctgaagcaacacttttccagatcatgaatgcctttgagaaaaaccatttttacttcccacaagagttccacctttgttcacttcaaaatgttcaaaacttgcttttcagcctttgaaaccggttcaaccggacctgaaaccggttcaaccggttttgggactgttcctcttccatccctgctctgacctgtctaacagtcagagctgtcagaaaaattcatggcagatatttttgggaaaccggttcaaccggaatttttcccggctcaaccggttttggatccggtcgagtctccggctgag

SEQ ID NO: 4623 - DNA, 986 bp, Zea mays
  Peptide Sequence Number=SeqID_10648
  Probeset Number=SeqID_19026
atttgggggtttttggggaaaatttggtttcccatttttttaggggtttttttcgggaaattttccccccccttttccaaaaatttttcgggaaaaagggaaaagggggaaagccctttttttgtttttggggcccattttttagccccaggcgggccccaccccccggggggaaaaaccccggcccccgcccggggggccattggcctttttcccggaggggtcctttggttttttagctacttgggaacaaggtctttccctgttttcatgtgtcgctgccggtttgcagtatggtccctggatttctttttctttacccggcacaccttcggcggcgtccgcgcttggggccgagcttcggcgagcaagaccggccggagggggccaagaacggcgctcccgagcagcggacacaatcttggatctactccgaccgtttcccctaagttaattgcacggatggcgacctactctgccctgcccacgggaacagcggaggcatcggatagaatcgcatgttccccgtgatctacggcggtttagttcaatctacaaggtcggggagtttgagaagagcttagggatgctagatcgagcatcagcgcaacatgagttgacctgaatcggggccggccgcggtgagctcgatcccacggtgcttcagaacatagttggggaaaatttgaaattggagcacccgtttgcaggattgggggtgaatctgaacggtggggaaacctgatgaaggtgccgagctaacggcgggttcgatttatagctcccaagaaatgggggggcttccaattgaggaagtgccccgggggccgcccggaaaaaaggaggggaagcttcaatccgggggaaaagggggttttccccggggggaagggaaccccgggggatccccgcggatatggaaacccgggggggtcccccccagaggggaattcccccgctataaaaacccggggggggcgcccagg

SEQ ID NO: 4624 - DNA, 533 bp, Zea mays
  misc_feature (20)..(20): n is a, c, g, or t
  misc_feature (22)..(22): n is a, c, g, or t
  misc_feature (27)..(27): n is a, c, g, or t
  misc_feature (29)..(30): n is a, c, g, or t
  misc_feature (39)..(39): n is a, c, g, or t
  misc_feature (99)..(99): n is a, c, g, or t
  misc_feature (104)..(104): n is a, c, g, or t
  misc_feature (109)..(109): n is a, c, g, or t
  misc_feature (117)..(117): n is a, c, g, or t
  misc_feature (119)..(119): n is a, c, g, or t
  misc_feature (123)..(123): n is a, c, g, or t
  misc_feature (130)..(130): n is a, c, g, or t
  misc_feature (142)..(142): n is a, c, g, or t
  misc_feature (160)..(160): n is a, c, g, or t
  misc_feature (172)..(172): n is a, c, g, or t
  misc_feature (222)..(222): n is a, c, g, or t
  misc_feature (231)..(231): n is a, c, g, or t
  misc_feature (253)..(253): n is a, c, g, or t
  misc_feature (298)..(298): n is a, c, g, or t
  misc_feature (337)..(337): n is a, c, g, or t
  misc_feature (377)..(377): n is a, c, g, or t
  misc_feature (384)..(384): n is a, c, g, or t
  misc_feature (387)..(387): n is a, c, g, or t
  misc_feature (414)..(414): n is a, c, g, or t
  misc_feature (421)..(421): n is a, c, g, or t
  misc_feature (453)..(453): n is a, c, g, or t
  misc_feature (477)..(477): n is a, c, g, or t
  misc_feature (480)..(480): n is a, c, g, or t
  misc_feature (487)..(487): n is a, c, g, or t
  misc_feature (506)..(506): n is a, c, g, or t
  misc_feature (512)..(512): n is a, c, g, or t
  misc_feature (515)..(515): n is a, c, g, or t
  Probeset Number=SeqID_19027
ctgccggagctccaaaattntngttgngnnttggtttantcctggccaaattaaccatttggccccagtagccagggggctccatttggattatccttncccantccanctaagggncncccncgttttntccaccaaagtngcgtccctcatttcaaanccaaatgttttngactttggaagttccgccagccaagaagccaagcggatgcccccgctggncattcccanccaggaagggaaccccaaaagnttaacagcttccatggcttactgaaatcccatccatccacgtttnctgtttcaggaactggtgcgttgctggatccgttttacnttaaaacagaaaagaaaagcctttgcgaaagtggaatggncgctagnctncaagagaaggagaagcatccaggcccnccccagnttcctcgaactctgtcgggacagggaaagaangaggagagtggagagaagtatcancantgagagnctggggggggggggggggnaatagngancttttctctctctctctc

SEQ ID NO: 4625 - DNA, 827 bp, Zea mays
  misc_feature (28)..(28): n is a, c, g, or t
  Peptide Sequence Number=SeqID_10649
  Probeset Number=SeqID_19028
caattgggtaccgggccccccctcgagnttttttttttttttttttctttttttttttttttttttttttttttttttttttttttttttttttttttttttaaaagaaacagggccaaaaggagccaggaagggaaaaaaccggccggtttaaattgtttcttgcaaaaacaggacgaacggacccgagggttgtctgacctgacctgagctggggcaaaaaaggccaatttaagttttttcggcccccgcccggaaaaagcccggttctgatctaataccacccccaggggaaaacccccccggggccgattttttttggtttttaacccttttttttggaacaaaacttacccaaaaaccccgggaaaacttcagttttaaaacccctagctcggggtcagggccaatgacgccaagctcttacggggcaacggcgtttaggtttgacgggaaacccaacgtgccccctagctcggcaccaaaaattttcccccccccccccgccgttatcctcttcccgccgggtccccgccgttttgggttaccccggcgccaaaacccgggggggggggccccccctttcccctttctagaagcccctacaaaatttgggaggcccaggccaccgctatttttggggatcccccaacaggatgaaaatctgaatctcaacccttaggacatcactccaaggatgaaaattttcggaaaggaggggccgacatatgttttcctagccagggccatacggaaatgtttttttttatggggaaagggggccaaccccccttttcaactcgaaggctccccggcggccacctgga

SEQ ID NO: 4626 - DNA, 650 bp, Zea mays
  misc_feature (566)..(566): n is a, c, g, or t
  misc_feature (571)..(571): n is a, c, g, or t
  misc_feature (573)..(573): n is a, c, g, or t
  misc_feature (575)..(575): n is a, c, g, or t
  misc_feature (577)..(577): n is a, c, g, or t
  misc_feature (583)..(583): n is a, c, g, or t
  misc_feature (589)..(591): n is a, c, g, or t
  misc_feature (596)..(596): n is a, c, g, or t
  misc_feature (605)..(605): n is a, c, g, or t
  misc_feature (609)..(610): n is a, c, g, or t
  misc_feature (613)..(613): n is a, c, g, or t
  misc_feature (615)..(650): n is a, c, g, or t
  Probeset Number=SeqID_19029
ctttcacaccccgcacacaccgtcccgtgtcctagcgtgaacacacaccacttgcccgagagtcgaaggtgccaagccaacgcaggtgcagatggcggccgagcaccacctcccgccggagcacgcggaccaccacagaggcgggaggaagggggtccacgccgacgacctgaagccgcgctggtggcgccgcagcccccggtacagctactactacggcgggggcgagggcgggggcgcggtccgcgccctctgcttcgccgtcctcgtcctgctcctggccgcggggatcaccctgctggtgctctacgtcgtgtaccgcccgtcccaccccaccttcgccgtcacctcggccgccgtgctggcgctgtacaacgccaccgccaacgtcgccgtgttcgccggcgctgcctccgtgctggtagccgtgctggccgccgcggtcctgtttatgctggtgctgctcttcggtcgcgttcggtttgtgcatgaacctttccacctggcggcggtcctcgtattttttggtctgagccccactctctcctacctgcttgactgggccncgccntntncnttcctntccctnnncttcnaccctcccncgtnnctntnnnnnnnnnnnnnnnnnnnnnnnnnnnnnnnnnnnn

SEQ ID NO: 4627 - DNA, 524 bp, Zea mays
  misc_feature (414)..(414): n is a, c, g, or t
  misc_feature (496)..(496): n is a, c, g, or t
  Peptide Sequence Number=SeqID_10650
  Probeset Number=SeqID_19030
gtcactagtcccccccccccatgggttgttcgcccaggtcaagcccacgctgaacagaatcatgccgagagaaaacaggaaatatcctatccagtccagagccttgagcttatcccgtgtggtcagagatacttcaagaggccgtgggggtggtttgaagaggcagaaaacggcgaggaagttgaccgcaaagagccctataccaatataccagatgattcggaagccttcgtcgctctgttttgtgagagcgaagccgacgaggagtgtaaagattcctgcgaaggaattcataatgttgaccccggcttgcgcgagtggtcgccagcgcctgggcagaatttcagatgcgacggtgtagagcaatgaagtcgatcccgatcctacaccggccatcaatgacccagcaattgncatggtcatagaaagtcgctcggctgatccaagattgacccaacaaagcagaaggctgtgcaaaggaggataagccgtcggnggccccagaaagtccgacgattgagcgt

SEQ ID NO: 4628 - DNA, 214 bp, Zea mays
  Peptide Sequence Number=SeqID_10651
  Probeset Number=SeqID_19031
tgaatttatgtgcatagcattgtttcatattatgagtgtggtatgttttatcgtcactttccaaagccccagtataattaatcaaaaaccagcttttgctagtgtttcaagcgaagaaatagcagctactatcactttagtgtcggaatcaccaactcagtcaatcaaccgaagaattagcaggcacaatttgctgagataaggaataaccaac

SEQ ID NO: 4629 - DNA, 596 bp, Zea mays
  Probeset Number=SeqID_19032
ttcgggaccgagccggtaccgttgttccgcctgcgcattgctctcgcggaaattgccgccagcgccgtccaactggagctgcaagccagcggtggcaaggcctacctgactgcccacggcagcggtttcgcccggcgttggcgcgagtcggcgtttgtgccgatcgtgaccccgagcttggtgcagttgcgcaccgagttgaaccgtcaggccaatctatgagccaggcggtactgcatgcccagggaatttgcctgggctatgggggcaactcggtgctggaagggttcgacctgcaattgcagcccggcgaagtggtgtcgatcctcggccccagcggcgttggcaagtccagcctgctgcgggtgcttgccggtttgcaggcgccccagggcggcagcattcacctgctgggcgagccgttgaatggcccgcatccgcgggtggcggtggcgttccaggaccccggcctgttgccgtggttgagcctggaaaagaacgtcgccttcggcctggactttgccctgcgaccgccacctcggtcctgaagaacgacgccaaccgggtcgaccccgggaattcccggacccggtacc

SEQ ID NO: 4630 - DNA, 429 bp, Zea mays
  Peptide Sequence Number=SeqID_10652
  Probeset Number=SeqID_19033
agtttttttttttttttttttggcaccgaggaaaaaccaccatttatatatgtacatacacagctcttactaaagtgtgacgagaagagatgattaaggattaaaagaaaaaaaagaaaagaaaatcaacctactcccataggaccatcacaactgtagctggcgacgccggaggggggcaaaagcatgcgccggctaccgtcaggagggaccgcaccgcgcgcggggatgctgggaacggcttcccgagtaaaggatcggaccgggccgtgttccgcgagttcgtgtttcgtctgaccgatcgtgcaggagttgggacgccaccggcagcacgcgaatacctgggccggctccccgtgggccgctggacctttctaccactgcacgtgctcccgttcgttcaggagcgtcccgtggcgtgcgggaacg

SEQ ID NO: 4631 - DNA, 2394 bp, Zea mays
  Probeset Number=SeqID_19034
cggcccggaatctaaagctccccttttgtcctccccgctggggggttccctttatgggttgcgcggtcccctcccggctttttctcccaccgtcaaaaggcgcccgtgggccccccccccgataatgggggggctgccccccccctagcaccccccccggctttcccctttttcttttccggttcttagttttgtgggaattgggaggggcccaacgattcccccccgggaaaccagtttcgcccctggtttcccccaactcggaaatttaccccgccctaaagggaacaaaagggggagttgccccccggggggggcgccccttttgaaattaagggttcccccgggctgcaggaaattcagagctcactagtccccccccccccccccgattcacttcacaaaccgctcggcgacaaagacgaagaagccgaggaagcaccgatacgacgattgagacttagttttgctcagattcatttaaccaccggcgccaagtgacgacgacgacggagggagcagattcgaattgtgtgaagacagcaatggagtctactgagtcatatgcggcaggttcaccggaagagctggctaagagatcccctgaaccgcatgattcttccgaagctgattctgctgagaagccaacacacattcggtttcttgtatccaatgcggcagctggttccgtcattgggaaaggtggctcgaccatcactgaatttcaggcaaagtctggggcaaggattcagctttcacgtaatcaagagtttttcccggggacgactgacagaattattatgatatcgggatcaatcaaagaagttgtcaatggactggaacttatccttgataaattgcacagtgagcttcatgctgaagatggtaatgaggttgagcctaggagaagaattagacttgtggttcctaacagttcttgtggaggtataatcggaaaaggaggggccaccatcaagtcattcattgaggaatctaaagctggtattaagatatcccctctggataataccttttatgggttgagcgataggttagtgacattatctgggaccttcgaggagcagatgcgggcaatcgatttgattttggctaagcttactgaggacgatcattactcccagaatgtgcattccccatattcatatgcagcgggatacaattcggttaactacgcacccaacggttctggaggcaagtatcaaaaccacaaggaagaagctagtaccacggtgacaattggtgttgcggatgagcatataggattggtgcttggacgtggaggaagaaacatcatggaaatcactcagatgactggtgcccgaattaaaatatcagaccgaggtgattttatgtctggaaccactgataggaaagtgagtatcacagggccacagagagcaatccaacaagctgagacaatgataaaacagaaagttgattcagccacagagagaaccaccgattgaaaccgttaagagaatccatctcggttcctatctttggtctgttgacttcatttgtggaggcttaagctatcggatggggatcattaatcatctttgagtgaggcagagatttctctctaggagctctctttcgttttatttatatgtcgacattatataatgtgtttttctctgggagagaagcagatttggagttagagaagtactattttcatttgttcttttaataactttgttgcaatttgttgaagttttgtttcccttgagttctttctgttgtaacaatttacaataaccagccattacattgcatttgcttctttcttttaaaaaaaaaaaaaaaaaaagaaaaaaaaaaaaaaaaaaaactcgagggggggcccggtacccattcgccctatagggagccgaataacattcctctgggccgtcgttttacatcgtctcggactggaccctcccggggggttacccaaacttaacccccttttggagaaatttccccctttctcccggttggggaaaataaccaaaaaaggcccccccccgaattccccttttcaaaaaatttggccaacccttaaattgggaaaaggggccaaatttgaaaacgctttaaaatttttttgttaaaaatctccggcgtaaaatattttttgtaaaaaccccccttcttttttttttccccaaaaagggccaaaattctcgacaaattccctttttaatactcaaaaaaataaccccccgaaaaaggggtgcgaggggttttcccccccttgtgggaaaaaaaaatcccccttttttaaaaaaagggggcatccctccactcgcaaagggagaaaaaaactcttttttttgggggggggcccccccaacccgggcaaaccccctccccataaattttttt

SEQ ID NO: 4632 - DNA, 557 bp, Zea mays
  Peptide Sequence Number=SeqID_10653
  Probeset Number=SeqID_19035
attgttagttgatacagttatatgacaacttccctccttaactgcgaaagtacctctagtgtaatggttaaggctttcgagtagcacctccaggtcccgggtttgatccgctcggggagagagaatttctggcttggttaaaaaaatcccctaattgtgccccgcccgctcccgggttacgtcctgcgcgccaccctccggctgagccgttgcagagtgggcggtgacggcccgctagtgatggggggccaaggtttggggattttctcggccgggaccatgttttttgtctcttttatataatatcgggagggcggtctttccctccccggccgagttcttttcccctccttaactctacacaatattggctatataaaataaatatcagaaaatgcttccatcaccaattacttaatggggattggggacaaatcactcctaacataatgagataccataaagtcaagtgagctgatcgaggtaataagtgacaaaaatcagccaaccccaaaagggttaagggatcttttttttttttgtcgtgccgaatcgat

SEQ ID NO: 4633 - DNA, 639 bp, Zea mays
  Probeset Number=SeqID_19036
ccgccatcgagtacgccgtgtgcgccctcaaggtggaggtcatcgtcgtcatcggccacagccgctgcggcgggatcaaggcgctcctctccctcgaggacggcgcgcccgacaagttccacttcgtggaggaatgggtcaggatcggcggtccggccaagactaaggtgaagaccgaccacgcctcggtgccgttcgaagaccaatgctccatcctcgagaaggaggccgtgaacgtgtcccttgagaacctcaagacgtacccgttcgtcaaggaaggggtggagaaagggaccctcaagctggtcggcggccactacgacttcgtcaatggaaagttcgagacatgggagccctaagccgcgcgcggccggccaaattaacagccgcagcaaggcttcatcatataactccaacaaggctacaccatatatacatgcatattatatacaaacgctcccgaacctatttgccgcgtggagtacttatttgccgctatatactagctttacacataccgggattgaccgtcccggggagaacaactttactggtgataagcaatacctgcggtgctttggctttctaacgcggggttggcttttttttatgataatatgatgcatatataatttgatt

SEQ ID NO: 4634 - DNA, 657 bp, Zea mays
  Peptide Sequence Number=SeqID_10654
  Probeset Number=SeqID_19037
gcaagcgcggcgaggcgctggaccacgtgctgctgttcggcccgccgggcctgggcaagaccacgctggcccacatcatcgcgcacgaaatgggcgtgcagctgcgccagacctccggccccgtgctggaacgcccgggcgacctggccgcgctgctgaccaacctggaaaagaacgacgtcctgttcatcgatgaaatccatcgcctgtcgcccgtggtcgaggaaatcctctatccggcgctcgaggatttccagatcgacatcctgatcggcgagggcccggccgctcgcagcgtcaagctcgacctgcagccgttcaccctggtcggcgccaccacccgcgccggcatgctgaccaatccgctgcgcgaccgcttcggcatcgtttcgcggctggagttctacaacgccgacgacctcggccgcatcgtcacccgcagcgccggcctgctcaatgccggcatcacgcctgacggcgccgccgaagtggcgcgccgcgcccgcggcacgccgcgtatcgccaaccgcctgctgcggcgcgtgcgcgactacgccgaggtcaaggccggcggcaccgtcgacgccgacgtcgccggccgcgcgctggcccgagcacgaggtcgacccgggagatcccggacccggtccgcgaggc

SEQ ID NO: 4635 - DNA, 745 bp, Zea mays
  Peptide Sequence Number=SeqID_10655
  Probeset Number=SeqID_19038
gagctcactagtccccccccccccccccccacccgcggcggcgcgaggtgggaaaactggtgcagcgactgggtgattgctagtgccgaggccaacgaccgcctcgtcctgccgagcgatgggccgacactcgaccgcaagctatggtagaccaagtcgtccttggcgccagtgttcctgcccatattggataggatcaagggcttggccatgggcggcctgacgttgatgcacgtggtcaacgacctcctgaagcgccggaccgcaccgctgcagaggagaccacgcctgtgttcttggttcacccggcccgaacgacatcgaccggatccagcgcggggccggggatcgacctggtcctagatggagctggcggtccttggtgggaagggattactgggggaaacttttgtccccgagtccctgatcctcccccagggcatccatgcgctctgcgacgacccagagctggaggacggggggatcttggccacgctacggagcctttccaacgaaaggggccgtggcggtttcgcccaaacccggcggctggtaaccccacctggtgggcccccggattttccaaaggcaccctaactggaaggtcccccaagaccaactgggggcggacccccaagagccccccccccggggctcccccagttccccttggaacaaggggtaaaagggggcccctcaacccattgcccctccaccccacctttgggcttcccgggcggccccg

SEQ ID NO: 4636 - DNA, 1096 bp, Zea mays
  Peptide Sequence Number=SeqID_10656
  Probeset Number=SeqID_19039
aaaaaaagtaaaacctaggtattcagctcagcccgcgccattcctccgtctcggtagccacagcacgccgcacgcacagcacagccgccgcagcagaactgcacaagacagccgctcgcggctcgcttgctcctcgcccgaccggtcggccgcctgctcgtccgtccgtggccgcgaccgcctgcccgcctccgtctctggctctggcttgctgcttcctgcgggctgcggtcctgcctgactacctctgccttcctgctgtgcgcggcccgttgggcgttggccggccggcggccgcacggccgtgctccactccactgctccacggctgcttctgcttgcctgctttgttgcttgctttgctgtttgctttgttgcgcctgctccgcctgcttcggccgtgctacactgctccgcctgcttgctttgctgcttgcaaattcggctgcttgcaaattgcaaattctcctagacgtaactaaaataattgctgatttagcatataatctacaagggattcttcatctaatgcatattgtttacatcacttgtacacgaacaaagagacacagaggaaaagaaagcatggaccgatgtaacagttggcgacaccacacctgcgtacacaaaacacgactcagtccctcagaaagagaaggaaaaaaagtcaaatacaccgagaaaatcgcagaagaagaggatgaagacagtgagtatagcacactcgcccccagtgtggggcatcatggagacgatgacaatcatgttgacgcagggaggggatgttggatcttatggggtgcggaggagtgggaggtgggagcatatcaagagccttttaacacgtatgagtattatcacaatgagtctagctcaatacgcgtgtgttgtgagagaggtggacctctgtgtcgctggaaaactgtaaaagagcttgtattttagtattgtgaaattcgcttgtttttttttgtttgagaactggagtttgtggttgcatatgtatgttgtatgtcattttgttgaacacatgttgtgtggaccaattattatttactatgcaaacgtgaattgagcgccaaagtctcctagacat

SEQ ID NO: 4637 - DNA, 663 bp, Zea mays
  misc_feature (123)..(123): n is a, c, g, or t
  misc_feature (152)..(152): n is a, c, g, or t
  misc_feature (159)..(159): n is a, c, g, or t
  misc_feature (169)..(170): n is a, c, g, or t
  misc_feature (174)..(174): n is a, c, g, or t
  misc_feature (177)..(177): n is a, c, g, or t
  misc_feature (183)..(183): n is a, c, g, or t
  misc_feature (192)..(193): n is a, c, g, or t
  misc_feature (211)..(211): n is a, c, g, or t
  misc_feature (216)..(216): n is a, c, g, or t
  misc_feature (218)..(220): n is a, c, g, or t
  misc_feature (232)..(233): n is a, c, g, or t
  misc_feature (237)..(237): n is a, c, g, or t
  misc_feature (240)..(240): n is a, c, g, or t
  misc_feature (242)..(242): n is a, c, g, or t
  misc_feature (253)..(253): n is a, c, g, or t
  misc_feature (257)..(257): n is a, c, g, or t
  misc_feature (259)..(259): n is a, c, g, or t
  misc_feature (264)..(266): n is a, c, g, or t
  misc_feature (270)..(270): n is a, c, g, or t
  misc_feature (274)..(275): n is a, c, g, or t
  misc_feature (277)..(278): n is a, c, g, or t
  misc_feature (280)..(281): n is a, c, g, or t
  misc_feature (285)..(290): n is a, c, g, or t
  misc_feature (292)..(292): n is a, c, g, or t
  misc_feature (298)..(298): n is a, c, g, or t
  misc_feature (300)..(300): n is a, c, g, or t
  misc_feature (303)..(303): n is a, c, g, or t
  misc_feature (312)..(312): n is a, c, g, or t
  misc_feature (314)..(315): n is a, c, g, or t
  misc_feature (317)..(317): n is a, c, g, or t
  misc_feature (325)..(326): n is a, c, g, or t
  misc_feature (330)..(330): n is a, c, g, or t
  misc_feature (334)..(334): n is a, c, g, or t
  misc_feature (336)..(337): n is a, c, g, or t
  misc_feature (340)..(340): n is a, c, g, or t
  misc_feature (344)..(344): n is a, c, g, or t
  misc_feature (350)..(350): n is a, c, g, or t
  misc_feature (353)..(353): n is a, c, g, or t
  misc_feature (355)..(355): n is a, c, g, or t
  misc_feature (358)..(358): n is a, c, g, or t
  misc_feature (361)..(361): n is a, c, g, or t
  misc_feature (369)..(369): n is a, c, g, or t
  misc_feature (375)..(375): n is a, c, g, or t
  misc_feature (382)..(382): n is a, c, g, or t
  misc_feature (389)..(389): n is a, c, g, or t
  misc_feature (393)..(393): n is a, c, g, or t
  misc_feature (400)..(401): n is a, c, g, or t
  misc_feature (407)..(407): n is a, c, g, or t
  misc_feature (409)..(410): n is a, c, g, or t
  misc_feature (424)..(424): n is a, c, g, or t
  misc_feature (426)..(426): n is a, c, g, or t
  misc_feature (429)..(429): n is a, c, g, or t
  misc_feature (432)..(432): n is a, c, g, or t
  misc_feature (434)..(434): n is a, c, g, or t
  misc_feature (439)..(440): n is a, c, g, or t
  misc_feature (443)..(444): n is a, c, g, or t
  misc_feature (446)..(446): n is a, c, g, or t
  misc_feature (448)..(448): n is a, c, g, or t
  misc_feature (450)..(450): n is a, c, g, or t
  misc_feature (454)..(454): n is a, c, g, or t
  misc_feature (456)..(458): n is a, c, g, or t
  misc_feature (460)..(460): n is a, c, g, or t
  misc_feature (462)..(462): n is a, c, g, or t
  misc_feature (467)..(468): n is a, c, g, or t
  misc_feature (471)..(471): n is a, c, g, or t
  misc_feature (479)..(479): n is a, c, g, or t
  misc_feature (481)..(481): n is a, c, g, or t
  misc_feature (501)..(501): n is a, c, g, or t
  misc_feature (503)..(503): n is a, c, g, or t
  misc_feature (510)..(511): n is a, c, g, or t
  misc_feature (515)..(516): n is a, c, g, or t
  misc_feature (518)..(518): n is a, c, g, or t
  misc_feature (521)..(522): n is a, c, g, or t
  misc_feature (524)..(524): n is a, c, g, or t
  misc_feature (526)..(526): n is a, c, g, or t
  misc_feature (529)..(529): n is a, c, g, or t
  misc_feature (536)..(536): n is a, c, g, or t
  misc_feature (546)..(546): n is a, c, g, or t
  misc_feature (549)..(549): n is a, c, g, or t
  misc_feature (551)..(551): n is a, c, g, or t
  misc_feature (553)..(553): n is a, c, g, or t
  misc_feature (555)..(556): n is a, c, g, or t
  misc_feature (562)..(563): n is a, c, g, or t
  misc_feature (567)..(567): n is a, c, g, or t
  misc_feature (570)..(570): n is a, c, g, or t
  misc_feature (576)..(576): n is a, c, g, or t
  misc_feature (579)..(579): n is a, c, g, or t
  misc_feature (581)..(582): n is a, c, g, or t
  misc_feature (584)..(584): n is a, c, g, or t
  misc_feature (586)..(586): n is a, c, g, or t
  misc_feature (588)..(590): n is a, c, g, or t
  misc_feature (593)..(593): n is a, c, g, or t
  misc_feature (608)..(608): n is a, c, g, or t
  misc_feature (610)..(610): n is a, c, g, or t
  misc_feature (617)..(617): n is a, c, g, or t
  misc_feature (622)..(622): n is a, c, g, or t
  misc_feature (625)..(625): n is a, c, g, or t
  misc_feature (630)..(630): n is a, c, g, or t
  misc_feature (633)..(633): n is a, c, g, or t
  misc_feature (635)..(635): n is a, c, g, or t
  misc_feature (640)..(640): n is a, c, g, or t
  misc_feature (646)..(646): n is a, c, g, or t
  misc_feature (648)..(649): n is a, c, g, or t
  misc_feature (651)..(652): n is a, c, g, or t
  misc_feature (656)..(657): n is a, c, g, or t
  misc_feature (660)..(660): n is a, c, g, or t
  misc_feature (663)..(663): n is a, c, g, or t
  Probeset Number=SeqID_19040
catttttgctccgtgcgtgcgcccgtcactggcgctcggaagaggagtggttgcgccctcgcccaacggctcgcccggccccgtgccgcttgttggcttgcgcccttgtgcggggtggagtgnttgtccgctggttttgtgcccatcgccgntgccggncgacgatgannggcngtntcgcanaaaccccanntcttgtccccccatcttnatttncnnntcccccgcgccnnttcnccntnctcacaacttnaccncntacannntgtntacnnanncnnccannnnnngncaaccnanaanaaaaccccncnntncttaccgnnccanaccnanntcncccncctccnccntnacnacnaccatctnatacancattgcnacctttnacgnagcaccnnttcatngnnaaactaatctaaancnatnctncnaatannccnnantnanatcncnnncntnacatnnctnaatcacantnccgctttttcttagtatcancncactctnncacnncnacnncnanaancaatatnactctttctnccncncncnncctccnntttnatntctcanttnannancntnnnttnactactctactcacncnccgcccnattanacnaccanacncnaactntcactncnncnncccnncanctn

SEQ ID NO: 4638 - DNA, 707 bp, Zea mays
  misc_feature (565)..(566): n is a, c, g, or t
  misc_feature (593)..(600): n is a, c, g, or t
  misc_feature (615)..(616): n is a, c, g, or t
  misc_feature (621)..(624): n is a, c, g, or t
  misc_feature (629)..(630): n is a, c, g, or t
  misc_feature (637)..(637): n is a, c, g, or t
  misc_feature (666)..(666): n is a, c, g, or t
  misc_feature (670)..(670): n is a, c, g, or t
  misc_feature (694)..(694): n is a, c, g, or t
  Peptide Sequence Number=SeqID_10657
  Probeset Number=SeqID_19041
ttttgggggccaataaccctttttgccaaaacccacaacactccaggtttttccccctcccaaccctttccattttgaaaccgtctagaaaatttcttagggatatgttttggtggaggaggattattcagatttttcggaaggtaaggaagtatcaacattcccacttccctgtttgactccattatagagtcactggattcaaaattctgcaatctgggcaaatgtggatacaaggcttggctgaagttgcctcacagtttgagcaaagatctgttgaagcgccagctattggaaaacatcagcaactggagggagtcaagtgggactgctcttagacaagtttctgacaaagaagtggaccaagtgactgacaggtgggatgcaaaccttgaagcatttgatataagcattgcaatcgagaacgacattcttgaggcgcttgtcggtgagttcgcagttgacctatggtgaaacggcgtattgactgccctatatgtatatgagatattgacatgtttggacttctgctcgcatgattctgggaataaataagatactgcgnngatatggtttgttttttcttaaaaaannnnnnnnaaaaaaaaaaaaaannaaaannnnattannaaataanaaaaaaaaaaaaaaagcttatcgaaccgntccnaccctccgaggggggggccccggnacccaaattcgcc

SEQ ID NO: 4639 - DNA, 869 bp, Zea mays
  misc_feature (28)..(28): n is a, c, g, or t
  misc_feature (814)..(814): n is a, c, g, or t
  Peptide Sequence Number=SeqID_10658
  Probeset Number=SeqID_19042
cgattgggtaccgggccccccctcgagnatttttttttttttttttctttttttttttttttttttttttttttttttttttttttttttttttttttttttttttttttttttttttttttttgaaccccaagaactcccaatactgttctttgtgcaaaaaactggtatacttaaccactaccctacccaaccggggggaaaccgcgcgatgtcctaaaattaaaaaaaaggggtcggggccaaaaccggggaccacactgataaaagggtaaagggggtgcccgtacccccaggggttcgatgggagaaacgaactaactgatggggaatttaaaaaacgggcgggctttagggtcccaaggggggtgggtgtttcccttcccccagggggtttgtcccccggaccccccaggataaatttggcgccaaggggcaatccccgggggaaaatgaacccccaattttattttctagttggttcaaagggccaaaaaaaagtggggccctttttgggttgccaaaaaaacctttggggagaggggtttcccccccctttaaagccccaaaaatggtttgaagaggaaaaaaactcctttcgagaaaaatggtttttttttaaaaaggctcatccgcaatttccccatgcaaaaaaagggaacggagttcgccccctgaacaattccttttttttgaaaaaaggcccccacagccaggggggaaatggtaaggaaaaaaaccttaaggggtcccttctttttttttaaaaaaatgggaaacaaaaagaacggcgccggggatataaatttaaaancgcgcttccgattccttcccacgaagttttatctatttcaccccttcccgcccca

SEQ ID NO: 4640 - DNA, 350 bp, Zea mays
  Peptide Sequence Number=SeqID_10659
  Probeset Number=SeqID_19043
tcgacgacactcttgaccagatttctcaacgcctagatgctcctctgactcctagactggtagtgcccatagacgtgaagaagcagccatgggagcagaaggttcctctccacaaccgctggcatccagacatccctcccgttgctgatgtaaccgaaggggaactggacggcatagcgctcatcaccatcagccaacctgcccgtggtggatgcgccatcgcctgaggcgagccgcggggaaatgagggatccttggaggcagagctggcgtcgcgtcgccggtggacgctggtgctggtgaacatggcgtcgatgctggaaaagatagacgagatgttgctgctcgcc

SEQ ID NO: 4641 - DNA, 377 bp, Zea mays
  Peptide Sequence Number=SeqID_10660
  Probeset Number=SeqID_19044
ccccggccaccccgtccccgtgctcaccggccatggcgcccgccctccccgcgcccgctcggcctcgcccttggcgcccgcgcggcgtccctgaccccgccccgcgctcgccagccccgaccgcgcccgaccccgttcgcccgtccccggcactcgccgaccccgtcccgcccgcgcgcgtttccccgcccggcctcggccccgtcccggccatggcgcggccatggcggcccgccgtgatccacggtgccctcgctcgcccgtgctcgcccgccccggcgtgcttgcccgcccgccccgacgtgtcctgctcgcgtcgtgacggccccggcgcggcctcgagctcggtccagcgtgcctttggtgcgcggccttga

SEQ ID NO: 4642 - DNA, 1253 bp, Zea mays
  misc_feature (1)..(282): n is a, c, g, or t
  misc_feature (603)..(603): n is a, c, g, or t
  misc_feature (687)..(687): n is a, c, g, or t
  misc_feature (1253)..(1253): n is a, c, g, or t
  Probeset Number=SeqID_19045
nnnnnnnnnnnnnnnnnnnnnnnnnnnnnnnnnnnnnnnnnnnnnnnnnnnnnnnnnnnnnnnnnnnnnnnnnnnnnnnnnnnnnnnnnnnnnnnnnnnnnnnnnnnnnnnnnnnnnnnnnnnnnnnnnnnnnnnnnnnnnnnnnnnnnnnnnnnnnnnnnnnnnnnnnnnnnnnnnnnnnnnnnnnnnnnnnnnnnnnnnnnnnnnnnnnnnnnnnnnnnnnnnnnnnnnnnnnnnnnnnnnnnnnnnnnnnnnnnnnnnnnnnnnnnnnnnnnnnnnnnnagttaaatttcggtgttgtgatcagaatggtgtcaaaccgggaatcggctaggcgatcaagaaagaggaagcaagcacacttgaccgatcttgaatcacaggtttccaggttaacgtctgagaatgcatctttgctgaagcgactggctgatatgactcagaaatacaaggatgcttccgttgacaataaaaatctaacagttgatgttgagactatgaggagaaaggtccgttcgtcttgaatgcatcacagacctttttctttttgttgtatgagaattcttaactgcatccatttatcgttcgtcatatttttactgngatctgcatgtagtcactggatcaacgttttactgggctctgcatgtaaacgtaaacgcaaagggcagtgaaagtagtattggntgttcatagttcttattttagaacctgcaagttcagttttagtttctaatgggttttaactgcacccaaaggtatggcagcatgttcatctgatgcagcttctgccattctgcatactgccgccattgaagatagcctaaagcatttcctccaggcgccacttgaaacagttggggatcattcccaaacgcagcagtttttcagaccaagccagcttctctgcaccgtgttgctagcctggagaacctgcagaagaggatcgtcggggatgcaatgtattccgagaccgcgtcaacgacattctcagatcctgaagctcttgccgataggtaaaggttgctcctgttctgtcctgtgatgaacagccgtgtgatgctctagcggcctaagtgcttctggtaatggaagttgtacactattttgaaggttaataataattgttgagaaatgatctcatccctttaaggcatctcttgggtgtagacacacctcttgggttggctccttcaaggcacccctttgtaagtaaagtattccattaataaaccgaatagagttttcactcn

SEQ ID NO: 4643 - DNA, 545 bp, Zea mays
  misc_feature (323)..(324): n is a, c, g, or t
  misc_feature (330)..(330): n is a, c, g, or t
  misc_feature (332)..(332): n is a, c, g, or t
  misc_feature (335)..(336): n is a, c, g, or t
  misc_feature (338)..(339): n is a, c, g, or t
  misc_feature (342)..(342): n is a, c, g, or t
  misc_feature (350)..(351): n is a, c, g, or t
  misc_feature (359)..(359): n is a, c, g, or t
  misc_feature (370)..(370): n is a, c, g, or t
  misc_feature (377)..(379): n is a, c, g, or t
  misc_feature (381)..(381): n is a, c, g, or t
  misc_feature (386)..(387): n is a, c, g, or t
  misc_feature (405)..(405): n is a, c, g, or t
  misc_feature (411)..(412): n is a, c, g, or t
  misc_feature (416)..(420): n is a, c, g, or t
  misc_feature (423)..(423): n is a, c, g, or t
  misc_feature (425)..(426): n is a, c, g, or t
  misc_feature (429)..(429): n is a, c, g, or t
  misc_feature (431)..(431): n is a, c, g, or t
  misc_feature (433)..(433): n is a, c, g, or t
  misc_feature (435)..(435): n is a, c, g, or t
  misc_feature (440)..(440): n is a, c, g, or t
  misc_feature (442)..(446): n is a, c, g, or t
  misc_feature (452)..(452): n is a, c, g, or t
  misc_feature (458)..(460): n is a, c, g, or t
  misc_feature (464)..(464): n is a, c, g, or t
  misc_feature (470)..(472): n is a, c, g, or t
  misc_feature (475)..(475): n is a, c, g, or t
  misc_feature (477)..(479): n is a, c, g, or t
  misc_feature (487)..(487): n is a, c, g, or t
  misc_feature (490)..(493): n is a, c, g, or t
  misc_feature (501)..(502): n is a, c, g, or t
  misc_feature (507)..(508): n is a, c, g, or t
  misc_feature (512)..(513): n is a, c, g, or t
  misc_feature (519)..(519): n is a, c, g, or t
  misc_feature (522)..(522): n is a, c, g, or t
  misc_feature (524)..(524): n is a, c, g, or t
  misc_feature (526)..(528): n is a, c, g, or t
  misc_feature (537)..(537): n is a, c, g, or t
  Peptide Sequence Number=SeqID_10661
  Probeset Number=SeqID_19046
caagttcgtcgcgcgccccctgtatttctctgtggccgacgctcagctcctagctctggcgcgtgtccctctgctcagctccggccgcgagcagctccctggtgcttggacccggctcagcgcgctccctgttcccatcaccgcgtgcgcattctccctgcccaatcgccccctttcttcatctccctcccgcgcgcctcggggctcgcccctgccgctgcttggacggcgccgcccggctctggtcaaagaccctccccggcccaccccgccgctcgcatgcctgtcgtgctcgtgcctttcccccccccccccccccaaannaaaaananagnnannaantactcacnntatatatntacataaaaanaaaaaannncnaaaanngggggggggggggggggngcaccnnccannnnnacngnncgnantntncaccnannnnnccggcnatgacnnntaantgaaannngcncnnntatcaccnctnnnncttatatnnactcnngaanntacgtnacntnannncgtgccccnttcccaca

SEQ ID NO: 4644 - DNA, 2074 bp, Zea mays
  misc_feature (1)..(532): n is a, c, g, or t
  misc_feature (1839)..(2074): n is a, c, g, or t
  Probeset Number=SeqID_19047
nnnnnnnnnnnnnnnnnnnnnnnnnnnnnnnnnnnnnnnnnnnnnnnnnnnnnnnnnnnnnnnnnnnnnnnnnnnnnnnnnnnnnnnnnnnnnnnnnnnnnnnnnnnnnnnnnnnnnnnnnnnnnnnnnnnnnnnnnnnnnnnnnnnnnnnnnnnnnnnnnnnnnnnnnnnnnnnnnnnnnnnnnnnnnnnnnnnnnnnnnnnnnnnnnnnnnnnnnnnnnnnnnnnnnnnnnnnnnnnnnnnnnnnnnnnnnnnnnnnnnnnnnnnnnnnnnnnnnnnnnnnnnnnnnnnnnnnnnnnnnnnnnnnnnnnnnnnnnnnnnnnnnnnnnnnnnnnnnnnnnnnnnnnnnnnnnnnnnnnnnnnnnnnnnnnnnnnnnnnnnnnnnnnnnnnnnnnnnnnnnnnnnnnnnnnnnnnnnnnnnnnnnnnnnnnnnnnnnnnnnnnnnnnnnnnnnnnnnnnnnnnnnnnnnnnnnnnnnnnnnnnnnnnnnnnnnnnnnnnnnnnnnnnnnnnnnnnnnnnnnnnnnnnnnnnngtttcttgtgacattgtgtttgatgagactattggctcccaagtggagcaagttgatcttgatgaactagatgatgaagaggctccgtgcgtcgtgctaaggaacatgtccattggggacgtgtatcctaaggaatccgaggagcccacacaagcacaagatcaaccatcatcttccatgcaagcatctccaccaactctagatgaggaccaggctcaaattgatgaagatgaagatcaataggatgagccacctcaagaggaggacattgatcaagggggagatgaagacaatgaagacaaggaagatgagcaagaaattagggatcaaagaccaccacacccaagagtccaccaagcaattcaaagagatcaccctgtcaactccattcttggtgatattcacaagggggtaaccactagatctcgagttgcacatttttgtgaacattactcttttgtgtcttctattgagccatacaagatagaggatgcactaagagattcagattgggtggtggcaatgcaagaggagctcaacatttcactaggaatgaggtatggcatttagttccacgtcctaatcaaaatgttgtaggtattaagtgggtattctgcaacaaacaagatgagcatggtgtggtgataagaaacaaagctcgacttgtggcaaagggatattcacaagtcaaaggtttggatttcaatgaaacttatgcacccgtagctaggcttgagtcaatttgtatattacttgcctatgctacttaccatggctttaagctttaacaaatggacatgaaaagtgccttcctcaatggccctatcaaggaagaggtctatgttgagcaacctctcggctttgaagatggtgagtaccctaaccatgtgtataagctatcaaaggcgctttatgggttcaagcaagctccaagagcatggtatgagtgcctgtgagacttttttatcactaatggcttcaaagtcggaaaagttggttctactctctgaaagggaattaggcttacacctattttcctaattgattttggtcattgaattgcccaacacaaataattggactaactagtttgccctagtgtatagattatacaggtgtaaaaggttcacactcagccaataaaatgaccaagtattgggttcaacaaaggagcaaagggacaaccgaaggcacctctggtcaggggcaccggactatccggtgtacaccggacagtgtccggtgtacaccggacagtgtccggtgcaccaccggacagtgtccggtgcaccagaggactccaactnnnnnnnnnnnnnnnnnnnnnnnnnnnnnnnnnnnnnnnnnnnnnnnnnnnnnnnnnnnnnnnnnnnnnnnnnnnnnnnnnnnnnnnnnnnnnnnnnnnnnnnnnnnnnnnnnnnnnnnnnnnnnnnnnnnnnnnnnnnnnnnnnnnnnnnnnnnnnnnnnnnnnnnnnnnnnnnnnnnnnnnnnnnnnnnnnnnnnnnnnnnnnnnnnnnnnnnnnnnnnnnnnnnnnnnnnnnn

SEQ ID NO: 4645 - DNA, 513 bp, Zea mays
  misc_feature (478)..(478): n is a, c, g, or t
  misc_feature (484)..(484): n is a, c, g, or t
  misc_feature (488)..(488): n is a, c, g, or t
  misc_feature (490)..(491): n is a, c, g, or t
  misc_feature (493)..(494): n is a, c, g, or t
  misc_feature (498)..(499): n is a, c, g, or t
  misc_feature (501)..(501): n is a, c, g, or t
  misc_feature (507)..(507): n is a, c, g, or t
  misc_feature (509)..(509): n is a, c, g, or t
  Peptide Sequence Number=SeqID_10662
  Probeset Number=SeqID_19048
tgcggtctgttctttgacaccaccgaagggatgtccgacaacaattgcagcttttcttctgtcgggagaaccggagggtggttcgtacaggtggcctgcaagcttgatgttgcggctatcaaatgtgacatttcgtggaatcgtcatgatgttcaggccaggtaatgtcattggtagagactatttagtatagggaatcggcaaggagcaattgctgagacacagctggctatttatgtaggggctgaaagcccgacagtagcctatccgcggatatgtccgggctattccggggcatcttgccgctctctgacactctcggcaagcttgcaacaagtcactgatagacaggataaataacatgagtctaccacgccgtcttccaagctgcttatgagcgccatccaccccgaagggatccgaaatcttcggccccccatttcggggggtcgggtccgttgcacgggacgtctggaangggggngggnannanngggnntntcgcantnaaac

SEQ ID NO: 4646 - DNA, 860 bp, Zea mays
  misc_feature (802)..(802): n is a, c, g, or t
  misc_feature (806)..(811): n is a, c, g, or t
  misc_feature (826)..(826): n is a, c, g, or t
  misc_feature (841)..(843): n is a, c, g, or t
  misc_feature (848)..(860): n is a, c, g, or t
  Peptide Sequence Number=SeqID_10663
  Probeset Number=SeqID_19049
cgtactagggaccagtagaagtatctgctgacgacggtggtgaccgctcaagaacgtagtggatgagcacggggtgctggcattcggcgagagtacattcaataggacgtcatagtcgatagtaagggtcacttgttcaggaacatgagggtcagggtggaatcatctcgatcagttatatcatcatcagtagcatcaggttgctgtgtgcagttgttccatctcaatcgtcgacagtgtagacagaaggaggtgtggtgatcggagttccgtattgaggggggcagcaagtgtgccagggggggatagtttctcggagccatctatatggagatgtgatgggaggagcgatccagccaacgtagagtggggatggtgatcagcatggcaaatgcgtctatcgcggcaatcagggtctcagtcatatcagatgagggcgcgggtgtaggtgcttgcatgtggcaggcatgacaccgtctaaggcaggattctgttgtctcggcccttggatggatcaccatcggaacaaccaccaacatatgcctcaggtagggaatacggttaaagtttttgagacatcaaatgcaatggtggcgagggatcctcctcagcggacgcaattgatccatgcgatgatgagatggcaagagtgcattcttctattcttccagagaatatttcatgtgaagcatgagacagaacaggttcctacaaaaaatcgaatgttctgaatatcacctgtacaaatgtgagcaaaggaatactgtatattcgaaagtatgtcagtgcagtgtttcggagncaannnnnnattttaaggggtgtngggtgagggagtttnnnaaaannnnnnnnnnnnn

SEQ ID NO: 4647 - DNA, 486 bp, Zea mays
  misc_feature (286)..(286): n is a, c, g, or t
  misc_feature (325)..(325): n is a, c, g, or t
  misc_feature (334)..(334): n is a, c, g, or t
  misc_feature (373)..(373): n is a, c, g, or t
  misc_feature (398)..(398): n is a, c, g, or t
  misc_feature (418)..(418): n is a, c, g, or t
  misc_feature (443)..(443): n is a, c, g, or t
  misc_feature (458)..(460): n is a, c, g, or t
  misc_feature (475)..(475): n is a, c, g, or t
  Peptide Sequence Number=SeqID_10664
  Probeset Number=SeqID_19050
ctctctgtctctctagggtttttgattttagccgccgccgctgctcatctcacatccctcgagaagacgcctgctactcgccgatcgatacgatggccgtcttctccgacctcaacaccgccgaacggcctcaaggtccctcgaggctcacctcgccgcaaaaaccctaatggtgtctggtgacgcctttaagtaagatggacattaaggcctttcgcccgcggtgccgtcgaagcctggggcggctgagtttcctaatgcccgccccgctggtacgagaccgtcnttctgcggctgtagcctcaaattccttggggaaaggggnttgttgggngtaatctgggcctggcgggatcagctcctgcggcagtgnttccctggggatgagggcttgaggnatgatgatgaccttggaatnttttttggtgatgaaaactgagganggacaagaaaggagnnntgatgagcgtgccgnccgctgccaag

SEQ ID NO: 4648 - DNA, 324 bp, Zea mays
  Probeset Number=SeqID_19051
gtacatcctctattcttccctggatatgaatacctatcccccacagttggtgttatggtctttagaagaagtgatggtccagttgtctttaaaggtgtgttaaagggaaagttttatctagtagattttttgaacgataaaaccaaacttgacgcatgcttaattgtaaaaaccaatatagcctagttgtggcatcgcggacttgctcatgttggaatgaagaaccttcgtaagcttctaaaggacaaacacgttttagaactaactaatgtttgatttgagaaagacgagatatgtgaagcatgtcaaaaaggaaaacaagtc

SEQ ID NO: 4649 - DNA, 757 bp, Zea mays
  misc_feature (1)..(157): n is a, c, g, or t
  Peptide Sequence Number=SeqID_10665
  Probeset Number=SeqID_19052
nnnnnnnnnnnnnnnnnnnnnnnnnnnnnnnnnnnnnnnnnnnnnnnnnnnnnnnnnnnnnnnnnnnnnnnnnnnnnnnnnnnnnnnnnnnnnnnnnnnnnnnnnnnnnnnnnnnnnnnnnnnnnnnnnnnnnnnnnnnnnnnnnnnnnnnnnnnnnctgtgtcgcaacagcatgctatccgttactcattactgcattattgcagctcactcagtacacggcaccatatccagattatatgcaagatagctaagtgcttcagttccatcgagcagtctctgcaggtttaaaatatcctcgggaatcgggatcctcccacgctcgcgcttagtagcaatcctggcttatgattccctgagtacgctgggctgatacttaccgagcgcgatatgagccccttcacaggaatgtggaaacggaactccttgatcgagccgactacctcagataacgatctcaagcggcgctgaccccgcggccgcgtctccgatgagctcgatcacgtcatccagcaccttcccggcgtccacccacgcctcagcatccgcatagacctcattcctgtccgcaagctctccggacccggaccacgctttgtcggcggtggggcgggctgcacgtaggaggcggccgggtagccgctagtagggttgttgagggggctgcggcggcacgaggagaggctgccctaggtgcgcgtgcgccttctcgccgtcgccggtcgccgccgccgcggatgccatcgccgacgcggtt

SEQ ID NO: 4650 - DNA, 394 bp, Zea mays
  misc_feature (54)..(54): n is a, c, g, or t
  misc_feature (202)..(203): n is a, c, g, or t
  misc_feature (210)..(210): n is a, c, g, or t
  Peptide Sequence Number=SeqID_10666
  Probeset Number=SeqID_19053
gaacccggcggggggggcggcccccttgggctggttggaccatgcgcttagctnctaaggagatgggagcaggttcccgccccccagcagtgccaagatgtggggaatggccccacccctggggcagcgcgagatatctcccctctttttccggcggcggaggagccactccgggggggatcgcgtgcgcatgttcgcgttnntcgtatncgatgacgattatgcatagctacacatttgaatcagctgcgcgagactgctagaatcagttagaaagtgggtggcattcatcaagaagtcattcgattagaatgttctagctactggtcttgtgcgaattcctgcaggtcgggggatccgatatttctcgagcggcccgccaggcggtggatct

SEQ ID NO: 4651 - DNA, 462 bp, Zea mays
  Probeset Number=SeqID_19054
ttcgccatgtccttctccaacaacgaacaagtatgcccgccgattcccttcccttccgattactgaatcatcctcctagatgccctctttgtgaccaagagcctgaaaccatcaaccatttttgggtttcttgtagcttttccagattatattggtacatcactcttcggaaatttgggctccacattcttgcccctctccaagatgacacaaacttcctgcggtggtggaaacgtattgctgatattgtgtcagatatgatcaagaagggggtaaattcacttttgattctgggagcctggatgatctggaagttcagaaacagagtggtgtttgacgggtctccccccaatatcactacaatcttagaggccactgctgagaaaaagggagaaatggatggttgcaggagctaagggtctttcctttttagctgctcccagtaccaatgtcagagataag

SEQ ID NO: 4652 - DNA, 809 bp, Zea mays
  Peptide Sequence Number=SeqID_10667
  Probeset Number=SeqID_19055
aatggacgctgcacatatcgtttcatttacaaggctactactacttacattgatataacggggaacagaggacgccgggcaacacgggtgcggtccgaggcaggaatcacatgccaatggctctcggtgacgaaagctcagcttgctcatctatttcgctccccacgacggttcccgagaccagagtgtcaggaatatttcgctcctcagccccctcatcgttgagaagcttggctccgcgggcaggctggtccactgatactaccacatccagaacaacatccaataaatgaattccatcctctcatgcatttgggtccggggatcatactgaaacatcagcaataacaaatggaacgatccgcctccgcgctaattttgtggcgaggaacgcattgagagagtccgtgagaatcatgaccaggaaatagcttacccccgaggcccctgtagtttttgtcaggagcgttctgacaatctacctgcgtgttcattttgacaatttcagtttagcaactgttctgcgtaacatctccttaacatgtctgcacaggttattcttcctgaacatttaattctgccattgccagttacatgtctattgcgggctctggaactgggccagcgaatcctccaatgcaccatggtgttgcaccagcacttagaagctctcgattcccgagaggatggaggcggcgcgcgtaaagacgcttactagacgccgccaccggaggaagccggacatggctgtggtgtcctggtgcgtgcggattatcatggggtcccgctagcagattccgcaaagccgg

SEQ ID NO: 4653 - DNA, 2338 bp, Zea mays
  Peptide Sequence Number=SeqID_10668
  Probeset Number=SeqID_19056
gaaaacggccccttggggaggggggggcgcagtcccccgccccccggggggccgggcgcggggggagccgtgagggggggggggcggaaaaagcggccccggcagggagaaggcggggtatgcgcgcgggggggggggggcccaccccggggagggggccgcgagggaatagttcccgggggaaggggggcccgggggggggaccgcaaatgaagggggggataggcccggccaccgggccccgggcggcaccacgggcatattgggccggaatgggtttgggcgggggggagggggacggtgagacccatttgcccccccggaacaacgaagggtggcgccaaccgcaagggggggccagcacccgggggggccgcggcccggggggggggctcccggttggtgccgggggctataaccctgggggccccccggggtccgcccaggaggggccggggagagagcgcgccctcccccccccccccccgccccgaaaaagcccaccaaagagagaaaagaaaacaagacttaactataacaataaatttaatgtcgctctcaaaactcatttttttcatatgaattttctaacacaaacaattttccttggaaatctccgccttgtatctcttatataactcatctctatatactccgaacatgtccctctccgttaaccttaacggccatgtcagccgccgcagctgaaaccgacgtctctctccgtcgcagatctaactctcttaacggaaaccacactaacggcgtcgccattgacggaaccctagacaacaacaaccgtcgcgtcggagatacaaacactcacatggatatatctgctaagaaaactgacaacggctacgccaatggtgtcggaggaggaggatggagaagcaaagcgtcgttcacgacgtggacggcgcgtgatatcgtctacgtggtgagataccattggataccgtgcatgttcgctgccggacttctgttcttcatgggcgtggagtacacgcttcagatgattcccgcgagatctgagccgttcgatcttgggtttgtggtcacgcgctctttgaatcgcgtattagcatcttcaccggatcttaacactgttttagccgcactaaacacggtgttcgtagggatgcaaacaacgtatattgtatggacatggttagtggaaggacgagcacgagccaccatcgcggctttattcatgttcacttgtcgcggcattctcggctactctactcagcttcctctccctcaggactttctaggatcaggggttgattttccggtgggaaatgtctctttcttcctcttcttctctggccatgttgccggctcgatgatcgcatcattggacatgaggagaatgcagaggttgagacttgcaatggtctttgacatcctcaatgtattacagtcgatcagactgctcggtacaagaggacattacacaatcgaccttgcggttggagttggcgctgggattctcttcgactcattggccggaaagtacgaagagatgatgagcaagagacacttaggcactggttttagtttgatttcgaaagactctctagtcaattaaatttgttttctatcagaatgtttagttgagttgaatctagcgtaatgaatttttttgtttttctttgaaaaaaaaaaaaaaaaaactcgagggggggcccggtacccaatgtttccccagcagggggagggaaaattacaaatggggggggcgccgcggaaaaaaaacaaacccagggacaagggacccacccggggggggggccccgccacccccccccccccccggggccccacaacggggcggggggctccccacacggaggggggggggcggggggggcaaagggccccgccacacagatatgccccctcttctcacaaatatttttgccctaacacccagaaaagggggcgcaaagggcggcataaattgttgataagcggtggtaaaatattatttttgtgggaagaacaccaccccccgcgcaacaacatatcttcttgcgacacaaaccacacaccttatttctttatttactaccaatttagacgccccaaacgacgcccacacccacaacctctccctctacattcaccccgacacattatacacccacccccaccacatcccgccgggcggacggcgcgctctctccccttagtcggtgtgaaaaataaccccctcctcccctcttaaacaacacacgggggccgtcttccccaccacacacgccccgcgggaacataatctctcctctttatatggcccggggacgcacaccacatacccctaatacaaata

SEQ ID NO: 4654 - DNA, 1344 bp, Zea mays
  misc_feature (1283)..(1344): n is a, c, g, or t
  Peptide Sequence Number=SeqID_10669
  Probeset Number=SeqID_19057
ccggccggggattctcccggccgtgtttctcgccatccgcgtagactcggcttcacccccaacctcgaatcctgatcggtcgttgatcccgattccggatcttgccttgggcccttgacttctccgtcgggcctctgcgactctgctcctccctccgcctctccagttgcgcctctacgccctaccgagccgcgccctcaccaggtcttcgcgggcgaagaagggatcggaggcgccatcaatttctcgccgctagtctgacgccgccgctaatccgctccccactcgctgatagccccagcgatgctaccatcggagcgcgaggacacgcatcatctgaaaagcaagttggtgacactggattctcaaggttcgtgtgcagcgctgcgaacatccgcatcatgaaggagcgcgcatacattgagcgagcgcgagtcgccgagcaagtcgcatggaaggcttgatcagcgccacgcagacacctctcccgccgccaccccgtggcgaggtcggggttctcggctccccgcggtggaacgctgccgcggcccgcgtacctgcctgccccgctcgtccactgggttccggagcgcaggggcaggtcggtacgccgctgcgctgtggctgtgcgctgtcgggccagggatgttatgacgtcgcacctggggtccgacctgggcaccgcccagtccagccggtagcggccacactccgccgggcggcctcggcagagggcgccgtggtgcgccgtgcttgcaccaggcttgttccctgcctcgggtagcgaatggggcggagggggaggccctcatgggtccccgcccccgggggagctcaggtctgttctcgccggggcccaatcccgggccctccgagtggtgcctccacttcatgttatctttctgaatgtagtgtcgggcgcagaagcttcgcagtataggaattggctcatcgaagtcgatatctgctgtggggtcgagcttttttcgtggtcgggtgtcgctgctccaaaatcgccgaagagcccgtgaccgaggatcctggtgagcagcaggttgaagtagctgagcaggagctcattgaaggagatgatcaggtggttcaggaggagccgcctaacactgaggagttcgatctgatctaggtggcgtatcccagtcgacattggcgccgacgatccttagttcgttttatatttattattttattttgtaataagtcttccgctatgtaataaatactctgatgttttatgacatttatctctatacactctgttattnnnnnnnnnnnnnnnnnnnnnnnnnnnnnnnnnnnnnnnnnnnnnnnnnnnnnnnnnnnnnn

SEQ ID NO: 4655 - DNA, 491 bp, Zea mays
  misc_feature (21)..(22): n is a, c, g, or t
  misc_feature (25)..(25): n is a, c, g, or t
  misc_feature (52)..(52): n is a, c, g, or t
  misc_feature (98)..(98): n is a, c, g, or t
  misc_feature (205)..(205): n is a, c, g, or t
  misc_feature (218)..(218): n is a, c, g, or t
  misc_feature (228)..(228): n is a, c, g, or t
  misc_feature (245)..(245): n is a, c, g, or t
  misc_feature (311)..(311): n is a, c, g, or t
  misc_feature (339)..(339): n is a, c, g, or t
  misc_feature (344)..(344): n is a, c, g, or t
  misc_feature (360)..(360): n is a, c, g, or t
  misc_feature (373)..(373): n is a, c, g, or t
  misc_feature (376)..(376): n is a, c, g, or t
  misc_feature (416)..(416): n is a, c, g, or t
  misc_feature (418)..(418): n is a, c, g, or t
  misc_feature (422)..(422): n is a, c, g, or t
  misc_feature (428)..(428): n is a, c, g, or t
  misc_feature (431)..(431): n is a, c, g, or t
  misc_feature (433)..(433): n is a, c, g, or t
  misc_feature (436)..(436): n is a, c, g, or t
  misc_feature (442)..(443): n is a, c, g, or t
  misc_feature (449)..(449): n is a, c, g, or t
  misc_feature (451)..(451): n is a, c, g, or t
  misc_feature (459)..(459): n is a, c, g, or t
  misc_feature (462)..(462): n is a, c, g, or t
  misc_feature (464)..(464): n is a, c, g, or t
  misc_feature (470)..(470): n is a, c, g, or t
  misc_feature (480)..(480): n is a, c, g, or t
  misc_feature (484)..(484): n is a, c, g, or t
  Probeset Number=SeqID_19058
ggattaattcattgttcgtcnnaanattaacctgtgagactgtctctgcggncgaagcgagaatctccgatcagcgatgaatgcccccgaccgatacnaacgattcgtcgtccctgaaggcaccaaaaaggtttcgtatgagagggacacgaagatcatcaacgctgcttccttcacgattgagagggaagaccataccattggnaacatcgtccgcntgcaacttcnccgcgacgagaatgtgntgtttgctggataccaacttcctcatcctctcaagtacaagatcatagtcagggattcacaccacnagccagtcttctccaatgcaagcatacnaatcngagctatcaatgaccntgacaaggagctngantttctcaagagccaatttggaggtatttgccaacccaagncnctcnctctcnctntnggnttgagnnttgttnanaaaacgtngcngngaagcnacctttgaanaaantgtttac

SEQ ID NO: 4656 - DNA, 793 bp, Zea mays
  misc_feature (601)..(793): n is a, c, g, or t
  Peptide Sequence Number=SeqID_10670
  Probeset Number=SeqID_19059
tcaaaatttttacggtttcaattttcctttgccctttagggttggcaaatttttggaagggggattgggggggggcttttttctttttcccccactggggaaaagggggtttttttccaaggggtttaattggggtacccccgggtttttcccatcccggcgtttttaaaacgcggcccgggagggcgggttatttggctcccttttgggggaatttgggtccggggccccccttgggggtggcgggttcgaaaattttttttttttttttttttttttttttttttttttttttttttttttttttttttttttttttttttttttttttttttttttttttttttttttttttttttttaaaacaaaagggtcccaggtaaaagccatcgcgcagcattcagcgttatacaaactacaaactgcccaacactgtcaacgcttttaagcacatctaaactcttggccatagtccttcacaagtgcgacaggggggctctagtttcaaacacaaaagcccgtaaaattagcggcacatatttgtttcctttgccaaaaaaaagggaagccgggaaaggactctcccccaggaatacatcannnnnnnnnnnnnnnnnnnnnnnnnnnnnnnnnnnnnnnnnnnnnnnnnnnnnnnnnnnnnnnnnnnnnnnnnnnnnnnnnnnnnnnnnnnnnnnnnnnnnnnnnnnnnnnnnnnnnnnnnnnnnnnnnnnnnnnnnnnnnnnnnnnnnnnnnnnnnnnnnnnnnnnnnnnnnnnnnnnnnnnnnnnnnnnnn

SEQ ID NO: 4657 - DNA, 1555 bp, Zea mays
  Probeset Number=SeqID_19060
aatgctgacctctaaagcataagctgatgacagagcactctccgattaatccttttgaatcaagtgatgatgaagccacgaatgttgatgatggcttactcgtgcacttgatcaaggatgtttctgaggtggattcggagacagatggtctagacactaagttatgtgatctaatggcttcatttcataaatcacgtaaaaaccggaaaaataaaaacatctttgatctaatagtaattgttggagtggaattttttccgtcaaattccatctcaacaatagggtagataatttcaaatgaagtttaatggcagtctatggccctcctcaggatgactttaaaacaacatttttgcgtagctagtaagaacttgtcaacaaaattatctgccaaccttaattgggggagattttaatatgatgaggagcagcaaggaaaaaataaaaaaaatcaataagagatggcatttcctttttaatgttgtaatagatagctttgacttacgggagattgagttaaatggaagacacttcggtcaactcattactcaatccaacatatgataaattagatagagtgcttatgtcgaccgagcgggaatttaaattcccattggtctctatccacgcgttagacagaggcgttttggatcatacgcatctttaccttgaaacaggatcaccggcctttttgggagcgtccaaacagtttcggttagaacttagctggtttgctcgtgtggacttcttcaaaaaggtggtctatttgtggaataaaccagtaaaagccaacaactatgtacaacgttggaacggcaagcttggcgccctacgaagctttcttcgagggtggtcacgacatgccaacggggacaacaatattaggtactttcagacgattactaacgacaaacatggaaagaaactaatccgctccttagaccatgatgggggaaaattgaaggacatacaaacctcgagatctacataactgagttctataaggagatttttggtgaacctttggatatcaacatatcccttgatgaggaaaacattcagaatattccacatgcctcgccctcggaaaatgaaatcctaacatctccattcacaattgaggaggtaaaagaagctattttcggaatggaaaaaataaagcactagggccggatggcttttctacggaattctataaaaaattctgggaaacaatcaaaggtgatattatactcatgttcaaagacctgtaccatggtaatttacctatatttagtttgaattttggcgtgataaccctaatacccaaaatctaagaggccaatgtcatacaactgtatagacctatttgcctacttaatgtgagtttcaagattttcacaaaagtatcaatgaatagactgaatatggtggccaacaaagtgataaacccaactcaaatagccttcatgcgtggacggaacatcctggaggtgtcgtcatactacatgaagtggtgcacaaaatgctaaaaagtaaataaaataaaataataaaaaaaataaaaaaaacagaa

SEQ ID NO: 4658 - DNA, 3205 bp, Zea mays
  misc_feature (1)..(955): n is a, c, g, or t
  misc_feature (3205)..(3205): n is a, c, g, or t
  Peptide Sequence Number=SeqID_10671
  Probeset Number=SeqID_19061
nnnnnnnnnnnnnnnnnnnnnnnnnnnnnnnnnnnnnnnnnnnnnnnnnnnnnnnnnnnnnnnnnnnnnnnnnnnnnnnnnnnnnnnnnnnnnnnnnnnnnnnnnnnnnnnnnnnnnnnnnnnnnnnnnnnnnnnnnnnnnnnnnnnnnnnnnnnnnnnnnnnnnnnnnnnnnnnnnnnnnnnnnnnnnnnnnnnnnnnnnnnnnnnnnnnnnnnnnnnnnnnnnnnnnnnnnnnnnnnnnnnnnnnnnnnnnnnnnnnnnnnnnnnnnnnnnnnnnnnnnnnnnnnnnnnnnnnnnnnnnnnnnnnnnnnnnnnnnnnnnnnnnnnnnnnnnnnnnnnnnnnnnnnnnnnnnnnnnnnnnnnnnnnnnnnnnnnnnnnnnnnnnnnnnnnnnnnnnnnnnnnnnnnnnnnnnnnnnnnnnnnnnnnnnnnnnnnnnnnnnnnnnnnnnnnnnnnnnnnnnnnnnnnnnnnnnnnnnnnnnnnnnnnnnnnnnnnnnnnnnnnnnnnnnnnnnnnnnnnnnnnnnnnnnnnnnnnnnnnnnnnnnnnnnnnnnnnnnnnnnnnnnnnnnnnnnnnnnnnnnnnnnnnnnnnnnnnnnnnnnnnnnnnnnnnnnnnnnnnnnnnnnnnnnnnnnnnnnnnnnnnnnnnnnnnnnnnnnnnnnnnnnnnnnnnnnnnnnnnnnnnnnnnnnnnnnnnnnnnnnnnnnnnnnnnnnnnnnnnnnnnnnnnnnnnnnnnnnnnnnnnnnnnnnnnnnnnnnnnnnnnnnnnnnnnnnnnnnnnnnnnnnnnnnnnnnnnnnnnnnnnnnnnnnnnnnnnnnnnnnnnnnnnnnnnnnnnnnnnnnnnnnnnnnnnnnnnnnnnnnnnnnnnnnnnnnnnnnnnnnnnnnnnnnnnnnnnnnnnnnnnnnnnnnnnnnnnnnnnnnnnnnnnnnnnnnnnnnnnnnnnnnnnnnnnnnnnatatcagtggatcgtgctaaagttaaggagataatggagtggagagtacccactacagtgactgagattcggagtttcttgggattagcaggatattatcggagatttattgaaggattttctaagattgctaagcctatgacttcgcttctggagaaaggaagagaatttaagtggaacgagaaatgccaagatagctttgaacaattaaagaagaggttaatgtcaccaccagtgttggttatgccagatctacagaagggattcaatatttattgtgatgcatgtggccaaggcttaggatggacgctcatgcaagaaagacatgtgatcgcctacgcgtctcgtcagttgtggaaacatgaattgaactaccccacgcatgacttggaattggcagccgttgtgcatgcgcttaagatttggagacactatatcatggggaccaagtgccaagtatacacggatcataagagtttgaagtatatattcactcaaaaggatctcaaccttaggcaacgccgttggttggagcttattaaggactacgacttggagattcactatcacccgggcagggcgaatttggttgcagatgccttgagtcgaaaggagcatgttcattcagctattgttgcccagctacccgatgagattgttgaagatttcaggagacttaacctggggatagttgctcacactgaaggagttattattgatgtggaacctactttggagcaagaaatccgcaaaggacaaaatggtgatgctaaaatacaagagattaaggatctgattactgagggtcgaggtccggaattcacggaagatgagcaaggcactgtatggttcaaggacaggatgtgtgttcctgatattgaaagccttcgagagactatattgaaggaggcccatgactcggattattctattcatcctggtagtaccaagatgtatcaggatttgaagcgaaaatattggtggtatggattaaaaagagatgtggctgcacatgtggctatgtgcgatgtatgtcaaagagttaaggctaaacaccagaggccagatggactattgcacccactgaagatacccgagtggaagtgggaagagattggtatggatttcattactggattgcctcgcacccagaaaggatatgatgttatatggactgatggacagactgaaaggacaaatcaagtattggaagatatgttgagagcatgtgcccttcagcatggaggaagttgggataaaagtctaccgtatgctgagttctcatacaacaatagttatcaggccagtctgaaaatgtcaccttttgaagctttatatgggaggaagtgcaggactcctctatattgggatcagactggagagagacaattctttgggcctgaattgattcaagaagcagaagaacaagttcgtataattcgagagaatttgagagtggctcaaaccaggcaaaagagctatgctgataatagaagaagaccactggaatttgaggaaggagactatgtgtacctcaaggtgtcaccactgcgtggaatgaggagatttaaagtcaagggcaaattgtccccatgctatattgcaccattcctgatctttaggcgagttggggagatggcataccaactcgagttacctgctactttatcggatgtgcataatgtgttccacgtatctcaactgaagaagtgtctccgtgttcccgaggaacagttacccatggaagagctcagtgttcagggtgatttgacttacacggagtaccctatcaagattttggatacattgactcgagttacaagaaataagtcccgcgcgcgcctgtgcctcctcctcgccactgaccccgggggcccgcttgtctggctgcgttttcttctccccgtcgctggcgaatgggacctgggcgccagatccgtcctcaacgaaatcgccgagaatggcggactgatgcgcggagctgttggagtcttccgtgatcctcgcagtagagctagcaacgaccaattccacggagccctagtccatataatggcttgcctggtcgcttcggcgccgttgggagattccggttgggcttcacagcgcgccgccatcggtccactcctcggcgaactctcggcgtgcgtctacgtcggcaacagagaagagcccgtgaccgaggatcctggtgagcagcaggttgaagtagctaagcaggagctcattgaaggcaagttgtgcccttgn

SEQ ID NO: 4659 - DNA, 566 bp, Zea mays
  misc_feature (79)..(79): n is a, c, g, or t
  misc_feature (154)..(154): n is a, c, g, or t
  misc_feature (181)..(181): n is a, c, g, or t
  misc_feature (205)..(205): n is a, c, g, or t
  misc_feature (228)..(228): n is a, c, g, or t
  misc_feature (268)..(268): n is a, c, g, or t
  misc_feature (283)..(283): n is a, c, g, or t
  misc_feature (289)..(289): n is a, c, g, or t
  misc_feature (291)..(291): n is a, c, g, or t
  misc_feature (317)..(317): n is a, c, g, or t
  misc_feature (336)..(336): n is a, c, g, or t
  misc_feature (339)..(340): n is a, c, g, or t
  misc_feature (344)..(344): n is a, c, g, or t
  misc_feature (346)..(347): n is a, c, g, or t
  misc_feature (352)..(353): n is a, c, g, or t
  misc_feature (355)..(355): n is a, c, g, or t
  misc_feature (358)..(358): n is a, c, g, or t
  misc_feature (361)..(362): n is a, c, g, or t
  misc_feature (365)..(365): n is a, c, g, or t
  misc_feature (367)..(369): n is a, c, g, or t
  misc_feature (374)..(374): n is a, c, g, or t
  misc_feature (380)..(381): n is a, c, g, or t
  misc_feature (387)..(387): n is a, c, g, or t
  misc_feature (396)..(397): n is a, c, g, or t
  misc_feature (400)..(404): n is a, c, g, or t
  misc_feature (406)..(427): n is a, c, g, or t
  misc_feature (430)..(433): n is a, c, g, or t
  misc_feature (435)..(437): n is a, c, g, or t
  misc_feature (439)..(440): n is a, c, g, or t
  misc_feature (442)..(442): n is a, c, g, or t
  misc_feature (444)..(448): n is a, c, g, or t
  misc_feature (451)..(455): n is a, c, g, or t
  misc_feature (458)..(468): n is a, c, g, or t
  misc_feature (471)..(566): n is a, c, g, or t
  Peptide Sequence Number=SeqID_10672
  Probeset Number=SeqID_19062
aattttttcgaaccggccgccgcccccagtccccgaatccgaaagcttggtggcctcggtaaccattttcgattcaatnggcgccgaacgtcgaaagctggtcgacgggcatcaagcgggggcttcgcgggtcgcacagttacccatcggcggnggggctgtggggccataagggcccaanaaacggggggcggccttccccaanggccgacaaggccggccggccgncgggggaaacccaagttctaccctgggccgaacgacgtcnaaggccccggggttnccaggnancccgcaaggcctaagcctaacaaggntcaaggtcgagcatcacgnccnngggnannggggnntnatnccnnccncnnnagggngctttnntggggnaaaaaaaannggnnnnntnnnnnnnnnnnnnnnnnnnnnnggnnnngnnncnntntnnnnnggnnnnnttnnnnnnnnnnnggnnnnnnnnnnnnnnnnnnnnnnnnnnnnnnnnnnnnnnnnnnnnnnnnnnnnnnnnnnnnnnnnnnnnnnnnnnnnnnnnnnnnnnnnnnnnnnnn

SEQ ID NO: 4660 - DNA, 443 bp, Zea mays
  Probeset Number=SeqID_19063
ggccccgggcaggttgtctggttccccccggagtcccgcattggccgcaacccgctagtcgtatagctagtccaagggcgccccgagatcgaaggttcggaaagcatcaaccaggcggagggtgccaaaaggaccaaggcggcgtggggtggagagcgccggggccaaccacgcccgggaaagcctcaaggagaccgccaacgacccgctcgaaaagtactgcaaggccaacccgggctccgaggagtgccgcatcacgacaacaagctatagtggtagctatatagggcgtggatctccggccgtggaatgtactctcgatcggcgggtcctacgtggaactctcttcgttcaagccagagcagcaccctctcgtatgatatgatccaccgctgggatggtatactgatattttgggttaatttcatgtgccaagcgtgttt

SEQ ID NO: 4661 - DNA, 512 bp, Zea mays
  misc_feature (28)..(28): n is a, c, g, or t
  misc_feature (33)..(33): n is a, c, g, or t
  misc_feature (40)..(41): n is a, c, g, or t
  misc_feature (45)..(45): n is a, c, g, or t
  misc_feature (55)..(56): n is a, c, g, or t
  misc_feature (87)..(87): n is a, c, g, or t
  misc_feature (89)..(89): n is a, c, g, or t
  misc_feature (96)..(96): n is a, c, g, or t
  misc_feature (98)..(98): n is a, c, g, or t
  misc_feature (113)..(113): n is a, c, g, or t
  misc_feature (124)..(124): n is a, c, g, or t
  misc_feature (133)..(133): n is a, c, g, or t
  misc_feature (155)..(155): n is a, c, g, or t
  misc_feature (168)..(168): n is a, c, g, or t
  misc_feature (171)..(171): n is a, c, g, or t
  misc_feature (174)..(174): n is a, c, g, or t
  misc_feature (179)..(179): n is a, c, g, or t
  misc_feature (194)..(194): n is a, c, g, or t
  misc_feature (201)..(201): n is a, c, g, or t
  misc_feature (225)..(225): n is a, c, g, or t
  misc_feature (227)..(227): n is a, c, g, or t
  misc_feature (236)..(236): n is a, c, g, or t
  misc_feature (242)..(243): n is a, c, g, or t
  misc_feature (256)..(256): n is a, c, g, or t
  misc_feature (269)..(269): n is a, c, g, or t
  misc_feature (279)..(279): n is a, c, g, or t
  misc_feature (284)..(284): n is a, c, g, or t
  misc_feature (294)..(294): n is a, c, g, or t
  misc_feature (310)..(310): n is a, c, g, or t
  misc_feature (319)..(319): n is a, c, g, or t
  misc_feature (339)..(339): n is a, c, g, or t
  misc_feature (349)..(349): n is a, c, g, or t
  misc_feature (402)..(402): n is a, c, g, or t
  misc_feature (431)..(431): n is a, c, g, or t
  misc_feature (433)..(433): n is a, c, g, or t
  misc_feature (436)..(436): n is a, c, g, or t
  misc_feature (438)..(438): n is a, c, g, or t
  misc_feature (450)..(450): n is a, c, g, or t
  misc_feature (511)..(512): n is a, c, g, or t
  Peptide Sequence Number=SeqID_10673
  Probeset Number=SeqID_19064
accgagagaggataccaaggcactccgnttcgnggatgcnnatcnattccattcnnttccatactaaggctaggcacaagcgaaccntncccatgntngtccgacggcagcgncgtggtgacgntgtacggcngcaacggcgcgtcagctgctgnagccgtctcagcngcncangtcgncgactttctccgtcnaggtggngctgacgcagatgctccggggcgncntcatcatgnacgtgnngacccccgagcangcgcgcctcgcgnaggaggccgncgcgngcgccgtgangacgctggagctgctntccccgccnacatccgcgcgtagggcgangtgtcgcgcntgtcggacccgggcctcatccagcgacatcaagcgcgccgtcaccatcccggncatgttccaggtccgcatcgagcacttcntnggngncccagatcctgnaggccgtgggcgtcgactacctggacgagagcgaggtgctgacccccgccgacgacgcgcnn

SEQ ID NO: 4662 - DNA, 515 bp, Zea mays
  misc_feature (94)..(94): n is a, c, g, or t
  misc_feature (195)..(195): n is a, c, g, or t
  misc_feature (217)..(217): n is a, c, g, or t
  misc_feature (231)..(232): n is a, c, g, or t
  misc_feature (242)..(243): n is a, c, g, or t
  misc_feature (252)..(252): n is a, c, g, or t
  misc_feature (254)..(254): n is a, c, g, or t
  misc_feature (260)..(260): n is a, c, g, or t
  misc_feature (265)..(265): n is a, c, g, or t
  misc_feature (280)..(280): n is a, c, g, or t
  misc_feature (283)..(283): n is a, c, g, or t
  misc_feature (301)..(302): n is a, c, g, or t
  misc_feature (315)..(315): n is a, c, g, or t
  misc_feature (324)..(324): n is a, c, g, or t
  misc_feature (326)..(327): n is a, c, g, or t
  misc_feature (340)..(341): n is a, c, g, or t
  misc_feature (344)..(344): n is a, c, g, or t
  misc_feature (354)..(354): n is a, c, g, or t
  misc_feature (356)..(357): n is a, c, g, or t
  misc_feature (362)..(362): n is a, c, g, or t
  misc_feature (367)..(367): n is a, c, g, or t
  misc_feature (387)..(387): n is a, c, g, or t
  misc_feature (389)..(389): n is a, c, g, or t
  misc_feature (399)..(399): n is a, c, g, or t
  misc_feature (405)..(405): n is a, c, g, or t
  misc_feature (407)..(407): n is a, c, g, or t
  misc_feature (410)..(410): n is a, c, g, or t
  misc_feature (418)..(418): n is a, c, g, or t
  misc_feature (421)..(422): n is a, c, g, or t
  misc_feature (425)..(426): n is a, c, g, or t
  misc_feature (428)..(429): n is a, c, g, or t
  misc_feature (431)..(431): n is a, c, g, or t
  misc_feature (433)..(433): n is a, c, g, or t
  misc_feature (437)..(437): n is a, c, g, or t
  misc_feature (445)..(445): n is a, c, g, or t
  misc_feature (454)..(455): n is a, c, g, or t
  misc_feature (457)..(457): n is a, c, g, or t
  misc_feature (462)..(462): n is a, c, g, or t
  misc_feature (464)..(466): n is a, c, g, or t
  misc_feature (468)..(468): n is a, c, g, or t
  misc_feature (471)..(472): n is a, c, g, or t
  misc_feature (479)..(482): n is a, c, g, or t
  misc_feature (491)..(491): n is a, c, g, or t
  misc_feature (493)..(493): n is a, c, g, or t
  misc_feature (495)..(497): n is a, c, g, or t
  misc_feature (505)..(505): n is a, c, g, or t
  misc_feature (507)..(508): n is a, c, g, or t
  misc_feature (513)..(515): n is a, c, g, or t
  Peptide Sequence Number=SeqID_10674
  Probeset Number=SeqID_19065
gatttcgattctttctttttcccccacgtgcgccgccgcgaccttcctcgatcccatctcccaacgcccccgcctcgcctcgggatcccgccgncgctccatctggctttggtccccccacccgcaggcagcgagcgacagcgaacggcgaagggatggccaagggccaggtccgtttggcgaaacaaaaagcanggggcaagcaaattcaaacggngggggggggggccnngggctggtcnnccaaagttngncccggnaaccncgcaccccggaaggnccncccttggaaaaaagaccnnaattggttggganaggggggancnnggtattccccccnnagngggggggggntnncatanagggncccttgttttttgggggaancncccccccccncttctngnggncccccctnggnnttnngnnanantttnttaggggnccccccccnnanggggngnnntnttnntgggggnnnnaaccccccncntnnnggggaaangnngggcnnn

SEQ ID NO: 4663 - DNA, 335 bp, Zea mays
  Probeset Number=SeqID_19066
acaaacgcgaccctacctccaaggaaaaaaaaagatcagcaagccaacacgcggacacgacgctttcctcgattgcttccaccgtattgtggaaggctcctctccagattccactctcgtcttcttctgcggctcgggctcggctggcttggcttcctcagccacttcattcaccttgggcgcttcgaccggaggtacctacgacttgaccttctcagccggggcatttgcagccacctaggccttgggctccttcgccgtagacttcgacttaggctctcctttggccggatcctttgtctaggatagttgcggctacgcctactctgccttgg

SEQ ID NO: 4664 - DNA, 806 bp, Zea mays
  Peptide Sequence Number=SeqID_10675
  Probeset Number=SeqID_19067
attcccgaatgctgaccctgctactgttttaccacccctgtgcagatctttttctcctctttactcttctcctaaactcatgccccaatgcatactgctttcccttcttttacctgtcctgacaagcctacgattttgctcctgtggtgcatgacccttttaagcggttactaatactctactggactttagaatatttctactatactttcccatccatacatagaccgctgatgcactactgctacgaccgctccgacttcatgtctgtgtcttcgcataccgagaggcaccaccacctaaaacttgttctatgtcgacctgcaccattatggtcccatgctctcatgcccgcatggacactgctgatgatagggcacatcgcctatcctgttggccacgacgcgtcgttatctgcggagctgtacaagcctaatctgtcctaagcgctcatagacaacttgtcaccgattgggccattcaccgttcccagctcactcattataactgcaccctgctccaaagcttgacacctaggacatggagattactctgcctcacccatgagagcttttcccttgatgcatactcttggagtcccctatgcatgcgagcttactatcccagtactgcagagctgactacatgaaacttgaggggtgccccccttccatcacctgctgcgccgcccccccgctcttgacggcctgctcctgcggacccagtgggatctctgccgtcgcttatggccggccggaaccgtgtaacgcaccccaggatttccccccccttggaaatcctcgcaa

SEQ ID NO: 4665 - DNA, 926 bp, Zea mays
  misc_feature (2)..(2): n is a, c, g, or t
  misc_feature (13)..(13): n is a, c, g, or t
  misc_feature (17)..(17): n is a, c, g, or t
  misc_feature (19)..(19): n is a, c, g, or t
  misc_feature (34)..(35): n is a, c, g, or t
  misc_feature (40)..(40): n is a, c, g, or t
  misc_feature (47)..(47): n is a, c, g, or t
  misc_feature (53)..(53): n is a, c, g, or t
  misc_feature (71)..(71): n is a, c, g, or t
  misc_feature (78)..(78): n is a, c, g, or t
  misc_feature (80)..(80): n is a, c, g, or t
  misc_feature (84)..(86): n is a, c, g, or t
  misc_feature (88)..(88): n is a, c, g, or t
  misc_feature (94)..(94): n is a, c, g, or t
  misc_feature (96)..(96): n is a, c, g, or t
  misc_feature (100)..(100): n is a, c, g, or t
  misc_feature (107)..(107): n is a, c, g, or t
  misc_feature (452)..(452): n is a, c, g, or t
  misc_feature (551)..(551): n is a, c, g, or t
  misc_feature (610)..(610): n is a, c, g, or t
  misc_feature (797)..(797): n is a, c, g, or t
  misc_feature (833)..(834): n is a, c, g, or t
  misc_feature (845)..(845): n is a, c, g, or t
  misc_feature (847)..(847): n is a, c, g, or t
  misc_feature (867)..(867): n is a, c, g, or t
  misc_feature (902)..(902): n is a, c, g, or t
  Probeset Number=SeqID_19068
anagaggagtagntgcnangataaattattattnntatcnaattttntccatnttacaacattatattttntctcccngntctnnncnctatananaatnaataatnaggtgtttagtcctcttcctgaactttgcctcttcggcttttgctcccccgcccccgggcggctcccatcttcgatttcctagggtgttgggcgttcataaatcgtgggtttcagtgtgctttacgatgctcttaagaggttgtacgatgccgagatgagaggggggaggcaagtcatgatcaggccttcctctaaagtgatcatcaagtttcttatcgtcatgcagaaacacggttccattggtgagtttgagtacgttgatgaccacaggtctggaaagatcgtggtcgagcttaatggaagacttaacaaatgtggagtcatcagtcctcgtttcgatgttnggagttaaggagattgaaggctggaccgatcgtcttcttccttccagacagtttgggtacattgttcttacgacctcggctggtattatgggaccacgnaagaagccaggagaaagaatgttggtggcaaggttcttggcttcttttactgaatcaangtcttgaagaagagaatcattatggttggggatactttgcttctcccttttggtgagaaggaggattcccgattgagctaaatggtttaagggtagcagaagtttttgaggccttcctctggttgggtatctttagatgatatcccattttggtacgtttgggttttgggcacaagttgtgggagancagctgggtagccggcagcccccccttctgttttcnncaacaaaaaananttgattttcttgagccaatnttatctatcgagacgtttcaatttcaaaaaaaaanaaaaaaaaaactcgaggggggccc

SEQ ID NO: 4666 - DNA, 1680 bp, Zea mays
  Peptide Sequence Number=SeqID_10676
  Probeset Number=SeqID_19069
gggcgattcaatgactgcctaacttcaaggtcacaaacgtcgataattttgagctcaagcaagactcaggtggctggttagccgtgtatacgaccaccgcccaggccaccggggcaatagaggatgtcatgatagtgtacctgcccatcgttcttgggtaggactcgttgcagtggctctgacacctaccctaccattacattgatgactaggccgatttttgccaccggtttgtcacgaatttcaaatccctttctaacaagctagcgcgatcctgggacctcaaatccgtcaagcgccaaagtgacgagtccctccgctcgttcctgaagcgtttccaaactatgatgaatcgtatccctgatgtcactgaggtcgtattgatctaggacttcaatcgttgatctaatgactcagctttcgtctgagccatcctccagaaagctctaaccacctcggaacaactcttccgagaagcagacatctatatcaccaccgacgagcgggtggtcgtgggcgcgtccacagtggagagcgcgagcggttcggggggaacagttctgaaaggcgggacccatgggtcagagagggagctagcgagcgaacgggcttctgcgctgatgagcggggctcgcggatcagcgagagagggcatgcgtgcacggacactagatgagaaccttgacgcccagtgcccataccataaggagatgtgccacaccctgtgtaattgcagtgacttcaaaaactcagtcggcaacgaccgaccattccaacagcttctgccacctctaacatgaagggagcaagctaaacaaaaacaactgtcacaataggaaggaagtggtggcaatgccttcctgcgcattgacatggaggtcaatgtcatcttcgggggccatgggtcctaggagaacaacaggtagcagaagctaaccaatcgacaggtcctggtgacaacccacagtattctaacaccatattggtggtcggagcactccatcacgttcagccaagtcgatcaatggcttaacttcgatcacctcggcaagtaccctctgcatgtcgatccctcgatccaagaaagtcaggtcaagaaagctctggtggatgggggcagtgtaacacctcaggtgttacttaggaacacaccaggccctcaggatcccgatactaacctcattaagtcgaatacccctttcttcggcatcgaactgactggagagtacccgttggggcatctctacatgccggtgaccttcggcgctctagacaactaccgaaccgagttcctgtgtttcgaggtagctcgattggagtgtggatataacaccatcattgggaggccgggactggtcaagttcatggccatcccacactacccttacatgatagtcaagatgccaagacctcaaggcatcatccctgcccgggctgacttctaaggagtggcagaatgctatcgggggccatacagacgaccctcaccgctagacccttagtagcaccacgacaaccaacaacgaacgctgacacgtcaccaaggatgacctcacaatcccaacgaaagaagcgtcctctaccaccaccatgcggccagtcgaataaaccaagaaagccaacctcgacttctcagatgaacacaagacggtgatcatcatctccagccttgtcgccaaa

SEQ ID NO: 4667 - DNA, 852 bp, Zea mays
  misc_feature (1)..(9): n is a, c, g, or t
  Peptide Sequence Number=SeqID_10677
  Probeset Number=SeqID_19070
nnnnnnnnnctctctccatcgcgccggcgcgcacggctagggctagctcccggagccgccctttcatggtccccgccgtggtcgggacgagatgcctccgctcgcattcctccgccgctacctccccgcgaggcttctcgcgcgagcgtgcgatggtggagtccgggggagcccgggcgtggcgcgggacgaggaggccggaggcagcggcggactgagcggccggtcggcgggggcgccgtccggggagtgctacgcgtgcacgcagcccggggtgccggcgttccactccacggcctgcgaccaggtgcactcgccggactgggacgccaacgcggggtcctcgctggtgccggaccattggcgcaggtacagggcccggacgtgggcaacggacctggcggcgcaacccgcgccgccgttggtgggcgggcccgacgacggggaccggcggctcagacactacgcggccatgttcatgtcgctacggccgcatgaccacctagagtgagcactgatgagcaggagggagggaccatcctaggctcctagctgtgccggccgcgtcatggtgactgtacagtgtgcacttaatagtatattgctgccagcttttgcgtgagtgaattagtggttccgaattgtcatttaaagagggccaataaaatggagaaataatttcttaaaaaaaaaaaaaaaaaaaaaaaaaaaaaaaaaaaaaaaaaaaaaaaaaaaaaaaaaaaaaaaaaaaaaaaaaaaaaaaaaaaaaaaaaaaaaaaaggcggccctgaaccccaactttttttttcttttagggagggtaaatggccccctgggcaaaaaaatggcaaa

SEQ ID NO: 4668 - DNA, 501 bp, Zea mays
  misc_feature (14)..(14): n is a, c, g, or t
  misc_feature (23)..(23): n is a, c, g, or t
  misc_feature (27)..(27): n is a, c, g, or t
  misc_feature (34)..(34): n is a, c, g, or t
  misc_feature (48)..(48): n is a, c, g, or t
  misc_feature (58)..(58): n is a, c, g, or t
  misc_feature (68)..(68): n is a, c, g, or t
  misc_feature (71)..(71): n is a, c, g, or t
  misc_feature (73)..(73): n is a, c, g, or t
  misc_feature (80)..(81): n is a, c, g, or t
  misc_feature (83)..(83): n is a, c, g, or t
  misc_feature (95)..(95): n is a, c, g, or t
  misc_feature (105)..(105): n is a, c, g, or t
  misc_feature (108)..(109): n is a, c, g, or t
  misc_feature (120)..(120): n is a, c, g, or t
  misc_feature (124)..(124): n is a, c, g, or t
  misc_feature (130)..(130): n is a, c, g, or t
  misc_feature (133)..(133): n is a, c, g, or t
  misc_feature (137)..(138): n is a, c, g, or t
  misc_feature (142)..(142): n is a, c, g, or t
  misc_feature (144)..(144): n is a, c, g, or t
  misc_feature (146)..(146): n is a, c, g, or t
  misc_feature (155)..(155): n is a, c, g, or t
  misc_feature (169)..(169): n is a, c, g, or t
  misc_feature (213)..(213): n is a, c, g, or t
  misc_feature (218)..(218): n is a, c, g, or t
  misc_feature (224)..(224): n is a, c, g, or t
  misc_feature (229)..(229): n is a, c, g, or t
  misc_feature (232)..(232): n is a, c, g, or t
  misc_feature (244)..(244): n is a, c, g, or t
  misc_feature (248)..(248): n is a, c, g, or t
  misc_feature (253)..(253): n is a, c, g, or t
  misc_feature (258)..(258): n is a, c, g, or t
  misc_feature (278)..(278): n is a, c, g, or t
  misc_feature (282)..(282): n is a, c, g, or t
  misc_feature (306)..(306): n is a, c, g, or t
  misc_feature (316)..(316): n is a, c, g, or t
  misc_feature (379)..(379): n is a, c, g, or t
  misc_feature (400)..(400): n is a, c, g, or t
  misc_feature (416)..(418): n is a, c, g, or t
  misc_feature (423)..(423): n is a, c, g, or t
  misc_feature (445)..(445): n is a, c, g, or t
  misc_feature (453)..(453): n is a, c, g, or t
  misc_feature (469)..(469): n is a, c, g, or t
  misc_feature (477)..(478): n is a, c, g, or t
  misc_feature (482)..(482): n is a, c, g, or t
  misc_feature (491)..(491): n is a, c, g, or t
  misc_feature (494)..(494): n is a, c, g, or t
  misc_feature (499)..(499): n is a, c, g, or t
  misc_feature (501)..(501): n is a, c, g, or t
  Peptide Sequence Number=SeqID_10678
  Probeset Number=SeqID_19071
attacttattatcnccatcgcgngccnctctgcntgtccctgctcctncgcctccttnttgatagacncangncaggganngncatgtcttggtngataggaganccnnttcgaatctanggcngacgcngcnacgnncaanancnacccgcagnaggctggcaccgtncgtaagaacgggttcatcgtcatcaaaaaccgcccctgcaaggntgtgnaggtgntctanctnttttgactggcnatcngggcnatgtnaaatggctgtttgttgcccncccncctattcaacggggaaaaagctcnaaaaatattngttccttcgtcacacaactgtgatattccgcatgggaaccgcactgagtaccacctgattganatatcagaaggatggatttgngagcccttcttacttnnnatggnaaccctaagggatggatcttanactcccanttgatgagactccttngggcccannatcnaggaagggnttngaaangn

SEQ ID NO: 4669 - DNA, 505 bp, Zea mays
  misc_feature (444)..(444): n is a, c, g, or t
  misc_feature (460)..(460): n is a, c, g, or t
  misc_feature (478)..(478): n is a, c, g, or t
  misc_feature (487)..(487): n is a, c, g, or t
  misc_feature (494)..(494): n is a, c, g, or t
  Peptide Sequence Number=SeqID_10679
  Probeset Number=SeqID_19072
attttctccaaaggacaaagccacagagtcctcttctccaagccgcgttcctactccctctccctgctgatctcgcagcggccgtcgaggctcctcccagcctccagctccactcgtcggacgccggccactctcttccctacgcggcgctcgacccccacgctcagagcccaggtgagcaggcgcccggggccgcacgagcagccctccgctgggctccctccactatgcacggtctgcactggtaacttttccccatggccatcggctcctcatcagcatgccctgctcctctcctctctgctcaacgcagcagactggccgagtttgcccaggcctccatcgctgtcggactccatcgcgcagcaggtgttcgacaaaaagtccagtcccaggattccgactcagcctccaccctgccgtcgttgaaggtccgtatatggnctcacttttgctaaanctcatgctagatcaaggntaggtaccnccaatangagaagcatga

SEQ ID NO: 4670 - DNA, 838 bp, Zea mays
  misc_feature (541)..(541): n is a, c, g, or t
  misc_feature (601)..(838): n is a, c, g, or t
  Probeset Number=SeqID_19073
aactcctttcccccctccagttccaactttattgtgtttaaacatccacctccgcctccccggacttcaacatcaccttcgcggagcccgcgccgtccaaaaaggccccgtccgcgcagccgctggtcccgtggatcgtccgcggggaggacggcaagccccgcctcagcacctccccgccgccggacgtaatccaggccatcgcgctcgcggaggcggaggccaagaaggccgccaacaaggaaaccctcaagggccagaatggccagttgccgccgccgccgcggctgcttccaatgccagcgtcaagggcaaggaaaggaagcccgccccgaaccgtgccgcccaagttctccaaggcagaacaggaggttttacaatgagaatatccaggagcgggagccgcaacgcctcgccaaggtccttgagactgcaggagtggcatcaagaagggccagtgaggagctcatcttacaagggaaggtgtctgtcaatggttcagtctgtacttctcctcagagcaaagttgacatctcaaagngattctatattcgttgacagggatgacgcatttctcatagaagttcgcttcaaatgcatnnnnnnnnnnnnnnnnnnnnnnnnnnnnnnnnnnnnnnnnnnnnnnnnnnnnnnnnnnnnnnnnnnnnnnnnnnnnnnnnnnnnnnnnnnnnnnnnnnnnnnnnnnnnnnnnnnnnnnnnnnnnnnnnnnnnnnnnnnnnnnnnnnnnnnnnnnnnnnnnnnnnnnnnnnnnnnnnnnnnnnnnnnnnnnnnnnnnnnnnnnnnnnnnnnnnnnnnnnnnnnnnnnnnnnnnnnnnnn

SEQ ID NO: 4671 - DNA, 941 bp, Zea mays
  Peptide Sequence Number=SeqID_10680
  Probeset Number=SeqID_19074
ccggggtcggcgaattcccgccgcggccaaggcaggttcgttgggcgcccaccccgattcggcctccccgcaacatcgccctcgggcactggctcgccgcaccacggcgtgcgcgcgttcgccccgctcagcccgtcccgggcagtggagctcggagccgaacaatcaggattaccgctacgacctggcgaccaccctccacgcccaggaggaactggaggccgcccagcgccagttggaagaaatcgtccagcgcaacccggccaatcgcaaggcgcgggtcttgctggtcaattactggaaggaaaccggccagttgcagaatgtgcaggtgctgctggcgcagcttgaacagcagaacccggacgacccggcgctgcaacaaggcctgtaaacgctgcaattgatacaaaacgttgaaccgccacacaccgctacggtcaagtaaatatggcgcgccccagacggcgctgccgactacttatttgtgacccgagggcacttcttgtctacatccaaagagctgttcacagcaaaggcggccaccggtattgaaggtctggacgacattcttgccggggggctttcccgtagccacttgttcctgctggaaggtgaacccggcaccggtaaaaccaccgtggccctgcatttcctccagtctggggcaaaaaacggcgaacgatcgctgtacatcaccctgtcggaaaccgagcgcgagttgcgtcagggtgccaagtcccatggctgggacctggacgaacacattcacatctttgaactgaccccgccggaaagcctgctcaacgccgagcaccagcaaagcctcctgtattcctcgaccttgagctgggcgaagcactcgccagatcttcgaagtggtggaacgggtcaaaccgacccgcgtcgtcatcgatagcttttctgagatccgcctgctg

SEQ ID NO: 4672 - DNA, 416 bp, Zea mays
  Peptide Sequence Number=SeqID_10681
  Probeset Number=SeqID_19075
atgatcgcgattcgcgatactgtgcaggtggcacgcacgagcggtcaacaaatgtgtgatcgagcccgagcacgatggatctatctatcgcactggtttttttttgcattgctctgcctccgtgtaaagaaagatgtggcgcacgcgacaaacgtctttgacagcctgatctgtctgatggtggtaggtggaatctgcgctcacagccagaaggtgacagcgccaaaagccagggaatccacgcgggccgcgccgcggcattttggcgcagctctgatctgctcaccacggcgcggcgcggcgcggcgcgacgcgacagacagctcacaggagtttcgtcgcactggaacacttggccgcagcagcgggatgcgcggccagctggcgattactgtcccatcaccatcaaggcctca

SEQ ID NO: 4673 - DNA, 441 bp, Zea mays
  Probeset Number=SeqID_19076
ttatcctccgagtagaggaacattttcgccgagggcaatttcaggggggaagggggggggaacccttccaaagtttgggggcgggggccctttggttaacaaaaaaatgtttggattttccaagaattttagcatgtttttttcgtgggttttccccttgaatttccccttttttgttttgggggccggttccctgggggttcaattctatgaaggcccacaggctttgtgccagctgcaagaattcatccccagtcgagtcacgaaaatggtttgcgtgttggctatgtcgtgtaagcttattcagttattcttggtggtttgggtcggtaccgtgtcattccccgtttaggtagctctgtaatctactattctcatgtgtgttgccttccaatcagtaatagtaatcagcaattgtctgccaaaaaaaaaaaaaaaaaa

SEQ ID NO: 4674 - DNA, 808 bp, Zea mays
  misc_feature (5)..(7): n is a, c, g, or t
  misc_feature (12)..(16): n is a, c, g, or t
  misc_feature (19)..(22): n is a, c, g, or t
  misc_feature (34)..(34): n is a, c, g, or t
  misc_feature (808)..(808): n is a, c, g, or t
  Peptide Sequence Number=SeqID_10682
  Probeset Number=SeqID_19077
ccccnnnccccnnnnnaannnnaccacacctaanccctgttttcctcccctgaatgagggggggcgccatattcggatttgcacgcaagcaaggcggatacaaggatgcgaggtcctgtgggcgcaattccattcgactcaatttccggtgtcagaagagcaggagaacaggcttacaggcgccgcagacgagacaagcgaaggagaaaatcgaacctgaggcataagccggcgaggcggccgggcgcgcggccgctggccgtgatcgaggcgcacggcctcctcacactcgcggaacgcttctgctaggcgcccgagcccgatgagacgtcggcggctgcggctgccgcggcacgcgccgccggcccgccgccgcgccacggcccgcccccggtcgccccgcgccgccgcgcggcgcccccgcccgttcgctcgatccccccccgcgtccgcgcctcccgcccaccgccctgggccgccgcccctcgcgcgggcccggcccggccccgccgcgccccgccgcctccggcacgccccgccccgcccgggaaccccctggccccgcccgcccttgcccccccccctcgccgccccccgcccgcgcccgggcggcgcccccgccccccctggccgccacccgcgccagactcccccgccgacgcgccccggctggcgttggttgtcgcccccccccccccccgcccccggcatccacgaacctgcatccgggggccgggcccgagcgcgcctttcctcatgtgcgatctagccagcaagcccccgtcaccaggcaccccggaggacatan

SEQ ID NO: 4675 - DNA, 685 bp, Zea mays
  misc_feature (33)..(33): n is a, c, g, or t
  misc_feature (601)..(685): n is a, c, g, or t
  Probeset Number=SeqID_19078
ccattctgaggtgctgaacctcggggcaacaanaccgaagctggtagggacttcaattggagaactggggttcaagcatgtagaattttaaaatcggttcatttgtctggacatcttatgttccagttttgtgaccgcaaaaaaaaaaaaaaaaaaaaaaaaaaaaaaaaaaaaaaaaaaaaaaaaaaaaaaaaaaaaaaaaaaaaaaaaaaaaaaaaaaaaaaaaaaaaaaaaaaaaaaaaaaaaaaaaaaaaaaaaaaagggggggccgtttttaagaggatccaagtttacttccccgtccttgcaacgtaaaagttttttttaagggcccccaaaattaaattaactggccgtggtttaaaaacgtcggaactggaaaaaccttggggttcccaaattaaatcgctttgaaaaaaatccccttttccccagttggggtaataccaaaaaggcccgcaccaatcgcctttccaaaaatttgcccaccctaaatggcaaatggaaccccccttgtagcggcccattaagcccggggggtgtgggggttacccccaaggtgaccgttaaatttgcaagcgccttaacgcccgttcttttnnnnnnnnnnnnnnnnnnnnnnnnnnnnnnnnnnnnnnnnnnnnnnnnnnnnnnnnnnnnnnnnnnnnnnnnnnnnnnnnnnnnn

SEQ ID NO: 4676 - DNA, 532 bp, Zea mays
  misc_feature (518)..(520): n is a, c, g, or t
  misc_feature (524)..(526): n is a, c, g, or t
  misc_feature (532)..(532): n is a, c, g, or t
  Peptide Sequence Number=SeqID_10683
  Probeset Number=SeqID_19079
atcactcatcaattcacaccactccctttttttacaaacaaaaaaactcaaagagaaaaatatgtggggtctaaagaagttggcgcgtgttgtcttggcgcgtgtgagcgtgggggctccacacacataacgcgcggctctgtgctgtggcaccgtgagcgtctacgtggcaccgcatattgtctctctggcacagggtgcgggccccttcccaaagggtgcttgcagcggcgttactagtctaaacaacctggcccgtacaaccccagaccgtcagcaagcttgccgttgccttttggaggcgcctaacgcctcccctcttctaccacggtgcccgtgcagctgctcttcctaagacgtgtgtagtcaacactccttacatgatcagaaaaaccaacaactgcaacggtataagaggagcggcggtcggatgaagctaatgcagacgttccaagtattatgtattggatgagcgtatactaaaataagatgtccatggttgttgtttaataagatgnnncccnnngggggn

SEQ ID NO: 4677 - DNA, 292 bp, Zea mays
  Peptide Sequence Number=SeqID_10684
  Probeset Number=SeqID_19080
acgccagaaaatacaaaccagtcgaaaaaatatatgaaaaactgacgaaaaatggtttctcggtcgagaaaaccggtctccgactggttcagattgtggaggcttttaatcataaaccaataccatcaattctgcaggtcattttcagagatactcactggtttagatttggagacttctacagaaggaggaatcacaacaacaaatcctcgatgtttgtcaagcgttggaagtggtggcggcagtctttgcaaatcatggatggcgctcaaatgcaagaattgatgatggc

SEQ ID NO: 4678 - DNA, 563 bp, Zea mays
  Peptide Sequence Number=SeqID_10685
  Probeset Number=SeqID_19081
aaaaactcgtgctcgagagagatcgcatcttggctgcccacccaagcttccctttcgttcctcctcgccccagcgacgcggtactcccgtagaccgaggaaggtaacccaccactgataggcacgcacaggagcaggaagccggagaccaagatgtaccacggagctcagcggggatgacacggtccccttcttcgggttcctcggcgccgtcgccggcctcgatcttctcatgtatgggcgcagcggacggcaccgctaagagcggcgccagggcgacgacgatgggtgtgatgaggccggagatcgtcatgaagtccatcgcgaccgtgatcatggctggggtgctcgctatctacgggctcatcatcgccgtcatcatcatgactgggatcaaccccgaggccaagccctactacctttttgatggctacgatcacctttcggccgtcctcgacggcgccctggctgggcccccggttgggatgggcatcggaattgctggtgatgctgcaatcatggcgaatgcacaacagacgaagctttttgtgaccatgatcctca

SEQ ID NO: 4679 - DNA, 284 bp, Zea mays
  Peptide Sequence Number=SeqID_10686
  Probeset Number=SeqID_19082
acttacaaagcttttataagattgatgccttctataggttaactgcacaacgatggactgttccatttgttgacatgtgattttacagtcaccattttatgctgctgattttcatgggttgcagcgatttgttcctgtgccacaactattttctatgatcgaattaccatcgtttttacgacgaaaatagccttactggataacaaaatgagacaccgatacacaaaaaactcgggggggaccccggcacccaattcgccctaaactgagccacattacaattg

SEQ ID NO: 4680 - DNA, 682 bp, Zea mays
  misc_feature (682)..(682): n is a, c, g, or t
  Probeset Number=SeqID_19083
cagtaaagaccagccattacaaacattcaacctctagaaacagtcctacgtggccgcatgtgccgctatgtacgacaagctccggcgcagccgtcgcttgtacgcggtgcagcgcggttgctccgcgctgtccatcgtcaagcaaggggacctcatggtcgtcgccaacgtcggcgactctcgggttgttctgggcatcgcattcgacgacgacgccatcacgtcatccagctcatcgtccacctgaagcccaacctgccacttaaggagtagcgcatctggtggtgcaacggccaggggtactaccttactgatgagcccagggtgcacttcgttttacaactcaaccaagagtcatcagtactcggtatgtcgcgcgcgttcgacgactactatatcgagaaccgtgtcatcatcttgacgcaggaggtgacgcagaggaggaccgataacaatgaccagttcgtcatcctcgccaccgttggggtaacttttattgtaacaaaggcatcaaccggatcgaagctagaaaccgaaggcaggaaaagagaaaagctccggagctcctggttcaggatgatgtcgatgcagagagtaaggggctggaagccatccagaggcacatgaagatacaaaagcagaaactgcttcaggctgctcaacttcgaagacagatagatgn

SEQ ID NO: 4681 - DNA, 508 bp, Zea mays
  misc_feature (122)..(122): n is a, c, g, or t
  misc_feature (203)..(203): n is a, c, g, or t
  misc_feature (214)..(214): n is a, c, g, or t
  misc_feature (223)..(223): n is a, c, g, or t
  misc_feature (229)..(229): n is a, c, g, or t
  misc_feature (235)..(235): n is a, c, g, or t
  misc_feature (257)..(257): n is a, c, g, or t
  misc_feature (321)..(321): n is a, c, g, or t
  misc_feature (336)..(336): n is a, c, g, or t
  misc_feature (343)..(343): n is a, c, g, or t
  misc_feature (355)..(355): n is a, c, g, or t
  misc_feature (367)..(367): n is a, c, g, or t
  misc_feature (383)..(383): n is a, c, g, or t
  misc_feature (387)..(387): n is a, c, g, or t
  misc_feature (453)..(453): n is a, c, g, or t
  misc_feature (465)..(465): n is a, c, g, or t
  misc_feature (478)..(478): n is a, c, g, or t
  misc_feature (492)..(492): n is a, c, g, or t
  misc_feature (502)..(503): n is a, c, g, or t
  misc_feature (507)..(507): n is a, c, g, or t
  Peptide Sequence Number=SeqID_10687
  Probeset Number=SeqID_19084
ggtctaagtgctcgggaggcataagcaattactctgttgtcttgcattaagacacatcccatccagtactggaagcatcacaataaacctccaagggcttgggggttgtcaggttgagctanccccgggggggtggtggcatgtcgccgccctgaggggttggtatcttatctttccccccttctgcgcccattttttctacntccccctcttncttatgttnaaactnctggcnctggaccttctcccgcccccanccccggccaccatacccctcctaacctatcccccccgcctacccccccccctcaaccccccacntttccctcccttttnggggtanacccccctttcnttctttaccttnttcttttccccaaccntctnccctggcaaaatgtcgctttctatccccctccctcaccaaattaccgccgccccccaaatactttntacccccccccntcccacacataanattccgcctctttntctttctccnntacng

SEQ ID NO: 4682 - DNA, 1114 bp, Zea mays
  Peptide Sequence Number=SeqID_10688
  Probeset Number=SeqID_19085
gcgtaggccgattccttaatgcagaaggcaaaacaggtttctctactagaaagggggccgtgagcacaagacaataaatgggagttgcctcactctttaggcacccgaggctttacaccttatgtgtccggctcgcatgctctgcggagttgggagcggacaacaatttcgcacaggaaagagttatgacccagattagggcaggctcgtttttcaccatcactaatgggtaccaaagctggagctccaccgcggaggcggccgctctagaactagtggatcacccgggctgcaggaattcggcaccaggagagagagagagagagctcactagtccccccccccccggccagaattagggtttctctttgtcttcagcagtcagtgcgcatccgtaggagaaaagtgtgagaatctgccaccatgggtcgtatgcacagtcgaggaaagggtatttcagcctctgcgttgccttacaagagatcgtctccaagctggctcaagaccacctctcaggatgttgatgaatcaatctgcaaatttgccaaaaagggattgaccccttcccagattggtgtgattctccgtgactctcacggtatccctcaggtcaagagtgttactggaagcaagatcttgaggatactcaaagctcatggccttgctcctgagatccctgaggatctgtaccatctaattaagaaggctgttgccatccgtaaacatctcgagggggggcccggtacccacccccctcttccccctctattgagtgggatccccagcccggctcttgcccccccccgtgcgctttcctacaccctgccggttccccccctctaatgcccttccggccgtcatccccccttttgggaaggttggggaaaaaactggaaggggggcccggaacccgttaggcccctttcctaaacaggttgggctaatcttggaattgggcccacagcgcacaattgctaaacgcaccatgatgttcgagattaatctttgaaccccaccatcttgagttttattaacatcataattattttcttaaataatccaagagtatttttatacgctacacacttaattttgtgcgcccttcccgccggtc

SEQ ID NO: 4683 - DNA, 902 bp, Zea mays
  misc_feature (1)..(1): n is a, c, g, or t
  Peptide Sequence Number=SeqID_10689
  Probeset Number=SeqID_19086
ncattttcgtattgaaagctgaggaaagacacccgatcatgccaagaatagcttgtcttcttccttccttcttgtttttttcgtaccatagcgatatggcgccagggggtcaggtgcgctctattgacgagtaacgggccagcactaaggcccctacgaatatatcactctgggggggacgcctgttaacatagatttccttttcgtattgaacgctgaggaaaggcacccgatcatgccaagaatagcttgtctgcttccttcctgcgcgagcagtccgaacccacgcggggacccgcccaaggatgtcgaaaacaataaggacgaatggcaaaccatacctatgtaatctactaaaaataaactcatggcaacgcacgggtacatacctagtggtcttctaatttgccacgatgattcttgctaaatccatgaagtgacattttgtttttgtttttagacgcttttatttgtgtaaagttacattgttgcatataaatcctacaaatacaatgttattaagtctttgagatattcgattgaactttattatgtatttcttttcatgtgcattttttgcatgctttctataattattcatagaatgtagaggagatgtacccgaaaatgttgaaatctgttgaaggtgagatcatgcctctaaatgcctggttgtggtctatgatcgatagctgctccaatgaggatgacatcaaacttccttttcaaattttgcagaaactcagagtatttgtaagttcccttcatattcctcatacaggtagaatatttcattttatatttgtgtaccaagttatattaccattatgactgtatatgattttgttgtatcatcatctctcttgtggcggtggctcaaataaaaaaaaaaaaaaaaaaag

SEQ ID NO: 4684 - DNA, 353 bp, Zea mays
  Peptide Sequence Number=SeqID_10690
  Probeset Number=SeqID_19087
ccgcgccccaggtctccacggccgcggcgcaccccgtctcctccgccctcgccgccctctccaactcgatcctcaccacccacaccaccctggaggactctgatgccgccttcgtcgtcggtcgtggggccctcgatgtcgtccgccctacctaccccgaccttgaccgccctacctgcccgatcctgtcctcgttcactgctcccctggggtccgccggcgccccgtccctgggcctggctggatccctgaccgtcctcctgcccgacccccgcacccacctcccgcccgccccccgcgcccccgtccccccggccgcgtatgccccccttctccgccgtgctgtagcagag

SEQ ID NO: 4685 - DNA, 719 bp, Zea mays
  misc_feature (601)..(719): n is a, c, g, or t
  Probeset Number=SeqID_19088
atactggttgccgtgaccgcgaccacgtggccattcatgggggagcggcacccaggtttgcctgctcgatttaaaaaagtagcgcctacttgatccggccccatcccaatttatcttttttgtcgccacctgtacaaagtccattcctacccccccccccccccccgtgtgagggggagaaaatcaatgtccccccgccgtcgtcttcctacgccccgcaaggaggggccgcagaagttccccgatccgctggttgacgcaaccttcagattccccgatcaagctctgaattcccccgagagcaatttcgcaccggtcgatgagactggcgaagccatagagatacaccagagccagatccgaggggcgataccggacggtttccccgagggggtgtacatcagaaacggttccaacccgctctttggcgccctccattccacgtcctcggtcctgggacagtccagggagatctgggtcgagggggaggacatgctccacgccgtctacttcaccaaaagcagcggagggcatctatggtgagactcctacggccgccgatagggacgaaagagaagatgagcatgaaacggcgcggggnnnnnnnnnnnnnnnnnnnnnnnnnnnnnnnnnnnnnnnnnnnnnnnnnnnnnnnnnnnnnnnnnnnnnnnnnnnnnnnnnnnnnnnnnnnnnnnnnnnnnnnnnnnnnnnnnnnnnnn

SEQ ID NO: 4686 - DNA, 645 bp, Zea mays
  misc_feature (207)..(207): n is a, c, g, or t
  misc_feature (215)..(217): n is a, c, g, or t
  misc_feature (219)..(219): n is a, c, g, or t
  misc_feature (227)..(227): n is a, c, g, or t
  misc_feature (229)..(230): n is a, c, g, or t
  misc_feature (239)..(239): n is a, c, g, or t
  misc_feature (246)..(246): n is a, c, g, or t
  misc_feature (248)..(248): n is a, c, g, or t
  misc_feature (261)..(261): n is a, c, g, or t
  misc_feature (263)..(263): n is a, c, g, or t
  misc_feature (265)..(265): n is a, c, g, or t
  misc_feature (267)..(267): n is a, c, g, or t
  misc_feature (270)..(270): n is a, c, g, or t
  misc_feature (273)..(273): n is a, c, g, or t
  misc_feature (282)..(282): n is a, c, g, or t
  misc_feature (286)..(286): n is a, c, g, or t
  misc_feature (288)..(288): n is a, c, g, or t
  misc_feature (293)..(294): n is a, c, g, or t
  misc_feature (298)..(300): n is a, c, g, or t
  misc_feature (303)..(304): n is a, c, g, or t
  misc_feature (307)..(308): n is a, c, g, or t
  misc_feature (310)..(310): n is a, c, g, or t
  misc_feature (319)..(319): n is a, c, g, or t
  misc_feature (322)..(323): n is a, c, g, or t
  misc_feature (325)..(325): n is a, c, g, or t
  misc_feature (332)..(333): n is a, c, g, or t
  misc_feature (338)..(338): n is a, c, g, or t
  misc_feature (349)..(349): n is a, c, g, or t
  misc_feature (351)..(352): n is a, c, g, or t
  misc_feature (354)..(354): n is a, c, g, or t
  misc_feature (356)..(356): n is a, c, g, or t
  misc_feature (358)..(358): n is a, c, g, or t
  misc_feature (360)..(361): n is a, c, g, or t
  misc_feature (365)..(365): n is a, c, g, or t
  misc_feature (372)..(372): n is a, c, g, or t
  misc_feature (374)..(374): n is a, c, g, or t
  misc_feature (377)..(377): n is a, c, g, or t
  misc_feature (386)..(388): n is a, c, g, or t
  misc_feature (390)..(391): n is a, c, g, or t
  misc_feature (393)..(394): n is a, c, g, or t
  misc_feature (400)..(400): n is a, c, g, or t
  misc_feature (403)..(404): n is a, c, g, or t
  misc_feature (407)..(407): n is a, c, g, or t
  misc_feature (411)..(411): n is a, c, g, or t
  misc_feature (413)..(413): n is a, c, g, or t
  misc_feature (416)..(416): n is a, c, g, or t
  misc_feature (421)..(421): n is a, c, g, or t
  misc_feature (424)..(424): n is a, c, g, or t
  misc_feature (428)..(428): n is a, c, g, or t
  misc_feature (431)..(431): n is a, c, g, or t
  misc_feature (433)..(433): n is a, c, g, or t
  misc_feature (436)..(436): n is a, c, g, or t
  misc_feature (438)..(439): n is a, c, g, or t
  misc_feature (447)..(447): n is a, c, g, or t
  misc_feature (449)..(449): n is a, c, g, or t
  misc_feature (453)..(454): n is a, c, g, or t
  misc_feature (460)..(460): n is a, c, g, or t
  misc_feature (463)..(463): n is a, c, g, or t
  misc_feature (465)..(465): n is a, c, g, or t
  misc_feature (468)..(468): n is a, c, g, or t
  misc_feature (470)..(470): n is a, c, g, or t
  misc_feature (473)..(473): n is a, c, g, or t
  misc_feature (476)..(477): n is a, c, g, or t
  misc_feature (488)..(488): n is a, c, g, or t
  misc_feature (492)..(493): n is a, c, g, or t
  misc_feature (497)..(497): n is a, c, g, or t
  misc_feature (501)..(502): n is a, c, g, or t
  misc_feature (504)..(506): n is a, c, g, or t
  misc_feature (508)..(508): n is a, c, g, or t
  misc_feature (510)..(514): n is a, c, g, or t
  misc_feature (516)..(516): n is a, c, g, or t
  misc_feature (522)..(522): n is a, c, g, or t
  misc_feature (527)..(527): n is a, c, g, or t
  misc_feature (531)..(531): n is a, c, g, or t
  misc_feature (536)..(536): n is a, c, g, or t
  misc_feature (539)..(541): n is a, c, g, or t
  misc_feature (546)..(546): n is a, c, g, or t
  misc_feature (559)..(559): n is a, c, g, or t
  misc_feature (562)..(562): n is a, c, g, or t
  misc_feature (564)..(564): n is a, c, g, or t
  misc_feature (568)..(569): n is a, c, g, or t
  misc_feature (577)..(577): n is a, c, g, or t
  misc_feature (579)..(579): n is a, c, g, or t
  misc_feature (585)..(585): n is a, c, g, or t
  misc_feature (589)..(589): n is a, c, g, or t
  misc_feature (597)..(598): n is a, c, g, or t
  misc_feature (603)..(603): n is a, c, g, or t
  misc_feature (607)..(607): n is a, c, g, or t
  misc_feature (611)..(611): n is a, c, g, or t
  misc_feature (614)..(614): n is a, c, g, or t
  misc_feature (621)..(621): n is a, c, g, or t
  misc_feature (625)..(625): n is a, c, g, or t
  misc_feature (630)..(631): n is a, c, g, or t
  misc_feature (633)..(633): n is a, c, g, or t
  misc_feature (639)..(639): n is a, c, g, or t
  Peptide Sequence Number=SeqID_10691
  Probeset Number=SeqID_19089
cccactggccactcccctccctcccgcatcagcagccaaacgccaccgagctcccggcctccgcagccaggaacatcctcctttctcccgagctcctactcctccacgtacgctcggagcttaccataggacgccagacgccagtcgccagccatgaagcggctcctgaggcggctctcccgcacggtatcggtatcggaggcgggngaggacgnnngnccggacgntnncggccctancaagcangncaccgggagggangnangnaanggngaaaaaaangtcncnccccnntttnnnccnnatnntntcccatccnaanncncattccnnactcncccgtcccacncnnancngntnntccnccctttncnctncctcacccnnncnnannagtccntcnngancaantnatnaccgnccnccgnccnanttncnntcggtgcntntccnnccccanagntnctnanagnttnnatcctcccacncganncccntacnncnnntntnnnnncncccccncaccntacnccatnaannncctcntattatcacttgntantntgannatatagancnacctcncacnctcgcctnntgacntgtntccnccnccgtcgnatanacatnncnacgacnatgcga

SEQ ID NO: 4687 - DNA, 600 bp, Zea mays
  misc_feature (37)..(50): n is a, c, g, or t
  misc_feature (458)..(465): n is a, c, g, or t
  misc_feature (530)..(548): n is a, c, g, or t
  Probeset Number=SeqID_19090
cccgtctcccccccgaggaaagtgcagaggaagaagnnnnnnnnnnnnnntcgtcgctgcttctcgctcccgcgaccttcgtctctcgtttggtcgcacccgctggggagaggaatcaattcgtagcctaccggaatgggggccccagttcttctcgccggtgaccgggttccggccgaccctctcccttaccagggggttggcccctagcgtcctctgcgctgcaccacgggcgcggcgcctctgtgccagtttcaggggggcggaccttgggggccagtccttttggctgtgcggcgggtacagaggatcccccgcccggatgcctgtggctcccccagggtggttggccagtggtccgagacccttgccgccccttccggggcgacacaacctactggcgcagcgcgggcttcccttcgcctcccgtgacagcttccacgatttccgcggttttnnnnnnnngttctggctcccagctcaccttgcggggttggggtcccgtttggggcaagaggagctctctattnnnnnnnnnnnnnnnnnnntcgtcgctgcgtctctctcccgcaaccttcgattttcgtttattcgcatcca

SEQ ID NO: 4688 - DNA, 491 bp, Zea mays
  misc_feature (1)..(1): n is a, c, g, or t
  misc_feature (3)..(3): n is a, c, g, or t
  misc_feature (5)..(5): n is a, c, g, or t
  misc_feature (11)..(11): n is a, c, g, or t
  misc_feature (14)..(14): n is a, c, g, or t
  misc_feature (18)..(18): n is a, c, g, or t
  misc_feature (22)..(22): n is a, c, g, or t
  misc_feature (24)..(25): n is a, c, g, or t
  misc_feature (31)..(32): n is a, c, g, or t
  misc_feature (34)..(34): n is a, c, g, or t
  misc_feature (47)..(48): n is a, c, g, or t
  misc_feature (50)..(50): n is a, c, g, or t
  misc_feature (53)..(53): n is a, c, g, or t
  misc_feature (64)..(64): n is a, c, g, or t
  misc_feature (69)..(69): n is a, c, g, or t
  misc_feature (73)..(73): n is a, c, g, or t
  misc_feature (75)..(77): n is a, c, g, or t
  misc_feature (80)..(80): n is a, c, g, or t
  misc_feature (83)..(84): n is a, c, g, or t
  misc_feature (86)..(87): n is a, c, g, or t
  misc_feature (89)..(90): n is a, c, g, or t
  misc_feature (97)..(98): n is a, c, g, or t
  misc_feature (102)..(102): n is a, c, g, or t
  misc_feature (107)..(107): n is a, c, g, or t
  misc_feature (111)..(111): n is a, c, g, or t
  misc_feature (120)..(120): n is a, c, g, or t
  misc_feature (157)..(157): n is a, c, g, or t
  misc_feature (160)..(160): n is a, c, g, or t
  misc_feature (164)..(165): n is a, c, g, or t
  misc_feature (243)..(243): n is a, c, g, or t
  misc_feature (450)..(450): n is a, c, g, or t
  Peptide Sequence Number=SeqID_10692
  Probeset Number=SeqID_19091
ngnanggaaangtnttantggngnngaaagnnantaggagagggggnngnagnggggcaaaacnaaagncaancnnngtnaanntnngnnggcaagnngccnaaacngatngaagaaggntcctgtacatatatttgcacttgggggaaacaaatgntantcannttttgagggccttcagaaggcgaaggtccccaacagtagcccctcgcagtattaatttgttaagataacgaatttagnctgcgacatgaacgaaggccttaggccgaaggtccgaaaaaacaccttccctttgctagaatagcaacagtcaatgacagacggggcccttcaatttggagcgtactgggtgtataaataggaacttacatcgactgcacttgatacactgcttgtgccatttgccttattttctcaatttcatagctcttgctcactaacgctttntagttttcaagctttctgagcttcggttaaaaagacgcatt

SEQ ID NO: 4689 - DNA, 379 bp, Zea mays
  Probeset Number=SeqID_19092
cgttcaccgttcgaatgcgacgtcatgtgcagggaacagataattcaaagtacttttctgatgcaccgtccgccaggggaaaatttttctacgtttattcgttcgttcataggaccaaaatttagacaacccaagaatgagtgggcagaaactcgaaggttttgcttatcaagccgagtatgggaagagacacattacggacgcacatggatgtcataacgtcctttaaagcaaccacccttttttttttttttttttttttttttttttttttttttatcctgcccctttttttttttttttttttttttcatttgggtacttttttttttttttttttttttttcaagcacacaatcagcccaaaagtccagcccaa

SEQ ID NO: 4690 - DNA, 549 bp, Zea mays
  misc_feature (126)..(126): n is a, c, g, or t
  misc_feature (135)..(135): n is a, c, g, or t
  misc_feature (221)..(221): n is a, c, g, or t
  misc_feature (539)..(539): n is a, c, g, or t
  misc_feature (549)..(549): n is a, c, g, or t
  Peptide Sequence Number=SeqID_10693
  Probeset Number=SeqID_19093
tcggcaccaggagagacactagtccccccccccccccccccggcccattttcttctcattttttttttgctcttgacgaagaaaccaaaaaaaaaaaaaatgagagagatccttcatatccaaggnggtcaatgnggaaaccagatcggagcaaagttctgggaagtgatctgcgacgaacacggcattgatcacaccggctcaatacgtcggcgattctnccgttacagcttgaacgtatccatggccctttccaccaagccaccggcggacaggacgcgccccgcgccgttcttatcgatctcccgccccgcaccaccgattctctcgcatctgctccgcgcggtcaccttctccccccggatgcctgcgtctttggccgacctggcgccggaactagctcggcgtagggtcatgacaccgacgggcctgagtgcatcgattccgttctcgttgtgcgcgccggcccacctgagcaccccgctgcgcttcatggtttcctactgggtctttcgtcgcgaggaggacctggctccgcngccgccgttn

SEQ ID NO: 4691 - DNA, 1295 bp, Zea mays
  misc_feature (1)..(7): n is a, c, g, or t
  misc_feature (1295)..(1295): n is a, c, g, or t
  Peptide Sequence Number=SeqID_10694
  Probeset Number=SeqID_19094
nnnnnnntcgaggccggccgggcccgttcttcacgccgcctccacgcctccaacagaagaaccctaagctgccctcgctccgacgccgccacctcgtcgtccgaccgcatcgattcgatggcccgcatctccgccgtcgttgccgccgtgatcaccgccgccgttgtcgttgacgcgctgttcacagccgcctccgccaccgaggcgccggcccccgccccgatgtccggcgcgggcgccctctcagcgcagctctccgtcggctgcctcgcggcgctcctcgccgctttcctccgccactgagcggtggggccgccccgtctgcgtgcgcgtcttcagatctagtggtacagtggtagtgagagttgcagtctaatgttagtcgcaggtatcgtagcggtggtgttagtgttatgaagatgaggcatttggttttgttccacgtggtggatggatggataaatctgggcgtttagagagttttttctttttgatgctggatttgatttagtatgattggtgttagtttaaaaaaaaaaaaaaaaaagaactcctccgctcgatcgaactcagttccgattcggcaggttcattgtgaagttgaggtgggtggtataagcatcgaagagagcatgagcactgccagtggtacaaggcgtgcaccaagaagacagtcgcaagatgggtctgctgatcaagtatggttgatcatcgaagaggatccctccacgacgacaggcgtccatacaccgacgacacgtgcatcaagcaggccctcaaggttcagaagaaatgccctacttgcaggaaggggctgaaaatgaatagtgttcatcgtatttaccttccgaacggttctagttaagctgagcagctttacatatctgatggcttgtaactttgggggcaattagcttaacctctgttatccgatacatgctgactggctttgtcaaagaaacttctggtaacgtaaggctgtgcaatgtactgtgaggatcaggaattcttagcctgaacagcagatagatgtttcatcccagtctgtattatttatcggcatcaccaggagttcatcatgagaacttcctgactagggaagtcgatatcagcctcagttttactctcttattgcatccatggttcccagaatgtgttgttttgttaggatgtgaccatcggatggtgcatatgaccgtgtaaaacattattttgcaccgtattctgtattatttatatagtagagttttaaaatataaatgatgagtaaagctggtgaagatagccttatatan

SEQ ID NO: 4692 - DNA, 1111 bp, Zea mays
  misc_feature (1)..(20): n is a, c, g, or t
  Probeset Number=SeqID_19095
nnnnnnnnnnnnnnnnnnnnaaagtgggtttggtgtaggaaatgttcgaaagggtacgggccgcccctcgaggacagctcatcaacactcagcagcagcttgctgaggccaatgagcacctagatatgcatcaccaggagatacaagacatggaggtcaacgaggatgtcgacattgagggaggggaggagcctgcctccagcttggacactgctggctcaggaagaccaccttcccccgagtcgagtgctgcctcgttcgctcattacgtatcgggagtagggctagaagtcgctaatggtgggactcctcaaagttagcttaacttttgcacccctggggcaccaggctacatagagttgagcctcttggcccactgatgtcatcgtgataaactcttttggcaacatggctgatggatgatgttagtcccaatcagcgcaagaaaagattatgcccttaagaacaccctctatatttatgcaaagaatctatccaattccccactttcgacctctctctcaccattgatttaaatccttaaccttcgacagatgcgctaattggagagacatagtgacgacactactccgaacgcgcccggtccacacacgccgccccccgccacaaaaaatggacgcccggagtaacttcccaacaggacagcctactcaaacttcccaaacttcttggcaagggagatataaaagggccttcccaccaacaaactagaactatccacttgcgaggaggacgcccaaagcctcccacgagctcccagcccacaccccccctccacccaacactaatcggatggcgcgggcaaaaacaccattccaacagatcagcctccccgagtgccccacacccatccctaaatccactcgacgcgtctcttgcaatgaccccctagaccccacccttttgcatcccccccaagggcaaccgaatggactccccactcttaatgccgcaacggccacagctcacgctaaatatcaccgccacaacgcccccttttccccgcgcacccacccattggctaccctcgccgcctcaattgagcgcaccagcactcccagccgcccgcaccacccaagaacaaacttat

SEQ ID NO: 4693 - DNA, 931 bp, Zea mays
  misc_feature (1)..(6): n is a, c, g, or t
  Peptide Sequence Number=SeqID_10695
  Probeset Number=SeqID_19096
nnnnnnccaaaactcatcgcatgcatattaattacttgagtatttacaaactgtactgtacacgccagcctggtactagtactactactactcatgctgtgcagatgagttttcaaactacacaaatccaatcatcaagtacgtcgcagaaaaaaaaatttgcacgtagagcctaacaacattgcattgagattttccccaaatctacgaaataccacgattacgttcaggtttgctttgctttgttccgcttgatctccggatcgggcgattcctccgccgcttacgccaggaacggcggcatggcgctgtagtaggtgggcttccacccagcgtccccgtcgtccaggggcagcgcgccgcagcggcggcaccgctcgccgggcggctcgagggacatcttggacccggcggcaggaggggcaggccgcgtgggcggccggccgcctggcgaggcaggcggcgcggagggcgtgcgcgcaccggcgcaccccccgcgcgtgcccgcgcccatcgaactccgccccgcagacagggaggtccgccgtctggtcccctgctccacgcggccaagcgtgggtagcgcatggtggggatcctccgccgcctgacgtccggacgccccccctggcgccgtcgaccgcgggcgcgccgcccgcgcccccggcgccgcaccgccccacgccgccgcggcggcggacgtcgacgagcgggcaccgcagcgaggcgagcacgacgaccacgtcgtggtcctcgggcccgtccggcctggtcccccacctgagcttcctcgctccgctgtgcatcctcggcgctcgcgccgctggcaccactgttggctcacggcgccgcttatcgggggaggggaggaggctgacagaaagtgcgtgggtgcctgtgggaggaggggagcaaggcggcgatggatcgc

SEQ ID NO: 4694 - DNA, 1651 bp, Zea mays
  misc_feature (1)..(561): n is a, c, g, or t
  misc_feature (1292)..(1292): n is a, c, g, or t
  Probeset Number=SeqID_19097
nnnnnnnnnnnnnnnnnnnnnnnnnnnnnnnnnnnnnnnnnnnnnnnnnnnnnnnnnnnnnnnnnnnnnnnnnnnnnnnnnnnnnnnnnnnnnnnnnnnnnnnnnnnnnnnnnnnnnnnnnnnnnnnnnnnnnnnnnnnnnnnnnnnnnnnnnnnnnnnnnnnnnnnnnnnnnnnnnnnnnnnnnnnnnnnnnnnnnnnnnnnnnnnnnnnnnnnnnnnnnnnnnnnnnnnnnnnnnnnnnnnnnnnnnnnnnnnnnnnnnnnnnnnnnnnnnnnnnnnnnnnnnnnnnnnnnnnnnnnnnnnnnnnnnnnnnnnnnnnnnnnnnnnnnnnnnnnnnnnnnnnnnnnnnnnnnnnnnnnnnnnnnnnnnnnnnnnnnnnnnnnnnnnnnnnnnnnnnnnnnnnnnnnnnnnnnnnnnnnnnnnnnnnnnnnnnnnnnnnnnnnnnnnnnnnnnnnnnnnnnnnnnnnnnnnnnnnnnnnnnnnnnnnnnnnnnnnnnnnnnnnnnnnnnnnnnnnnnnnnnnnnnnnnnnnnnnnnnnnnnnnnnnnnnnnnnnnnnnnnncggtgactccccccccacccacccgggcagcgagcgcactccgaccatcgccatgtcgaggcgcggcgactgggtctacgagaacaacggcgggacctgcgtggccatcgccggcgctgattactgtgtcgtcgctgcggacacccgcctctctgtaggatacagtatcctcacgcgtgatcactccaagatctgcgacctggctgacaaatgtgtactggcatcttctggctttcaaggtgatattaaggctctgcagaagaacctagctgccagagaattgctgtaccaacaccagcataataaaaggatgagctgccccgccatggcacagctcctctccaataccctgtactacaagcgattcttcccatattacgccttcaatgtgctcggtgggcttgacagcgaggggaaaggatgcgtttccacctatgatgcagtaggtccctatgagagaacggttacagtgctcaaggaacgggatctactttgatcatggcaagcctggaccatcaactaaaatccccaagtcctctaatactccctgtcaaggatgctggcacaccattggcggagtcagaaggcatcgatctaagtaaggacgtggtcccatctgccactgagagagacatctacactggagacaagttggaaattgtagtcattaacaagggcggtactatgcgcgagtatttcgaccctgagaaagattaagccaccacttcagntgtgctgcagctgtcatttgctttgaacttttttcccagactggggagttatgtgctaaggtggtgcttcataggacactgggtttacttgatatgtgaagtacggatgtaccagatccggggagttttttttctgtgaaacaaatgtttggaaaaaaaaaaaaaaaaagttatcgatccgccaccccgggggggggcccgtacccatttcccctataggggccaataccccggcccctggcccctttttaaaggggggaggagaaaaccggggtaccaaattaatcccttgggcacaccccttttccagtgggggaaaaaaaaaagcccccccaccccttcccacagggggcgctgga

SEQ ID NO: 4695 - DNA, 600 bp, Zea mays
  misc_feature (100)..(100): n is a, c, g, or t
  misc_feature (313)..(313): n is a, c, g, or t
  misc_feature (389)..(389): n is a, c, g, or t
  misc_feature (508)..(508): n is a, c, g, or t
  Peptide Sequence Number=SeqID_10696
  Probeset Number=SeqID_19098
cgagatgaaagaagtaattggggcgagcagaaattatatggacagagcgcggtaggaagtcagatgttacacttcggtatgcagacagagagattttgtngggaaggggtcggagtaggaagaagcgggagttttttgttcttgggaggcgacggatgtttgggggtcgggggtgattagtggaagaggtgtgattataggagagggggagcatacgttcgctgaggttgggtcacggcagttgtgagaagatggagttattagagggagcagaggaaattcttgttgtttttatttagaagaagacatggtnggtgagaaaagagagttttaggggagacgaggagggtgagcgagaacagatagtagagttgaaacaggagggccanggagaaagaagagagcgagagagtattagtttttgtgaggcgatgtggcgatagggagtggtattaattggtgtgtatgatttgggagcggatatagtaggtcggattaatggaggagnggagaacttctgttgtattgtagaagatagtaaatcatgagaggatgtttgagcgggtattgatgggggggtgtatgggatgaggtatcggg

SEQ ID NO: 4696 - DNA, 580 bp, Zea mays
  Probeset Number=SeqID_19099
ctgcaaggatgatgagatgcttgatgatgatgatactgactttggctcaagccttggacctattgtctcatgggacaggatggcagcagagtgcgaggataggaagatgctcatgggtgatagcccaaagtgtgacaagtggatgcttaaggatgatgtgggtgatttcgatgcaaagagtattcttaactggggggctggtgatggcggggaggattccaaggtcatcaggccgttgttgcgggacgataccatggtaactgacccaattttggttggtattcgtgtaggaggattcttctctggaacaggagggtgtgattcaccaggtttagattccaatgttgatggaggggctagcagtttggggcctggtgggatctggtcagttgtgataaccggatgcctggaaggttctgtaaattctgtatactagtgtatttagcttaccccaatttgattaagtgtctgtaggtggagcttcagtcaaagtaatctgtttgccctgatatatacaggctgccctttcaagtcaacttttgttttaacttgaaaaaaaaaaaaaaaaaaaaaaaaaaaa

SEQ ID NO: 4697 - DNA, 393 bp, Zea mays
  Peptide Sequence Number=SeqID_10697
  Probeset Number=SeqID_19100
actcgccaaaaattgaatctacttgatagatgcaagccatccctcccggatgaataaaattccatgtgtggttattttacaaaaggcacccgaactgacccgggaacataaaagggatcaggtaaactgcctaacgcctaactaaaattatagtataatattggatagattcaattcaaagggcaaaattactcgccaaaaatgaaactacttgataaatgcaagctgtccctaccctaaggcaatgtttttgtgtacaggtacaacaaaatttaaaaattaaaaaaaaaacaatctatctggctggccctggatcttaaaaacctgcaggaccgctggtaatgacaggaattccctcaatttgattggagaaaaaactccctcgagctattt

SEQ ID NO: 4698 - DNA, 469 bp, Zea mays
  misc_feature (1)..(1): n is a, c, g, or t
  misc_feature (6)..(6): n is a, c, g, or t
  misc_feature (33)..(34): n is a, c, g, or t
  misc_feature (37)..(37): n is a, c, g, or t
  misc_feature (39)..(41): n is a, c, g, or t
  misc_feature (44)..(45): n is a, c, g, or t
  misc_feature (77)..(77): n is a, c, g, or t
  misc_feature (94)..(94): n is a, c, g, or t
  misc_feature (101)..(101): n is a, c, g, or t
  misc_feature (105)..(105): n is a, c, g, or t
  misc_feature (110)..(110): n is a, c, g, or t
  misc_feature (113)..(113): n is a, c, g, or t
  misc_feature (123)..(123): n is a, c, g, or t
  misc_feature (143)..(143): n is a, c, g, or t
  misc_feature (203)..(203): n is a, c, g, or t
  misc_feature (240)..(240): n is a, c, g, or t
  misc_feature (244)..(244): n is a, c, g, or t
  misc_feature (246)..(246): n is a, c, g, or t
  misc_feature (252)..(252): n is a, c, g, or t
  misc_feature (255)..(271): n is a, c, g, or t
  misc_feature (273)..(275): n is a, c, g, or t
  misc_feature (277)..(279): n is a, c, g, or t
  misc_feature (281)..(292): n is a, c, g, or t
  misc_feature (294)..(308): n is a, c, g, or t
  misc_feature (310)..(315): n is a, c, g, or t
  misc_feature (318)..(326): n is a, c, g, or t
  misc_feature (328)..(332): n is a, c, g, or t
  misc_feature (336)..(341): n is a, c, g, or t
  misc_feature (343)..(343): n is a, c, g, or t
  misc_feature (346)..(346): n is a, c, g, or t
  misc_feature (349)..(349): n is a, c, g, or t
  misc_feature (351)..(353): n is a, c, g, or t
  misc_feature (355)..(356): n is a, c, g, or t
  misc_feature (358)..(358): n is a, c, g, or t
  misc_feature (360)..(366): n is a, c, g, or t
  misc_feature (368)..(368): n is a, c, g, or t
  misc_feature (372)..(372): n is a, c, g, or t
  misc_feature (375)..(375): n is a, c, g, or t
  misc_feature (379)..(386): n is a, c, g, or t
  misc_feature (389)..(394): n is a, c, g, or t
  misc_feature (396)..(403): n is a, c, g, or t
  misc_feature (405)..(405): n is a, c, g, or t
  misc_feature (408)..(409): n is a, c, g, or t
  misc_feature (411)..(411): n is a, c, g, or t
  misc_feature (414)..(414): n is a, c, g, or t
  misc_feature (416)..(419): n is a, c, g, or t
  misc_feature (423)..(423): n is a, c, g, or t
  misc_feature (425)..(426): n is a, c, g, or t
  misc_feature (428)..(431): n is a, c, g, or t
  misc_feature (437)..(438): n is a, c, g, or t
  misc_feature (444)..(445): n is a, c, g, or t
  misc_feature (447)..(452): n is a, c, g, or t
  misc_feature (454)..(454): n is a, c, g, or t
  misc_feature (456)..(457): n is a, c, g, or t
  misc_feature (459)..(460): n is a, c, g, or t
  misc_feature (462)..(464): n is a, c, g, or t
  misc_feature (466)..(466): n is a, c, g, or t
  misc_feature (468)..(469): n is a, c, g, or t
  Peptide Sequence Number=SeqID_10698
  Probeset Number=SeqID_19101
naccgnccagccgcgccctttcatcaggcctgnntgncnnntgnngcctatggcggcgttgccctccgtctctgcgncgctgcccctccgctcncgaacgngcgntcttngcntggcagcagnaggtgggtccaaggggcggncgatcgctggaagcttcgtcagccgcgtcctcgccgtcaaggtcgcctcgccgaggaggnccgtgcacgcctcggcgtacgacagaacctggaggtncagngngcccgncgnnnnnnnnnnnnnnnnntnnncnnntnnnnnnnnnnnntnnnnnnnnnnnnnnncnnnnnnttnnnnnnnnncnnnnncttnnnnnncnctnttntnnncnntntnnnnnnncntccntcnctcnnnnnnnnccnnnnnnannnnnnnntntcnncnctncnnnnttcntnncnnnncccccnncttttnncnnnnnncncnntnntnnncncnn

SEQ ID NO: 4699 - DNA, 527 bp, Zea mays
  Probeset Number=SeqID_19102
ggtcatgtaactcttttgtctaagaaccttctaacatgtctagggtccctagggaggtgattaagcatcatctaatggtcctccccaatgcatggattgttcggtagaagatgtagaggcagtccatagagtgtcagtagttcatctgcctcgagatcgacaaacttctccatgccgacttcatatatgaagtataatacaccaagtggttgtccaaccccatagttgttctgaaggcttggggcaagcttcggatgtgcatcaactacaccaaactcaataaggcatgccccaaaggtttataccatctccctcgcatagatcaaatagaagactctacttctaagtatgaacttttatatttcctagatgcatactccaatttccaccaatagtatagctacagaagatgtggtgaaaacatcttttataactccttagggtttgtgttgctatgggaatatgcctagtggactaaaaactaaaagtccagtgcacataagactaaccagacccatattccactc

SEQ ID NO: 4700 - DNA, 379 bp, Zea mays
  Peptide Sequence Number=SeqID_10699
  Probeset Number=SeqID_19103
gcggcgcaggagcatgtcgttagcaactcatgtgagttagcagcatgcaatggagcttgtagattatcaggtcagccaatggaccagtcgagtttgtctcaggtaagcaatcggagccatcaaacagatagtactatctcgcaatgtcacgtcagcaggccatgtcaatcatcagtggagtgtattgtgagcatcttttattgtgcaatcggcatcttgtctttggtgcacagaagtagccgatgcttggtggcgggagagaacgatgcgcaaaacaatcaacgttcccagcatgtttctccatctgaaaacagacatcattgtttttgtcgatactcagtgtatccgtctgcggatgtaccgagcagcactggagctt

SEQ ID NO: 4701 - DNA, 349 bp, Zea mays
  Probeset Number=SeqID_19104
catagtgtgaatgattactttacgtagacaacgagcagtctacattatactttgttcaaaacagatacaaggctgttttgtggagatgatctcggtcttccgaaaagcctgctgctcccttttcggttacaagatagtgatgaatgatcaacagcagtcaaatggaatccctgtaacacgctttattctgtagtcagtttatgcccaaagcgacgttgaaaatcttgagtttgactatgaatcgagaaacaataatatcgtggtcgacatcttcataaggaggatgaactccataccagccttcactgccaacctgacaatggagtctttcaacgaaagaagtatatgc

SEQ ID NO: 4702 - DNA, 794 bp, Zea mays
  misc_feature (346)..(347): n is a, c, g, or t
  misc_feature (633)..(633): n is a, c, g, or t
  misc_feature (738)..(759): n is a, c, g, or t
  misc_feature (761)..(761): n is a, c, g, or t
  misc_feature (767)..(774): n is a, c, g, or t
  Peptide Sequence Number=SeqID_10700
  Probeset Number=SeqID_19105
tagtcccccccccccccccgagaagagagagatttagatattgtagagtgagattctaaagagagagagagagagagatatggctagtggaatcgctcgtggtcgtttagctgaagagaggaaatcgtggaggaagaatcatcctcatggttttgtggcaaagccggagacggggcaggatggaactgtgaatctaatggtgtggcattgcactatacctggtaaagctgggactgattgggaaggtggattctttccattaacgatgcacttcagtgaggattatccgagcaaacctccgaaatgtaaatttccacaagggtttttccaccctaatgtctatccnntctggaactgtctgtctctctatccttaacgaggattatggatggagaccagccatcaccgtgaagcagaattcttggttggtattcaggatttacttgacacaccgaatcccgctgaccctggcacagacagatggttatcatccttttctgtcaggattccagttgagtacaagaaaagggggaagctgcagtccaagcagtatccctgctcttgtctaaaacctcaaaaaagagaacgcaccaaaactgatgacaagctctgaatatttttctcgtcttgggncattaaaggtttagatggcatttgggtgattgaaaactccctcattttggcaccttaagacactggaaatctatttattttcgaaaaaaaactcttctttctccnnnnnnnnnnnnnnnnnnnnnnanaaaaannnnnnnncttcgggggggggcccggaa

SEQ ID NO: 4703 - DNA, 485 bp, Zea mays
  Peptide Sequence Number=SeqID_10701
  Probeset Number=SeqID_19106
ccggagtgacttctctattcactagggtctaggtatgtaacagcaaactagaaatgcaatgctttgtcaaagccatgggcaacagacacacttgattctgaaaacacttagtagcgctgatctgttaagtgaattgctcatctcacatagtcggcggatgaggaacacatacggcatggcagtggcctcgggcacgccgggagagcgaacgtcaagcgtaggatgccgcacctagcggtggagcaggaggactgccgggaaaggcacccccggctgcccgcgcacccacgctttaatcggagactccgtcaccaagcgtcggctcgatcagaggccgcgggaggctccgcggcgaggccgtggcagataccgcaaacactgtggtcccgccaccccgcggcgggaggaggatagggggccggcgccgtcgggcagaggccacgaccgactccgcaagcacaacgatacggagagcacgcggggcc

SEQ ID NO: 4704 - DNA, 1458 bp, Zea mays
  misc_feature (1)..(682): n is a, c, g, or t
  misc_feature (1398)..(1458): n is a, c, g, or t
  Probeset Number=SeqID_19107
nnnnnnnnnnnnnnnnnnnnnnnnnnnnnnnnnnnnnnnnnnnnnnnnnnnnnnnnnnnnnnnnnnnnnnnnnnnnnnnnnnnnnnnnnnnnnnnnnnnnnnnnnnnnnnnnnnnnnnnnnnnnnnnnnnnnnnnnnnnnnnnnnnnnnnnnnnnnnnnnnnnnnnnnnnnnnnnnnnnnnnnnnnnnnnnnnnnnnnnnnnnnnnnnnnnnnnnnnnnnnnnnnnnnnnnnnnnnnnnnnnnnnnnnnnnnnnnnnnnnnnnnnnnnnnnnnnnnnnnnnnnnnnnnnnnnnnnnnnnnnnnnnnnnnnnnnnnnnnnnnnnnnnnnnnnnnnnnnnnnnnnnnnnnnnnnnnnnnnnnnnnnnnnnnnnnnnnnnnnnnnnnnnnnnnnnnnnnnnnnnnnnnnnnnnnnnnnnnnnnnnnnnnnnnnnnnnnnnnnnnnnnnnnnnnnnnnnnnnnnnnnnnnnnnnnnnnnnnnnnnnnnnnnnnnnnnnnnnnnnnnnnnnnnnnnnnnnnnnnnnnnnnnnnnnnnnnnnnnnnnnnnnnnnnnnnnnnnnnnnnnnnnnnnnnnnnnnnnnnnnnnnnnnnnnnnnnnnnnnnnnnnnnnnnnnnnnnnnnnnnnnnnnnnnnnnnnnnnnnnnnnnnnnnnnnnnnnnnnnnnnnnnnnnnnnnnnnnnnnnnnagaaatatatgtggcagatcaaatactaaaggttggtaaaagtaatcaacacacttttgacatattagcatggtagaaagcacacaaagaagaatatcctgtcttgcgccatcgttctcgtgatctcatagatacgcaagtctaaagaagattttcagatccttcttttattttggtggttgtgtacctaatccatttcgtactcgccttgaccctaacaatgtaggaagcactagtctgcaccaaagattggatagctggagcaagaaaaaggttataaaactgaaccttatgtttatttacaatttacttattcattagttcaatgcccttttactaatgcactactggatctttagattcccaggttccaaggctaagagtgttgctattcctaatatggtttatgaaatggatgaacttgaggctcttgcaagaaatatttcatttgaggatgaagacctagatgatgatgatcatgatgatggacctgaggcatcgttgtaagcttgttgatgaagatctagatgataataacgtaccatgaatgctatgaatgtttcttattgtacttgctccgtaatgttttgtgaccttgcgaacttgggacttgtggctttgtgaactttatgatgaacttgttatatggtgtacttgtgttctttgtgatcaacttatcatattgtgcacttgtgatctatgttatcaatttgtannnnnnnnnnnnnnnnnnnnnnnnnnnnnnnnnnnnnnnnnnnnnnnnnnnnnnnnnnnnn

SEQ ID NO: 4705 - DNA, 824 bp, Zea mays
  Peptide Sequence Number=SeqID_10702
  Probeset Number=SeqID_19108
aaattgcccccggggaccttttgcccctgtttcccaaagcgccattggcccacccgggggggaggcgggccatgccgcggaggggggggtacccggggggggcgggccgggcgccgggagcgccagcacggaagaggacacgcaagcgaggaggtgcggccgtcaaccccccgggaaaacgcggcccagcctccaaatgagcccgtccgggggaaaatccgaatcgatcggccattgtcggatgatcggtatagccagcaaggggactatcgcatatcatccgggaagctgtgcatcaattggggagtacatagcgagagtcagatatcacgcatgagagatggcacattcggtcatacgcgatgctcatgggtagagcatcctgagacgtgagcaagacaggggctacgagtgcttccctatagcagatccgcggtcaaagatgtcttctgctaccggaaatcgacaccctcactcgagatagctcatggcatatcaggtagcacatcgaccgcgagtcgatttctctctggtctgaagaagtcacagttcagcagtggctttctcaatctcgcatcctatattcgggctacgcgcggcggagagtacatcgtatctgtgacctttctccatcaagttcacggtaacgtttggtgtatgagcgggatttgccgcgtctcgtgggcatcatcgttctaccagtaagagtccgttcttcatcatgtcggtttcctcgggaacacagccgtaggcgcttttggagtaatatatcgaccatggctcgcggatgagcatactgagttaataatctcataacatcccag

SEQ ID NO: 4706 - DNA, 877 bp, Zea mays
  Probeset Number=SeqID_19109
cctccccggccttttgggggattcccctccacaaacacggttttgccttgggggcccctttattaattgcccgggcccccttgggggggctggggtttttcagtgcccaccattgaaattttttttttttttgaaccctttaaatgagaaccttgggattggcggtttcaacatgggccccccccgttcccttccctcaccacccttttatgttcatggcaaattcccaagggggctttccttttccaatccccctcaccgcagtcatcagtttgaggggggggctcccttgctcaaggaccctgaggagcaaaagggagggttcccatttttctttaaaaagggtgggctccttccccatcctgttttgtcatggaagagtggaagaatttttcttttcccgggagggggggaaaccccctgggtttttggggaacccaggattttcatttttgcctttcaaaccctccaacgggtggggccctttttcgatccctgaaaaactgggcgccctttccaaggggtttaactcgtcccttggcctcggccgatttccttaaaaaaaaagtttttttttggggtatccccaaagggtttggcgcccccatattttttgggggggggtttggttttataacttttaaaacccttgatgttagctgcttttttcccaaggggcttttttttcccccgccctaatttacgtcctttatgtctttaagaaaagcggtccttttttttttgatgttttttaaaaaaaaaaaaaacccgtgggggcccaaaaaaaaaaaaaaaaaaaaaaaaaaaaaaaaaaaaaaaaaaaaaaaaaaaaaaaaaaaaaaaaaaaaaaaagaaaaaaaaaaaaaaaaaaactcga

SEQ ID NO: 4707 - DNA, 466 bp, Zea mays
  Peptide Sequence Number=SeqID_10703
  Probeset Number=SeqID_19110
ctatcgttcacgagcttcaccaaggcaccatccccgtcgactgtatgcttagcacgccaggacctcctctgagctcttctctgaccggcggctcctctgcgcctaggcgtggagcttcctccctcgctgcgctctctccagatcctggtcggccgagcgcgcagccgcctttcctctccctgctcggacggcgcgcgccccttcctctgccgcgccggagtttcctctgctcgccgcgcccggctggaactcctggctcgcccctccgctcgccatggcggtttcctctgctggcagctgagctggtgacgcgcctctgctcctcccggctctcagcgctctcgtcctttcccctgcgcgcagctcaccgagctctcccttcccatggcgcgtcggctccctgctcggcttctattcctccagcgcgcgaagctctctgctcgcccagcgggggcgccgcggtttc

SEQ ID NO: 4708 - DNA, 754 bp, Zea mays
  Probeset Number=SeqID_19111
cccgcgccgcccgcccctcgccgcggtgagcccaccccgcccccacgcccggccccgctccggcgagcccgtcccgcgccgaccccgcctcgcccccggcgagcccgcccccccgcctcgcccccgacgagccccgcgcccgcgcgcgcgccggcaagccgcccggccccgccctcgtccggcgagcccgcagcgccccgcccgctcggccggctccctggtcgccccagcaacccgcgccgccccgtgcccggccgccccccggcgagccgcgctcggccctgcccccggccgccctcggcccccgccgcgcccgtcctcggcaaaccccacccgcccacgtgcgcgcgcccccggctcggccgcccgcctcccggcgagctcggccgcccccccagttcaaccgccccgtgccccggctcggccgcccgtcccccgcgctcggcctcgtccggccgtatcctcgctcgcctgcgctcgctttccccggcgtgcttgcccgctcgccccgtcgtgccttgctcgcgtcgtgtcggcccctgcgtggcctcgagcttggcccagcgtgcctatggcgcgcagctttgagctcggctagcgctcggccccgacatgcgcacgactagtccgtggcgtgtgcgtgcggcctcgcgcgcgtgcccgcgtagtgcgcgtgccttggcacgacccgtcgtgccccgtctaccccagacgccccgtctacccccccgtgtcctatgcgcgctaatcccat

SEQ ID NO: 4709 - DNA, 480 bp, Zea mays
  misc_feature (406)..(406): n is a, c, g, or t
  misc_feature (429)..(429): n is a, c, g, or t
  misc_feature (446)..(446): n is a, c, g, or t
  misc_feature (455)..(455): n is a, c, g, or t
  misc_feature (461)..(461): n is a, c, g, or t
  misc_feature (466)..(466): n is a, c, g, or t
  misc_feature (471)..(471): n is a, c, g, or t
  misc_feature (475)..(475): n is a, c, g, or t
  misc_feature (479)..(479): n is a, c, g, or t
  Peptide Sequence Number=SeqID_10704
  Probeset Number=SeqID_19112
gtttgacaaggttcgatatctgtcaatgtacggagtatattagacaatgccgcctatcatttcatcgtgcacctattttcaggctgttcgactgtgatgggaggaccggtttgcaacaaggggtccgtgatggggatggacgggagcgccccgtagcgcggcaccctcaggcggttccggggagcatgggtgcccgaggcatcactgacgggccaccttcacttggtgaggtcttctgaaacgacatctagggtgctaaggcctccccaccgccaacaaataaaagtcggggcgcacagtgtctgcatccaattcgcacttacctcaggccaccttcggccgtggcgcaataagctatattgtttgaaagctactcatgatttgtctatgttccccccgggccgtnccccggcggccccgtgaggttgngctttctccctgggggnggagcgagngaaccntcttngtccncttnaaanc

SEQ ID NO: 4710 - DNA, 642 bp, Zea mays
  Probeset Number=SeqID_19113
atcctggtgtggcatgcaagagatctgtgctgaccacttcatgcccacgcatacgtaccttcttctccagcaattggtaatgtctaggaatactgatactgcacgtccactcgttcaagggaacatatttttcctgttaacgcacactgtcctcctctactagtacaagatctaataccagttcatggttccacatggaccccgggtttgccgcaaagacgatagtctcatcttatacattgacaccgcctgatctgactgaccaagatatcggcaaaccgaacatcacccacattgactgaccaattgcaatgcgccgtgtccaaatgaacaatcactcaagaggagtgccatattttatcagcacctggcttcattgaaggaacccacctctccttgctccctatggcaaacactgacctggaatcaattgctacaatctgctctcctacatcctcggagcccttcccctgctatgtcgacagatacttctttttttgccaaaactgtgcgcttcctgatgcatcatcaccaaccgatcccacctgatcaccagttgctatgctctgacaactagagctctaattaactcccgcactgtctattgatgcctcatctccacgcactgacacatcgatatgt

SEQ ID NO: 4711 - DNA, 566 bp, Zea mays
  Peptide Sequence Number=SeqID_10705
  Probeset Number=SeqID_19114
ggcccccaatttccttgggcccccttgtttagtttttggaaggaaaggagaagacccttgctgtcattgttggcccagtccccaatgtcaaaaggatcccgggggttccagcaatgaaggtttctgcccttaggttcccggaaacaacaagggccaggattgtcaatgctgggggggagggcctcacatttgaccagcttgctttttgtgccccccttggggagaacccggtcctttttaggggccccaaaaatgcccgtgaggcagtgaggccctttggcaaggctcctggagtgccgcccaccccccccaaaccgtatgtgcgccccaaggaaagaaagttcaaaaaggctcgtggcagaaggaacacccgtggattcaaggtttaaaacaaattgtggccccccgggttgccatcagcatagggcaaccgttgtgtttgacccgcccccagtaattagtaatccctttgttcccaaattagtagcccaatttgttgtcctggtttgaattttggaaaaaatttgaggtcgcccccctattatttactcggtacggggtgggcc

SEQ ID NO: 4712 - DNA, 568 bp, Zea mays
  Peptide Sequence Number=SeqID_10706
  Probeset Number=SeqID_19115
atacattttttccatcggaatgtctgatactatgttgggtgaatcctagtggatggttgagcattattggtgtcatattttgtccggtctatgtgtcaaccgtgatagcttttaatccaaatccgttcactctttctgcctctgtcaagtctggggcaggcaaagaagaagaccaaagaagattcgcacatctgcacatattattgagcccagatactgacatagaacggacaatagtgtacccccaatggcagcccaaatgttttgcccccttatgctccttggcctttctgcaagtgctgctacggcgacaattttcccagaatgctcacgagctcctatagcttcccttcttcccccgtacctcttcaccagcggtgtcttcggaatgtgaaagcccaattcttcaaccctataggatccaacaggaaatcgcagctggtgatcttacctttatcacccttgttcctcccacaatcatcagccctattactgcagtgaccttggtggcgtttattggttcgaaacttctaggacaataagctactggatttgagctatataacct

SEQ ID NO: 4713 - DNA, 294 bp, Zea mays
  Peptide Sequence Number=SeqID_10707
  Probeset Number=SeqID_19116
ctcgggggcttgcggtcgtcacgcagcacctcgagccctcgttggaaacgccttccgacaaggtttctactggccaaccgcggtggccgacgccactaggattgtacgcacctgccaagggtgtcaattctacgcaaggcagacacacatgccaccacaacttcaagcatccaagatttctgagtatcacattcattacaagagctctagcattcactcctagacacaattcaaaaaaatcaaagactctctaagtggttgttgatatttgtgacttatttttttacatggata

SEQ ID NO: 4714 - DNA, 845 bp, Zea mays
  Peptide Sequence Number=SeqID_10708
  Probeset Number=SeqID_19117
ccagtatccctcattcaaaggtacaatagctggaggtacccagcggtgtcggccgatgtagatctagtggatcattcggttgcaggatattcggccgaggccattgacctggagctccgtagttgaacctgaagcttgtacctcataagctgtcatgtccgacgttctaagatctcaagtgtccgtattaagttcacacatgtcggacgttgatgtcgaatgggaggtgtcctacggtgctatcaagaagaggatgttctgcaagtacagctgtcgtggcgtcgcacttgatgccattcttgtcatgttcactcgaggaccttgttcagcttttaagagcgcagacgtcaggaggaggttccagaggggtttgagagtggtagagcatgtcggtcatcaagaaggtgggcaaggagacaaaagtatgctcctgtcgtgagtaattcagagccagtgaaatagcatctggcgcatcatggtccaggtcgccgagatgattgggagcattgttggtgtatccaggggcaagacgttccattcaggttgagatccagcttgcgatgattgtgcagcatcagtcagagttcttcatttcgtgcaacgcggtcacgctcgggtggcccgttaggggtgcccctcactctaggcgggttatccctgtcaggagcgtggtcatgcacatccgtggcctggcaagggtgttcagtgacatgccctgtcagcggttgtgggagatgggggcaaggaacattatctaagtccaaggtttggtttgcaccttctacagggtaacagtcagcgaaaaacatctatcggtgttaaacacaatgaagttgggaacggga

SEQ ID NO: 4715 - DNA, 464 bp, Zea mays
  misc_feature (11)..(11): n is a, c, g, or t
  misc_feature (13)..(14): n is a, c, g, or t
  misc_feature (23)..(23): n is a, c, g, or t
  misc_feature (26)..(27): n is a, c, g, or t
  misc_feature (32)..(32): n is a, c, g, or t
  misc_feature (34)..(35): n is a, c, g, or t
  misc_feature (38)..(40): n is a, c, g, or t
  misc_feature (42)..(42): n is a, c, g, or t
  misc_feature (44)..(44): n is a, c, g, or t
  misc_feature (47)..(48): n is a, c, g, or t
  misc_feature (51)..(51): n is a, c, g, or t
  misc_feature (59)..(60): n is a, c, g, or t
  misc_feature (65)..(66): n is a, c, g, or t
  misc_feature (69)..(70): n is a, c, g, or t
  misc_feature (86)..(87): n is a, c, g, or t
  misc_feature (89)..(89): n is a, c, g, or t
  misc_feature (93)..(93): n is a, c, g, or t
  misc_feature (106)..(106): n is a, c, g, or t
  misc_feature (108)..(108): n is a, c, g, or t
  misc_feature (112)..(112): n is a, c, g, or t
  misc_feature (121)..(122): n is a, c, g, or t
  misc_feature (134)..(134): n is a, c, g, or t
  misc_feature (136)..(136): n is a, c, g, or t
  misc_feature (167)..(167): n is a, c, g, or t
  misc_feature (173)..(173): n is a, c, g, or t
  misc_feature (182)..(182): n is a, c, g, or t
  misc_feature (197)..(197): n is a, c, g, or t
  misc_feature (201)..(201): n is a, c, g, or t
  misc_feature (208)..(208): n is a, c, g, or t
  misc_feature (219)..(219): n is a, c, g, or t
  misc_feature (223)..(223): n is a, c, g, or t
  misc_feature (228)..(228): n is a, c, g, or t
  misc_feature (230)..(230): n is a, c, g, or t
  misc_feature (233)..(234): n is a, c, g, or t
  misc_feature (237)..(238): n is a, c, g, or t
  misc_feature (253)..(253): n is a, c, g, or t
  misc_feature (262)..(262): n is a, c, g, or t
  misc_feature (264)..(265): n is a, c, g, or t
  misc_feature (267)..(269): n is a, c, g, or t
  misc_feature (271)..(272): n is a, c, g, or t
  misc_feature (277)..(277): n is a, c, g, or t
  misc_feature (288)..(288): n is a, c, g, or t
  misc_feature (291)..(293): n is a, c, g, or t
  misc_feature (297)..(297): n is a, c, g, or t
  misc_feature (301)..(302): n is a, c, g, or t
  misc_feature (306)..(307): n is a, c, g, or t
  misc_feature (312)..(312): n is a, c, g, or t
  misc_feature (316)..(316): n is a, c, g, or t
  misc_feature (330)..(330): n is a, c, g, or t
  misc_feature (335)..(335): n is a, c, g, or t
  misc_feature (351)..(352): n is a, c, g, or t
  misc_feature (354)..(354): n is a, c, g, or t
  misc_feature (361)..(361): n is a, c, g, or t
  misc_feature (369)..(369): n is a, c, g, or t
  misc_feature (408)..(408): n is a, c, g, or t
  misc_feature (418)..(418): n is a, c, g, or t
  misc_feature (459)..(459): n is a, c, g, or t
  Peptide Sequence Number=SeqID_10709
  Probeset Number=SeqID_19118
ggactccctcnannatatctacnatnntatantnnacnnnananggnnacnacgcgtcnntgtgnnccnngatgcttggattgatnntnctcntagctctttgtgnangcgnctgtagagnnacccatattccngnttacttgcctcaggctcgccattggtgaccntgaacncatgtgtgnagaactgtatgatgnaacnggtcttngtgagctatgntganaagancnatnntgnngctgaggcagctganggtcttacngnntnnnannatgcnagcggtgatgncannnatgntganngctnncatgntgtngccattgatgatgncgagnatgatgtcaccaatgnncntgccgangatgatgncgcaaatgattgatgccacaatgtcacttgcgacgccgnctcgcagatnatgctgcaacagcagttaccattcatgttcaacccaatggncatga

SEQ ID NO: 4716 - DNA, 530 bp, Zea mays
  Probeset Number=SeqID_19119
gaatgttccagtgaaacgcctaggcctcattttaaggaacctgttgtggccggcccggcctttgcatccgccgcgcccgtgggccctcctgctgaggccacctctccactcacccgactccgtcatcacacccgagcccgggacttccaactcggggactcgcggatccgaagtccgagtcaatcggcgaagagctcttgcagaaggggcagcagtgggtcaaccgaatcaacttcacatgcccgatctaggggccaatgtaaattgtcatgtgcaggagagaaatgatcgcatcttgtagctagcctgcatccttcctctctgcggcagctctggttttccttctgcgctgcttggtcttctcgctgcagcttctgctgccgatttacagttagtccactcagactgtagcaaggatcatatatgtttagcatagaggtatttgactgcccattgcccaaggagtagattcagctcttgggcatggtctgtatcatcctgacattctgttggatggagctccaattgta

SEQ ID NO: 4717 - DNA, 901 bp, Zea mays
  Peptide Sequence Number=SeqID_10710
  Probeset Number=SeqID_19120
taaatactatacagcaccgaccaagcacaaattcagtcagtaatggctcgctaatataggccgagaaaaaggaagcacacaaaaaagatggagacatcattctggaaacacaaagtgtagcatctgaaactcaaaactgagaacttacatgtgttgggcacctccaactaatcatatgtaaatgctaccttgcttgctgccctgtaaaaacctttcttccccgatttacaccgggcatttaaagccccattccaattacaccccccaaacaccatggactcccactttgcgccccccggttttcccccacggttccccccccctcgcaaattttgccccccccctgggtatgacaccctttatccgccaaacccgccgggaacaccccccccaaaagagaacacccctctcccctcttttgcggcgccaaaaactcttgtctccccccaaaaaaaaccccgaaaacatttgggagacaaaacaccccctattgcccccccgccctttcttttgagaaacgcggcgggaacaacacaccaatcctgggggagacccctcctgttttttaaaaaaaaaaaccaatcccccccccccctcccgggcggcgcacaccctccgtacaaaataaggtgacgttttcgggaaagtcacccgcccccccacttataagaaagacgttcacactccccgccaccacctctcccttcatcccacatcttccttatgaatccctcccccccgtgggggtgagaataacaaatatctttttcctttgtattagaacgctccccccctcccccacgaatgtcctttgccgccgccccccccgccggtgagagtatatttgcgcccaaccccacccccgcttctttacactacaccaacccctcgcgccagcagc

SEQ ID NO: 4718 - DNA, 1072 bp, Zea mays
  misc_feature (174)..(174): n is a, c, g, or t
  misc_feature (760)..(760): n is a, c, g, or t
  misc_feature (827)..(827): n is a, c, g, or t
  misc_feature (965)..(966): n is a, c, g, or t
  misc_feature (968)..(968): n is a, c, g, or t
  misc_feature (971)..(971): n is a, c, g, or t
  misc_feature (986)..(987): n is a, c, g, or t
  misc_feature (989)..(992): n is a, c, g, or t
  misc_feature (994)..(995): n is a, c, g, or t
  Probeset Number=SeqID_19121
ttgttattggtaaaaaatctcgagactgcatgagagtacacgagctgtttcccatgcttatagaatggtcactcagcgttaccctgccttaacatacaaccccaaaacccaaacgcttcccagcagcaagtaatataagctctaatagcagaagaagaagagtaccccgtcgangcccagatagaagagagagcaataatcatgtacctcctccattttccaggcgaggtggttatcctccgcttcctgtccccttcgaacgtctggacgtcctttgcggcgcatctccacattgaacatggcactgccgcctccatcctacttccaagacgacgacgctacccttgcagccatcgacggcggtgacgcggcctgttctgatgagcttgacaccatcgtcgtcgtcccggaagcagatgccgcagccgcagcccgctgccacctcgccggacagcaacaatggcggcttgtcggactccgacccagctgctggacgctgctgtgattatggcggccgacgaggagcgccggcgccggcggatggtgtcgaaccgggagtcggcgcggcggtcgcgcatgcgcaagcagcggcagctcagcgagctgtgggcgcaggtctcgcacctccgcggcgccagccgccgcctcctcgacgacctcaaccgcgcgctcaggagctgcgccgacgcccgccgggagagcgccaggctgaggagaagagaaggccgagctgacgaagaagctcgagcagctggtgcanggcggagaagggctcgtttatcggaggcgagcgagcccatgcaacgtcgtattgctgagtgaccaangaaagatgggagttaattaatattcatccgccgggcgaaccagattttaaacccggaggggatgtaattaatttatatctcgataactatagaacatgcggggggggggggggggcccccaaagaagaaagaaatagnngnctnccctcaaagggacanngnnnngnnaaaagcttatcgaacggcgaccccctgaaggggggggggcccggaaaccaattccccccttaaaggggaggggtaat

SEQ ID NO: 4719 - DNA, 928 bp, Zea mays
  Peptide Sequence Number=SeqID_10711
  Probeset Number=SeqID_19122
gagagtagcggagatgggagtcgtggggaagatgaaccgcacctcggtggccgttgagcgacgaggggtcgtgggataagggagcgcgggggggggaggggggatcggggagtgcagtaggtacagggacagcgtggaggttaatggggcgggcgaggggggtgtgcgaacggggacttcggtgctcgtgtacggggacggacgtgcgtctgcaggaggtggggggtaaagtagaaacagttgcgcgactccgtcctgcgcgtcggcggcttcatcgaaggctggccatcgtcccctcctctgtttcgcgcacatgcagtgttcattcaagcaggactcgtcgactagtcgtctcgtcaccaatcaccgtttttttttgggtctttgtagttgtatgatcggcggcgttgcctgtttcgttcgttcgttcgttttcctgttgggccatggtcacgatgcacctccacttgtaaagagagatgactgaactcgctacttgcttgatcctccactccacccacctgcattgtgggcggaaaacatgtacgtgttcttcgatctgaaaaggccagtttgagtgggtaaaaggcttaaactccagcgaaaccccgccgattattacccatcctgggtccttaatgggcgggaccgcatttttttccccccccccaccaggggggggggggggcggcctcaccccctctctcgccgctcgacggcgcccgccccccgccctgtccccccgcctctctccgccgcccacccgccccccctaccccgctccgccgcccgccgtgggcacctccggccccccgccccccgcatccggcgctacggctccggtgcgtccagccctacgccctccctcctccacctgccccgcgaccccaccgctgcgcggtggtgtgcccctgtctgtccagcaccg

SEQ ID NO: 4720 - DNA, 1043 bp, Zea mays
  misc_feature (74)..(76): n is a, c, g, or t
  misc_feature (83)..(84): n is a, c, g, or t
  misc_feature (144)..(149): n is a, c, g, or t
  misc_feature (176)..(176): n is a, c, g, or t
  misc_feature (178)..(178): n is a, c, g, or t
  misc_feature (1001)..(1001): n is a, c, g, or t
  Probeset Number=SeqID_19123
gagacagtggaggaagagtgaggcgtgttcggtgggaggagagagggtatggagtagggtgatagtttatgggnnngaagcgnnggagaaaggggggagtggggtaggggggggggggtgagggtaataaccagcatctttgtnnnnnnccaagcacgggaggacataaagagcananttttttttttagaatatgttccaaagagagcgcaggtggatgatctgttagttttgcgtaaaattccccataaatgggggggaaagccagcagaccgcgtgggtccgtaattggtgggcgtgtgctaaatgtaaccatgggcaggatcgcgaggcggtttgtacaggcctggcacggggggattttccatccagattcagaacttggtggtggccctcttgaggtcagaggggaggcaaatcgtgttttggggagtgagtgtatcggttcgttttggaggaaatgtagtgatgaagtaagaagatgtgttgcgggcaggtcgtgatgaagagggtaaagtgtcatggtggagtacgcattgggagagggctcaagtcttgcggtatcaaggtatgcttgatgtaagagacggcgtcgtttcgacggaggagtggatgaagactatgaactggtcaggattgggaatgttctcgacggcggagaggcgtgtgtggaaggatgaagacggtgtggtcgctggttatgttcagagatgggggaatttgtgccacgtggcggttacaggagctggtcattttgttccgacagataaagctgtgaattcaagggatatgattgaaggttgggttttggggaaaggattgttcggtggtaaagatgtgaagcagacaacttcgtcgagcttataccattcggtctaaatattgtgtgcttgtacttagttctgtaagattcaattcagattctaatggggtctggatttagcatttgttacgtcatgtggaaaagttcatttggtaggtagtggaggattgctgtggangagggggttggtggggtggcggggagagggtgggtgggtatg

SEQ ID NO: 4721 - DNA, 973 bp, Zea mays
  misc_feature (973)..(973): n is a, c, g, or t
  Peptide Sequence Number=SeqID_10712
  Probeset Number=SeqID_19124
cactcctaagggcgattgggatcctcgaggccggccggggtcatccatcacccattgcagtttcgagttcctggctggtggcgtggcaacggcgcctcgttcgctccgatctccgcgactcggatagataacccgccgactccgggagtgctagcgagcaggcaggcagaatggagcgccacgccgagaagccgccgccccccttcctcgcgctgtcctgcctcctcctcctcgccccgcccctcgtctccgccgtccccactccaagaagcctgcgcctggggagccagcagcagcacccgccggctctgaagctcaattcctctcaggacacggcggcgatcgcggcggcgatgaacacgggcaggccgacggcgagggtggccgtggaggtgaacgactaccagccgtccggccccaacaaccgccacgacccacccaagggtcccggaagaccttgtgaacggggctcagctggacgtccacgaatcaataatcctttctccgtcgtcgtcgtcttcaccaccggtagtacaaagtgggtgctctgcttgtgctcgtgtatttctaccgcccgcgcgtctaactagccgtggagacaaaaggtggtcgtaagtttgtacgggctgttgtcataacagcagacgagctcctctactctagttctagtagaaattaaggtcgtcgaaacaaagtcacctagctgcgtacctttgtatatatataccggccgcgcgtgtgtatatctgtgctgtgtgcaagccacatcggtgcagtgggttgtgttgttcttaggctggttggttgctgttcgtcggaaagaactgcactgcatgcagatcgatttcgtctcctgctgcaggtgcccgtacagtgtaccagcagattgagattgtccagcttgttagttctgtgcctctgacgatcttgatatactcctatatcatcttatatagttgtatattcatcagcn

SEQ ID NO: 4722 - DNA, 463 bp, Zea mays
  misc_feature (2)..(2): n is a, c, g, or t
  misc_feature (5)..(6): n is a, c, g, or t
  misc_feature (13)..(13): n is a, c, g, or t
  misc_feature (15)..(15): n is a, c, g, or t
  misc_feature (19)..(19): n is a, c, g, or t
  misc_feature (23)..(23): n is a, c, g, or t
  misc_feature (53)..(53): n is a, c, g, or t
  misc_feature (64)..(64): n is a, c, g, or t
  misc_feature (66)..(67): n is a, c, g, or t
  misc_feature (74)..(74): n is a, c, g, or t
  misc_feature (78)..(78): n is a, c, g, or t
  misc_feature (81)..(81): n is a, c, g, or t
  misc_feature (83)..(83): n is a, c, g, or t
  misc_feature (86)..(86): n is a, c, g, or t
  misc_feature (88)..(89): n is a, c, g, or t
  misc_feature (92)..(92): n is a, c, g, or t
  misc_feature (94)..(95): n is a, c, g, or t
  misc_feature (98)..(98): n is a, c, g, or t
  misc_feature (100)..(101): n is a, c, g, or t
  misc_feature (107)..(107): n is a, c, g, or t
  misc_feature (111)..(112): n is a, c, g, or t
  misc_feature (115)..(115): n is a, c, g, or t
  misc_feature (121)..(121): n is a, c, g, or t
  misc_feature (124)..(124): n is a, c, g, or t
  misc_feature (127)..(129): n is a, c, g, or t
  misc_feature (132)..(132): n is a, c, g, or t
  misc_feature (139)..(139): n is a, c, g, or t
  misc_feature (144)..(144): n is a, c, g, or t
  misc_feature (146)..(146): n is a, c, g, or t
  misc_feature (150)..(150): n is a, c, g, or t
  misc_feature (164)..(164): n is a, c, g, or t
  misc_feature (169)..(169): n is a, c, g, or t
  misc_feature (172)..(173): n is a, c, g, or t
  misc_feature (176)..(176): n is a, c, g, or t
  misc_feature (179)..(180): n is a, c, g, or t
  misc_feature (211)..(211): n is a, c, g, or t
  misc_feature (223)..(225): n is a, c, g, or t
  misc_feature (230)..(230): n is a, c, g, or t
  misc_feature (233)..(233): n is a, c, g, or t
  misc_feature (235)..(235): n is a, c, g, or t
  misc_feature (237)..(237): n is a, c, g, or t
  misc_feature (242)..(242): n is a, c, g, or t
  misc_feature (246)..(246): n is a, c, g, or t
  misc_feature (255)..(255): n is a, c, g, or t
  misc_feature (261)..(261): n is a, c, g, or t
  misc_feature (273)..(273): n is a, c, g, or t
  misc_feature (279)..(280): n is a, c, g, or t
  misc_feature (286)..(286): n is a, c, g, or t
  misc_feature (305)..(305): n is a, c, g, or t
  misc_feature (307)..(307): n is a, c, g, or t
  misc_feature (333)..(333): n is a, c, g, or t
  misc_feature (356)..(356): n is a, c, g, or t
  misc_feature (360)..(360): n is a, c, g, or t
  misc_feature (369)..(369): n is a, c, g, or t
  misc_feature (423)..(423): n is a, c, g, or t
  misc_feature (445)..(445): n is a, c, g, or t
  misc_feature (451)..(453): n is a, c, g, or t
  misc_feature (461)..(461): n is a, c, g, or t
  Peptide Sequence Number=SeqID_10713
  Probeset Number=SeqID_19125
antcnntcctccngnccgncgtngacgccggctcctctccccatcacctgganctcgaccgaangnngctcacngtgntcntnccnannaananncgnanngatatntgcnngtncctctnccnggnnnacnggttgcntgtcnanaagnactacaacctgccnaagcnccnncanatnnatgtgcccagatctgcaggtgttcaagttcntgaggagttttnnntgcanggngnanggtangganaccttctcntggaanaactactactgntatctnnccttanatgggattgagcacctacncnactacctgaacctcccgtctgagatngtgcctgccacggctcaagaagnctgncaagaacancgtggccgcccatttgggcttctgggcctcctggtgaccgcccaaggtgcccangccgttttggactggacagggnccaaannnttgggggnaa

SEQ ID NO: 4723 - DNA, 322 bp, Zea mays
  misc_feature (121)..(121): n is a, c, g, or t
  Peptide Sequence Number=SeqID_10714
  Probeset Number=SeqID_19126
ccccagaaaatctggttggtagcttgagttctgactcccaactgtgaagagtcagagatggcttatgccagccccgggactgatgatacgtcgacagatctagatactgacgagaagaatncacatggtacttactgttcttttgtttttttagatggtcagtgcattactacagttttttgttttttttgaataactcatgatgagtcatgagtagaacttgaaagtgttgtttatccattcagatgatgttctcgtgtcgacagaggcagattaagtaacgttacttgtattcttggcatatatactgagcttgttgttg

SEQ ID NO: 4724 - DNA, 264 bp, Zea mays
  Probeset Number=SeqID_19127
taattgtaatggtactcactatcgggttaatggggtagcgggccccccccagaggttaagagctttgaaagcttcatgtgaaattattttaatgaatcgcagatcggtacatggccaccacacactggtcaaaatcccaatagccacattcaaatttatccttatccatgcagaggcacaaccgaatcacagttcttcgtagatgggagcaggaacattttttgggacagctccggggggggggggggggggggactagtgagc

SEQ ID NO: 4725 - DNA, 678 bp, Zea mays
  Peptide Sequence Number=SeqID_10715
  Probeset Number=SeqID_19128
ccattgcttttttccgggggttgttccccttcggtgcgccaagtattgttggaggggttagccaaaggttgggtttaaacccactattgaatgcaggttaatcaggcttgagccggaaattatttgcagaggggcccagtgtgtgtaaggtttaatcgtgcaccagattccgttcaatcgccaaatggcagaggtttggttaaggcacaggggcccaggtttctgaggagggaagaagttcgatgattttgcacctttttggtgcaggagactcaagatgatgaagaagggctgcttaagagcgtatttcaactttcaaagcttatggcaacaagaaacaaatctgggaagtcatcagttttacttaatgtgaaggcatgggtcgatgagactgacatagccaagctcgaggaagctgttaggagtgtccagatggaagggcttgtgtggggcgcattcaatcttgtcccagttggatatggtatcaagaagctgcaaatcatgatggccatcgtcgtcggccttgttctctgtcggcactttcagtgagggcggtttgggccatgagccagtgaacgagtacgtgcagagttgcgacatagttgccttcgacaagatttaggcgtggcttacgatcagtccttcaccctggggtgctggcgatggtggtggctgggc

SEQ ID NO: 4726 - DNA, 1370 bp, Zea mays
  misc_feature (1)..(1): n is a, c, g, or t
  Peptide Sequence Number=SeqID_10716
  Probeset Number=SeqID_19129
ncgcgcaccaaagccaagcccagctctcgacagtcgacaccaccacagagcgcgcacgcaccaagccgcgcgcacacacgcacctcgcggcggtagcgggagtggatcgatggggagcagcgggggcagctgcgagcacttcctggggcagctgagctcgagcgacggcggcagcgcgccgcaccagctgctgcagcgggagtgggactgcggcaccggcaccggcagcaggcgcgggtcgcggcgctggtccaggaagaagggcagggcgcggggacacggccgcgcggctgggttataccgaactgcgggagtggagtagtggaccgataaggagctgctggtggagctgggcccactttccggggcaaagcagttcaagatatgggcgctcaccgacgtcgccaacagggggcaacttgctcgccatggtggcggtcttaccggcacaggcagcaagcgcgggtcgcggaagaggacctggggacgaggacgccgccgccgcggcgaagggctctgcagggcggaggagggcgtgccggggcgaaagcgagtaatagtggtggtggaccagggcgcccgcgctgacgacgccccgctgtcgggtgatcaacctgcatgcgtcccagcgggcgctcacccaacacaatcccccacgtctcgcctgcggagtgcggccacgggccagcggcgtgcagcaggagctggtggagggctccataaaccgggcggagtgcctgacgctggcggtgcggcgtcggagcaagggcgtgggcggctacctcgtcagcacccggtggcaggaagaacttctggctgctcgcctgaaacctgatcggtccacgaggaatcccccacctcatcctcatcctttgacgcaacgcacgagttttacttacttcccgggctaatcgtttttacaggaccaataataagtaactaccaccgccaccacaactactgcatctggttggcgatctgtaacctccattgtcctagggtgtgtgccagccagtgtgcgtgtgcctgattcgctctctctccccacgatgtggtgctgtattctgtgtatggtcttggtttagctgtgctgctgtagcccggagagggtaggctagctgttgtgtagtgaaggcacgcagaaggctgagccggtccgtttgccctgtgtgttctgggggaagtctgtcaggttttgcattagcggggatgcaggaggcgcgggacggggacgtcagtataccgggtgcggttgcgttgcggtgggctgggttggatgataaacaacgcgtcgaatgagcctgtgacatctgtttgctggcttgtttgcatgccgcagacgaggggcaaggcactcccctcgttgatac

SEQ ID NO: 4727 - DNA, 397 bp, Zea mays
  Peptide Sequence Number=SeqID_10717
  Probeset Number=SeqID_19130
tcgagcatgttcaacgccaaggccggaattcccctaaacgaccccttcatcaagctagtctcttggtcggctcccaagtgaggctacagcacccgtgtcgtcgacctgatccgacacatgttcaagacgcagtagagaaagatatttctgcctccctatcgtgggtcgtcgccaatggcctttggtcgcagaccatctttcctgcttgtatatgctgaaaataaatgtcatcaggtgcccctggacactggatccatgctggttttggacagcgttgtctttttgtgtttaccttatcagcgtccgtcctgaaaggaattcactaagttctagttcttttgcgctttgttaagaatataagcaattaggtttcaaaaaaaaaaaaaaaaaagcggcc

SEQ ID NO: 4728 - DNA, 627 bp, Zea mays
  misc_feature (1)..(26): n is a, c, g, or t
  misc_feature (627)..(627): n is a, c, g, or t
  Peptide Sequence Number=SeqID_10718
  Probeset Number=SeqID_19131
nnnnnnnnnnnnnnnnnnnnnnnnnnggtgtgggacgacccggaaagcttcttcccggagcggttcgagggcgcggcaaggcccaggggcggctgctaatcccgttcgggatggggcggcgcaagtgccccggcgagacgctcgccctgcggaccgtcgggctggtgcttgccccgctgctccagtgcttcgactgggacccggttgatggagctcaggttgacatgaaggagagcggcgggctgaccatgccccgggccgtcccgttggaggccatgtgcaagcctcgtgcagctatgtgcgatgttcttcgggagctctaatattctggcccctcctaggttctccctctataggtgaaagtttcatatgtagtttcgtaccagtatgcatgtctgatggtttgcgctgaactaagtcccttatcttttagtacaaaatttcgttcatatccccccatatatgtactagtcaataagtactggtcgttgttcggcgtgctttagcaaatttacggcgagaaaaacacccccatggatcgaattgctggcatcggctaaagggtgtatgactatgacgtagcttccaagttccgagcaaaaatattcgtattgtgggttgccttgn

SEQ ID NO: 4729 - DNA, 484 bp, Zea mays
  misc_feature (3)..(3): n is a, c, g, or t
  misc_feature (18)..(18): n is a, c, g, or t
  misc_feature (43)..(43): n is a, c, g, or t
  misc_feature (51)..(51): n is a, c, g, or t
  misc_feature (57)..(57): n is a, c, g, or t
  misc_feature (60)..(60): n is a, c, g, or t
  misc_feature (63)..(63): n is a, c, g, or t
  misc_feature (67)..(69): n is a, c, g, or t
  misc_feature (95)..(95): n is a, c, g, or t
  misc_feature (101)..(101): n is a, c, g, or t
  misc_feature (104)..(104): n is a, c, g, or t
  misc_feature (130)..(130): n is a, c, g, or t
  misc_feature (133)..(133): n is a, c, g, or t
  misc_feature (138)..(138): n is a, c, g, or t
  misc_feature (159)..(159): n is a, c, g, or t
  misc_feature (181)..(181): n is a, c, g, or t
  misc_feature (187)..(187): n is a, c, g, or t
  misc_feature (192)..(192): n is a, c, g, or t
  misc_feature (195)..(195): n is a, c, g, or t
  misc_feature (211)..(211): n is a, c, g, or t
  misc_feature (216)..(216): n is a, c, g, or t
  misc_feature (218)..(218): n is a, c, g, or t
  misc_feature (223)..(223): n is a, c, g, or t
  misc_feature (241)..(241): n is a, c, g, or t
  misc_feature (272)..(272): n is a, c, g, or t
  misc_feature (296)..(296): n is a, c, g, or t
  misc_feature (363)..(363): n is a, c, g, or t
  misc_feature (379)..(379): n is a, c, g, or t
  misc_feature (383)..(383): n is a, c, g, or t
  misc_feature (398)..(398): n is a, c, g, or t
  misc_feature (440)..(440): n is a, c, g, or t
  misc_feature (449)..(449): n is a, c, g, or t
  misc_feature (451)..(451): n is a, c, g, or t
  misc_feature (454)..(454): n is a, c, g, or t
  misc_feature (468)..(468): n is a, c, g, or t
  misc_feature (472)..(472): n is a, c, g, or t
  Peptide Sequence Number=SeqID_10719
  Probeset Number=SeqID_19132
acnctctaagccaaaatnctaatggccgcccggagctccctcnctgcaganctcccntcncanccgnnnaggaaccccttcacagaggggaaganggttgnacncgaaggcccaatcgcgggtgaggcancanccccngttcttggggagcctatgganttgatgactgctctgcaggtcnggatgnagaanccnagtgctcatgacgggncttgngnagggnctccgcgaggatgtcaangccatcgagaagaacgccgctcagctttgcntgcttgctgaggactgtgaacagncagattacgtccagttggtgaaggcactctgcgctgagcacaatggtcacctggtcactggtcctgncgctaagactcttggngagngggccgggctttgcnagattgactctgagggcaaggccaggaaggttgtaggctggntcctgcgtntnctntcaaggactacggngaanaatctgaggggc

SEQ ID NO: 4730 - DNA, 862 bp, Zea mays
  Peptide Sequence Number=SeqID_12452
  Probeset Number=SeqID_19133
tttttttcacttttggcggggtttgggggaatctggaaacctgggggcttgtttttcccattttagggctttgggccgcgccggagccccgcccccaccccttccctggggaggtccgttcacctccctccaaacctttttagttttccggggattaggcaagcgtggcttccacccgatggccttggtagaatcttttgcatagtttgggggaagttgagcacgcttggggttgtcacagatcgtgtcgctggttttttctaaggggtttggctttggtaaggtatgtttggttgaaagatgctactaaagggaatagaaggaatggatggaagatttctggatggatgggttattttcggcggatatgctggatccagcccaccgctgcagatgggaggggcaactctgcaggcacaacaatcatggggcactcgttctggttcctggggctcacagtagatgaagggacaatcattgtacctggctgtgcgtctgacagcgtatcagtcagccatcgcagtctacatttagatcatagctaccatggtgttgtcccaggtgtgaacacccttgcctgattcaatattcttgtcgtgttggactggtcgtttacggcctccacatggagaagcagtaggggaaccttatatggaccgagcaggtattactgtcagcatgcaacagcttcggaccagtgctaataatgtcttctcgtcccttttatttgaattgtcgtaagccttatcagctgctgatggcatgtggtgctcttgtgctaccggataaaggctcgtagctcggaataaggacacgttggcaagcggaaaaaaaaaaaaaaaaaagcttatcgataccgtcg

SEQ ID NO: 4731 - DNA, 920 bp, Zea mays
  Peptide Sequence Number=SeqID_12453
  Probeset Number=SeqID_19134
ggcatggatcgtgcgattcgcaaggaccagctaggccaggatacgtcagctcgcatttagcctctctaaaggtacaaaatctggagtacgtctcgtgagcgtacgctatagcatagtggatgcactggctgcaggcatttccatcgagtcctttccgtcgacggtcataatcgagagctacagcagttcgactctttgctcgtccgtagtagtcatcacatgtggttctgtgacctcgcagagataggtgggcgagctatccatggagttgatggacggcggcagatctcatcgtattcaagtggagatgggtatggtgctacgctctcaggctcctacgtccagcatgcgcatctatggccgatggattctagtatgatttggcagcgtcaatatcctctaaggtagccggttagctatcatcatatataggaatgtgggcgtgttccactgtacctgttctcctggtagtcaaccacaggtgcagattactcccataatctcaaaatggatgagctcgagcgacatgtgtcctgcactcttagagatcaggtagcaagaatatgtgcttcctgggaccatgagacgctagagcctgacatctaggaggcctcatctcacatgtcagatgtggttctcctgcgattcaagtacccttgtccgttggtcaagggtcctttaaagaaagcaatagagaggttcttggaagctaaatgcagagttgatgccaggttcagaagcaagggctaccttgtactagtggattcattcacgaaggtcactaaaatggcaatgtgtttttagcatcatagatagagcgcaataatatttgatatggatctagatgaacatactcagggtaccaagctattgaacagcctcgggccaatgtttaaacacaataaagttggaactggagg

SEQ ID NO: 4732 - DNA, 788 bp, Zea mays
  Probeset Number=SeqID_19135
acctaataccgatatttaatgtttatattctgggattacattatcggagtttcagaaatattaacgataacttttaatgtagcggaaataactaacggagaagaaccgagtaagatggcgaaacttgtacaggctactcctagtggacctctcctgcgaaaccaataacccactcgaccgtctatcctgatggcagggatgaacgtcaagtaacaccatcaacaaatcatcctaaggagaacctttatttttagcacttagatagtgactgctgtggggaactcccttggcgagcacccactgtctatgtccaccatccttcactacatccaccaactgcatcttgatgacaccaccacattcactggttccatcatcgtctctctctcctgccaaactcacattcgggctgcacatgcgtccacggcttaagggtttctccaaaacatgtatcgcgcgaggttccgcgagaacttatagcgaggacttacggcgtcgcgagtgcagttgttcacagcactgctttccacgacaattatgacgaacacctactacgcgtctatgttgaggagttgcatgcaagactcgcctaccagaattgcgtcccagatgacttggcgcgatcacatgcaggcagccgaagctggtagggcaagatgctgtggtatgacctcatgctacctgctgcagctgcttggggctacgaggatgatgtgctgcatctatgcatagctaccggaatgagctacggggaagagcacaggcaggacgctgatactggatgagta

SEQ ID NO: 4733 - DNA, 590 bp, Zea mays
  Peptide Sequence Number=SeqID_12454
  Probeset Number=SeqID_19136
gaaagctgatgggagtgaaatggatctttctactatcactagcgcttctccaaggtgccttctaccgccgcatgaggtggtcagtcttgaattcccgaaagctggtcctggatgtcgtcaactaatgactatcattaccctttttttattgaaatatgttgagccgtttaggagcattcaaaataatgagttggtggtgtacaatcacgcgtccgatgttttcgctctccttacaggatatcatgattctttactctgctgtgcgcatacgtaagggtctgcactacaatccctacttccctggtggtgttgcaaccatgccgatcacgcttaatgatggactttgttgagtatgaagatggtacacctgcaactgaagcccagatgggtaaggatgtcgtatcattcctttcgtgggcagctgagcctgagatggaagagagaaagctgatgggagtgaaatggatctttctactatcactagcgcttctccaagctgcctactaccgccgcatgaggtggtcagtcttgaagtcccgaaagctggtcctggatgtcgtcaactaaggactatcattacccttttttta

SEQ ID NO: 4734 - DNA, 1254 bp, Zea mays
  Peptide Sequence Number=SeqID_12455
  Probeset Number=SeqID_19137
acctatcaaaaaaattttaaaaaatcacatcatattgactggcttgtgcttggagacttcaatctataccgtacttcacacgatagaaacagagctggtgctgactttttcagagatgtttatattcaatgatgctaccttttaaaaggtaaacgttttacttggacaatcaagaagtagccgcctttgttggagagactttattggttttttacctcaaccagtggcaacctaactagtattaatacagatgtcactactctcgcaatggaaatgtcagatcatgtcccatgtctgagtaacatctctactcatattccaaagagacacactttcatctttgaaaactattggttgaaacgtgaggacttcatgcaacatgtcaatttgggcaggcatattggaagacaacacccagatgctactaaaaatcttcctgcagataaagtttaaaaacttgagaagagtactaaaagaatggaaaaaaacccattccaatttgaaagagaattttgccaatattaagctcattctatctctattgaatttcctacaagagttcggagatttcactccggttgagtgaaattttagatctttagtggagaattagcttgtttcacttcttcaggagcacaaaatttattggaaacaaagatgagcacttaaatggttaattcttggtgataccaacaccaaaagttttcatgctcaggcaaaatacagaagaaatctgataatccaattacttgatgaccaagaaaatgcagtagatacacgtaatgaaaaggcaaagttgatttagctttctttcagtaagagattgggtacaaacacctttccaggcctaaactttgacatgaatttgtttatcaatgatcaagttgacctctctagcttactggagagttataataagaaaaagattgatgtaattatcaaaactttgccttccaacaaagtctctggtcctaatggttttaatactgattctataaaacaaatgttggccaattatttgtgaggatgtttataggttatgtgaatctttctactctgaacatgtttttctcaaagaggttcaaactacttaaatcttgagtacaagatgaatcgcccatacccactggtggaaatggttataggagtgtctcccatgtcttgaatcagcccaaacttcccacaaactcattcaagaattcactcaaaaatccaataaaagagctccgggagaggttacaagagggctctctg

SEQ ID NO: 4735 - DNA, 643 bp, Zea mays
  misc_feature (601)..(643): n is a, c, g, or t
  Peptide Sequence Number=SeqID_12456
  Probeset Number=SeqID_19138
aaacctcacgcaatcgcaagtattaagatcatcttgaccgtcgtacatcctaaggtggcaggaggcgctcatgttggcgtcgctcatcgacgacgagaagaaacttggcgactgccagttcgacctctggaagcagtcctacgtgaccgcatgtgtcgctgtgtatgacaagctccggctgtccagagcgactacagcatgttgtccatcgccaagcagggggatctcatggttgtcgccaacgtcggcaactctcgggttgttctgggcaccgcatccgacgacggtgtcatcacgccgttcagctcatcgtccatctgaaacccaacctgccactagaggagtagcgcattaggtagtgcaacggccaggtgtactacctcgctgatgagcccgggtgcacttcatctggtagcccagcgaagagtcattggtactcgtcatgtcgcgcgtgttcgatgactactatatcaaggattatggcgtcgtctcggcaacgaaggtgacgcggaagaggatcgatagcaatgaacagtaattctctttgcaaacacacacagtgtgggacctgctctccaatgatgagaccatacaaatcgtnnnnnnnnnnnnnnnnnnnnnnnnnnnnnnnnnnnnnnnnnnn

SEQ ID NO: 4736 - DNA, 726 bp, Zea mays
  Peptide Sequence Number=SeqID_12457
  Probeset Number=SeqID_19139
cggcctacaggagaatccgccgtaaagtacaagggaccatgcccaggtgtttgtggggtagggagagggcgtccacggtgcccggtttttttccttggggatgggccgcttgcggggtttgcccttgggttcccgccatgtttgttgggtgccttcccagcaaaaaagggccaggtggggccaggaggttccagggttcgtgcagaagtcgtttatcatgcgcagcaagctgcttcgggctttaaattggggaaaggttttggggctggtgcccaggaggttgccttcgtggccggggtgggcggcgccgctgagggggtggccttcgatgtcgcacagcaggtggtcatggacgtacgcgtggcgcgacatcttggctggtcgctcttcctcctgctccggctacggcttcgcgtcttctgctggggtctggttggttcgcacgcggtgtctcggttggacggctggaacgggggtgctggggaatatatcggttgcgtagtttgggcgactagcctgggggcgacaggacgtgccgccgtggaatatggaaccctatatttcctccacttctcttttccaatttttattcttttttcttttcatattattttttctgattatttgttttatgtaaagataaacagacggaatatgaattgtttattacatatcttataacaaagcaatgttcctagaggcctcttaatttaatcctaaattgag

SEQ ID NO: 4737 - DNA, 1104 bp, Zea mays
  misc_feature (822)..(822): n is a, c, g, or t
  Probeset Number=SeqID_19140
aaccgagacaccgcgtgcgaaccaagcagaccacagcaagaagcgtagtcgtcgccggaaggaaaggcgcggagcaagatgtcgtggcaggcgtacgtcgatgagcacctgatgtgcgagatcgaaggacaacatctcagcgccgccgccatcgtcggtcacgacggcagcgcttgggcgcagtccgagagcttccccgagttaaagcctgaggaggttgctggtatcataaaggacttgatggaactctggtactcttgaaccaggtgaaatgattccatctttggcgagcttcacgcccagattaagaacaagaaattgacagttgatgtcaaagcaaactcagaatcagatcttttaacaacaatcactgttgatgagttcggtactccagggctaaaatcaattatcaatttggttgttccagaccagaggtcagggaagcttgaattccaatacctacatgaatatgctggtgtgaatgcaagcgtcgggcttaattccaatcctatggttaacctttctggtgcctttggaagcaaagcactctcagtcggcgttgatgtctcatttgatacggcgactagcgatttcaccaagtacaacgctgccctgagcctcaccagtccagatctaattgcctccctttcatctgaaataacacggtgataccctggtttgcgtcctactaccacctggaaaagaaacattcaggcactgcttgttgaactgagttgtctcacagcatgtcgagaaatgaaagcacgctaatctttcgggtccagcactcgctggatcccaaacgactatcaagaaccgttncaacaactacggcatggccagggcctttgtcagcatgaatgccgtccaagtccttcgtcacattctctgtgacgttgaccccagggatttgaaaaacaccaaagttggctatccttggggctcagcactgaaggccagaggttttgggcctcaagaattattttcgattcatgggatggaaaaaacatgggctgggaacacctttcgcggcccattttggatttgaaccaaaattttttttccctcccgggagggccatttcccgggaaaatttggggtttt

SEQ ID NO: 4738 - DNA, 988 bp, Zea mays
  misc_feature (485)..(485): n is a, c, g, or t
  misc_feature (601)..(988): n is a, c, g, or t
  Peptide Sequence Number=SeqID_12458
  Probeset Number=SeqID_19141
acctcggcacgaggggcgtcggagcctcacgataacgaaccgctttccacgcccctcgaaccccgaacccccaaatcccggacgcgaccgctgaaccctagcactactccggccctctgcctgccggccccggcgatcccccgccatggccctcccccgagggcaacaacgtgggtcttcgacttgtccccttaggacactttcgcggtcgccgccgacttcgcggcagcccccgcgggaggatttttctgggcagcgccgccgtcgctgcagccgcaggcgccagtgcagtctgtcgttgccgcgtcggctcccaacccatgtatggaaatcagtagctctgtggactgtggtcaggaaaaagaacagccaacaaataaacgtccaaggtcagaaagtactacagaatcaagcacaaaagcatccagggagaaaattagaagggacaagctgaacgagagaattcttggaattgggtgccattngccccggggaacaccttttaaaattggcaaaccccagtttattgggtgatgctattcgtgtagtaggtggattcccgtagagaagcaaaaaagtctcagggatccaagtggggatnnnnnnnnnnnnnnnnnnnnnnnnnnnnnnnnnnnnnnnnnnnnnnnnnnnnnnnnnnnnnnnnnnnnnnnnnnnnnnnnnnnnnnnnnnnnnnnnnnnnnnnnnnnnnnnnnnnnnnnnnnnnnnnnnnnnnnnnnnnnnnnnnnnnnnnnnnnnnnnnnnnnnnnnnnnnnnnnnnnnnnnnnnnnnnnnnnnnnnnnnnnnnnnnnnnnnnnnnnnnnnnnnnnnnnnnnnnnnnnnnnnnnnnnnnnnnnnnnnnnnnnnnnnnnnnnnnnnnnnnnnnnnnnnnnnnnnnnnnnnnnnnnnnnnnnnnnnnnnnnnnnnnnnnnnnnnnnnnnnnnnnnnnnnnnnnnnnnnnnnnnnnnnnnnnnnnnnnnnnnnnnnnnnn

SEQ ID NO: 4739 - DNA, 434 bp, Zea mays
  misc_feature (118)..(118): n is a, c, g, or t
  Probeset Number=SeqID_19142
tgcaagaagtcggccccgccaaggccggcaagatcagctccgaggagtttgtggcgatgatgaagaccggttcggcctggagaaaggcgtcccggccctcctcgagagggaggttcancagcctcagcatgaagcttataaaggacgggtcggtaaagttgggtgtcgagtgaaaaccgccccgaccctcgttcttgtgtgtgtgtgtgtgtggtgtgtgtgcatgtagttttaggcccttggccccctaaccagaagaactgtaggcctttttttttggtcccctcgtgactgttgcgtggaaattttaaataggtggaagtggaaccctccgatttgtcttgctacctgtgtaattagctatcccagtctcgctgccaggccctgggccaaaaaaaaaaaaaaaaaaaaaaaaaaaaaaaaaaaaaaaaaaa

SEQ ID NO: 4740 - DNA, 507 bp, Zea mays
  Peptide Sequence Number=SeqID_12459
  Probeset Number=SeqID_19143
acatcgcttgctcgctcgttgcttttggcaggtatagcaagcacacatcgatagagcggagctgggcctcagttagagctagcagctcgtctccatcctcgtttagctgtcaatcatccacagcaacaccatgtcagtagcagggttcttgcttttccagggtcccagccctatgatagtgcgatacgtgtacgccgtactctttctactggccaacttgtgtgcgtggctcatgcgagagaaccgcatatcatattacatatcgcagcggggcaacgcccgctgtcacggtgaccggggctgcttagcgccgggggtcacggtgaccagggctgtctcgcggctcagagtgtgctgacaattagccctgtgtattagtaaatctttcccagcctcctctactactataaacaacttctctcccatccaagacagaaaaaattaacggcgctgcgggtggtggcccctgctcggtgcccctttcgtccgcggggcttcttctctcag

SEQ ID NO: 4741 - DNA, 1680 bp, Zea mays
  misc_feature (1)..(868): n is a, c, g, or t
  misc_feature (1680)..(1680): n is a, c, g, or t
  Probeset Number=SeqID_19144
nnnnnnnnnnnnnnnnnnnnnnnnnnnnnnnnnnnnnnnnnnnnnnnnnnnnnnnnnnnnnnnnnnnnnnnnnnnnnnnnnnnnnnnnnnnnnnnnnnnnnnnnnnnnnnnnnnnnnnnnnnnnnnnnnnnnnnnnnnnnnnnnnnnnnnnnnnnnnnnnnnnnnnnnnnnnnnnnnnnnnnnnnnnnnnnnnnnnnnnnnnnnnnnnnnnnnnnnnnnnnnnnnnnnnnnnnnnnnnnnnnnnnnnnnnnnnnnnnnnnnnnnnnnnnnnnnnnnnnnnnnnnnnnnnnnnnnnnnnnnnnnnnnnnnnnnnnnnnnnnnnnnnnnnnnnnnnnnnnnnnnnnnnnnnnnnnnnnnnnnnnnnnnnnnnnnnnnnnnnnnnnnnnnnnnnnnnnnnnnnnnnnnnnnnnnnnnnnnnnnnnnnnnnnnnnnnnnnnnnnnnnnnnnnnnnnnnnnnnnnnnnnnnnnnnnnnnnnnnnnnnnnnnnnnnnnnnnnnnnnnnnnnnnnnnnnnnnnnnnnnnnnnnnnnnnnnnnnnnnnnnnnnnnnnnnnnnnnnnnnnnnnnnnnnnnnnnnnnnnnnnnnnnnnnnnnnnnnnnnnnnnnnnnnnnnnnnnnnnnnnnnnnnnnnnnnnnnnnnnnnnnnnnnnnnnnnnnnnnnnnnnnnnnnnnnnnnnnnnnnnnnnnnnnnnnnnnnnnnnnnnnnnnnnnnnnnnnnnnnnnnnnnnnnnnnnnnnnnnnnnnnnnnnnnnnnnnnnnnnnnnnnnnnnnnnnnnnnnnnnnnnnnnnnnnnnnnnnnnnnnnnnnnnnnnnnnnnnnnnnnnnnnnnnnnnnnnnnnnnnnnnnnnnnnnnnnnnnnnnnnnnnnnnnggggccaggtctcccggagacagtactggatccccccgccgccgcagatcctggtcggctccacgcagttctcctgcgccgtctgcaacaagaccttcaaccgcttcaacaacatgcagatgcacatgtggggccacgggtcgcagtaccgcaaggggtcggagtcgctgcggggcacgcccccgccggccttgctgcggctgccgtgctactgctgcgcggcaggctgccggaacaacatcgaccacccgcgggcgcagccgctgaaggtcttcgacacggtggaggcggacgaccggcgcaagcacggcgacaggccctgccgctgacgacgctccggcaagaggttcgccgggcgtgggggctggcgcacgcacgagaagaatcgcggtaagctcttagtctgcgtcttccgctccgacttcaagcacaaacagtagctcaaggatcacgttcgctccttcggcagcggccacgacctcgtcgattagcgaccgtctatgtataggatgaggtggcggaccagtagacgacgataacgacggagttacgacgacctgcagacttttgacgacaacggcggcgccggcgcagaccccagcgacatggtcgtcatctaggtctaggcttcctcattcgaccgatctagtactactactactactccatcgattgacatgaatagttctcgatccgccacttattaagttattagctagcttgctcattccctaaattagctgccgacttttttagctagctatagatttcagtagcttatatactagcttgttggttctgattagagctgn

SEQ ID NO: 4742 - DNA, 545 bp, Zea mays
  misc_feature (229)..(229): n is a, c, g, or t
  misc_feature (312)..(312): n is a, c, g, or t
  misc_feature (344)..(344): n is a, c, g, or t
  misc_feature (349)..(349): n is a, c, g, or t
  misc_feature (356)..(356): n is a, c, g, or t
  misc_feature (385)..(385): n is a, c, g, or t
  misc_feature (410)..(410): n is a, c, g, or t
  misc_feature (424)..(424): n is a, c, g, or t
  misc_feature (474)..(474): n is a, c, g, or t
  misc_feature (493)..(493): n is a, c, g, or t
  misc_feature (499)..(499): n is a, c, g, or t
  misc_feature (529)..(529): n is a, c, g, or t
  misc_feature (536)..(536): n is a, c, g, or t
  misc_feature (539)..(540): n is a, c, g, or t
  misc_feature (543)..(543): n is a, c, g, or t
  misc_feature (545)..(545): n is a, c, g, or t
  Peptide Sequence Number=SeqID_12460
  Probeset Number=SeqID_19145
gtcccccccccccccccggtatatatgattgttggaatatgactctaactccatcttgttcgtctatataaatagacttcccttacatattggacatcacatcacataatatatctgtttttctatgagttttttcctctatgttaggggaggtttttttttcctacataacctttggggccgggtttccagcttcgtttttaccactaatcccccccttttcacctcnactaacccccatcatccccgcgccgcgacttgctgcgtccgcgctgggcttggctgagcgccacccccgctcgaggcgccacntagttcccagccctatctcgtccctgacgggnagcanggggggngcccactctaccggcgaacccggtccgcncaaccccccccgctctgttccctcncccgcgcaccaagncacccaatccccattcactaccggttaccatacccccctgcacccacccncccccgcggttccgctttngccccnaaccctcgggcttcacataacaccccgatntcccccncgnnccnan

SEQ ID NO: 4743 - DNA, 811 bp, Zea mays
  Probeset Number=SeqID_19146
gaacgggtccggaaactcccggggtcgacaaacggcgaacaaacccccagcaaaaaacgtcggcccgcgcggccaaacaaacgcgacccccgcggggcctttcgggcggaaaaaacaccacacccacgacaggctcactcatagacctttctcccatcttcatctatcgttaggtcgtctcgccgtggggagccccgaaacctcgcaatctagagcgcctcgagcaagctcgggccatcctagcgggctttcggaatcgtctcgacaatcggcgctacgttatcgttttgttaactcggagggggtttgagccagtgctgaatgtagcgctatcagcagcggtgatcggtagaggggggctccctcgccacagggtgaatggggagccctgaaatgaatttttattctatgtgttgagttttgggaatatttattccataaatagccctctcaaaacaataattcgaaggaacccggctatgcgcgaactcggaatcggcctgattggcacaggctttatggggcgtgcccacgctctggcattcaataacgcacgggcggtgtttgaactgccggtgaagctcacactggccgccctggccgatgccgataccgaacgcgcgacacgctgcgccgcggactgggggtttgcccaggcccatggcgactggcagcagttgatcgacgatcccaaggtcgatgtcgtcgccatcacgacccctaaccatttgcacttcccgatggccatggctgcgctggcggcgggcaaggcggtgtattgcgagaagccgctggcggtgagcctggagca

SEQ ID NO: 4744 - DNA, 1210 bp, Zea mays
  Peptide Sequence Number=SeqID_12461
  Probeset Number=SeqID_19147
gacagcgtgcgcgcgtcaccctcggcacggatatgaggcgaagggcgggagcgctacggcggctcctggggagaggggcggcaaaccgcgtgtcgcggggcaggctgggcagctacgtcgagggcgtcggtggcatgagagcagcacaacgaggagagggaatagtgggcacgagcggagacggcggttaggatccggcgaggccctggagggccagcgcagttgggcgtgcaggacagctaaatctgtgggtgcgtcgtgccgtagtcagttttgttttagaggcttacgctgggggccatggatgttgtgatgattaggaaccttggaaaggatcagcaaggacttgggaaaggcctaggtgttgaggaggagcagcaagggcgccacaacaggaaggagatcaagtctgactcggctgcgactccatctcggttttcaggaccagtctgcactaaaatcgatgcccaagatgcatccggactccgattgcgacagaattgatatggttggaaagataaggagattatctaaccaacccaactgggtccaccataaaattcgtctggaatcaacgggaatcggcaaaacaagtcagcgttcagaatctgttccggcgttgtgacggcggcttttggagttttggaacatgtatcttcgttgagcccattacggatgcgcccagggcttgcttaaccctagtgtctttattaatacgccgacgcatccttgctgagaggcgcatcgttagatacgcggagactctggtctcgagcggtgtgcgggcttggggtaggttggagctgggctcacgcttgacggggttgttcccggtcgtcggccggttcggggcgcgtgcgggacagtgtgtgggggacggcgtgcgcctatgcgctaccgtcccggcggggtgttggtggggccgtcatcgtatggtcggcgcgcggcgccgcgtcgtggagactggggggtgccagtgaggtcgacagggtagcgacgagttgtctgcttgtgcggtttgacgggagggtttggcgcgcaggctgtacgcggccgacgcggtgcgaaccggcgatggagcgcagtgcgggtgacgtggaggggccagcctggcgtccggctgccgtgcgcgcccgccctcgtgcccgcctgtgagcacgctcggccgctccatgatgcgtcacatgagccgaccggcggcgcccgcgcg

SEQ ID NO: 4745 - DNA, 1676 bp, Zea mays
  Peptide Sequence Number=SeqID_12462
  Probeset Number=SeqID_19148
ccgcctgcgcgtccgcaggggaggcagcaatcaatcaaacctgatgatcccctatcctctatgctctttattcttgtcatggacgtgctgaatttgctaattcaaaagagcttcgttggaggggttgctgcaacccctgtcatcacgttctctccagcacaggatttccttgtatgttgatgatgtcgttatgttcctaaagcatgttgcttctaatgttaatttggtcctcgatatcatcaggttgtttggtcatgcctcaggcttaaggataaatgtccaaaaaagtagtgtttatcctattcgttgtggtgatgaggatttgaattgtgcgcagaatcatctcccttgccctatctcggtatttccatgcaacttgcaagtaccttggactaccactgtcggtgagaaagttgtcaagggtacattttcaagctatattggaccaggtgtggttagtcttctgcaatgttggaaggcagagttgatgacaagggccagtagagcaacttatgtgcagtttgtgatgacaacaaaaatgatttatgcatctttggcgttagatctcccagcttgggccattaaggtgattgacaagttgcgaaaaggattcctttgaagaggaagttaggaggccaaggttggtcattgtcttctagattggccgaaggttactaggcccaaagatctaggtggtcttgggatcagtgacctctagaaccttagctgggctttgcaagcatggtggccatggttacaaaaaattgatcctagtagaccatggtcttctttccccattcatgtgtgtctggaagtgcgaactcttgtgggagtagtagttgtgacacagattggaatcgttggttcaatggcaactgtatccaagactttgctcctgcgttgttggggttggttcctagacgtttgactgattccttgaaggtccaagatgctctcccaggttttaagtggatggcaagcttgagaggtgcgctttctgtaagagttattgttgagtttcttgacctttgtgaagctttagaaggtagggtgctgcaaccgggggtttcaagaccaacaaatctggaagtttgctgcttcatgttccttctccacaagttcagcttatagggctctctttcaaggatctgtggagtttggaccgagtgatagggtatggaagtcatgggcacctagaaagtgcaaatttttcatttggttaattgagcatgacaaatgttggacaattgatagacttgacaggcaaggtcttgaccatccggagaggtgcttgctatgtgatcagactgctgaatcaatcaatcatttgctagtcgaatgcatctttgccaaacaattctggtttgaattattgaagattggatgctggcaaggcctctgtccccaataggatgaccattccttcgagtcatggtggatgagtcatgagttgtagttccagagtgattgaggcggcaaggaaagacttcaactctttggttattttaggagcttggattatctggaagcataggaacaggtgtgtgttcgatggctgcaacccaagcctggttgtggaccttcaggcagctagagaggaggctctcctttggtctctatcagagatcaaagctttgtctttccttctgatcgatgagctctggatctagttgtgt

SEQ ID NO: 4746 - DNA, 391 bp, Zea mays
  Peptide Sequence Number=SeqID_12463
  Probeset Number=SeqID_19149
gagagcgcccgccaaagcaaggtcactaggcgggttgaggctgagtcgaaatgactaactgatcctggcacgtacacttgcaaatgatttgtttgtatgccaaatttatattgatgatatcatatttgggtctactaacgaatctacatatgaagagtttagtaggatcatgactcagaaattcgagatgtctatgatgggggagttgaagtatttcttaggatttcaagtaaagcaactccaagagggcacagggggcggcctcggcccctgcgcgcgtcgttctggcccttggcgtggttcgcgtggccttggcgtggcctcgcgcttccccgtttaccgctagcgcgcatttaggaaacctaacgggtggctacagtcccggggaatc

SEQ ID NO: 4747 - DNA, 482 bp, Zea mays
  misc_feature (82)..(82): n is a, c, g, or t
  misc_feature (212)..(212): n is a, c, g, or t
  misc_feature (258)..(258): n is a, c, g, or t
  misc_feature (301)..(301): n is a, c, g, or t
  misc_feature (309)..(309): n is a, c, g, or t
  misc_feature (311)..(311): n is a, c, g, or t
  misc_feature (320)..(320): n is a, c, g, or t
  misc_feature (322)..(322): n is a, c, g, or t
  misc_feature (324)..(324): n is a, c, g, or t
  misc_feature (334)..(334): n is a, c, g, or t
  misc_feature (338)..(338): n is a, c, g, or t
  misc_feature (343)..(343): n is a, c, g, or t
  misc_feature (345)..(346): n is a, c, g, or t
  misc_feature (351)..(351): n is a, c, g, or t
  misc_feature (360)..(362): n is a, c, g, or t
  misc_feature (364)..(366): n is a, c, g, or t
  misc_feature (369)..(369): n is a, c, g, or t
  misc_feature (373)..(374): n is a, c, g, or t
  misc_feature (376)..(379): n is a, c, g, or t
  misc_feature (381)..(381): n is a, c, g, or t
  misc_feature (383)..(391): n is a, c, g, or t
  misc_feature (393)..(429): n is a, c, g, or t
  misc_feature (431)..(482): n is a, c, g, or t
  Peptide Sequence Number=SeqID_12464
  Probeset Number=SeqID_19150
agcaattcccgaaatccccaaaagtcgcccttcccccaaccctatccaaccgaatccagcggcggcggcggcggcggcggcntatggcggcggttattgaacgccgaatggtggaggtggtcgacttcgaccttagacgacgacgacctcatggcggaaggatggccggggccggattccagcgccggccccccacctcgcgtctccgtccnaccatcgcggggcgacgacgcgccgcgtaggaccaagggccgcggntttccgcgaggaccccaactcctctgcgccccgcgattcgcgnttttgggngngggggggangngncgacctcgantcgntcggngnnccggnacccatccnnncnnntgnaggnngnnnngngnnnnnnnnngnnnnnnnnnnnnnnnnnnnnnnnnnnnnnnnnnnnnngnnnnnnnnnnnnnnnnnnnnnnnnnnnnnnnnnnnnnnnnnnnnnnnnnnnn

SEQ ID NO: 4748 - DNA, 473 bp, Zea mays
  misc_feature (6)..(6): n is a, c, g, or t
  misc_feature (10)..(10): n is a, c, g, or t
  misc_feature (18)..(18): n is a, c, g, or t
  misc_feature (26)..(26): n is a, c, g, or t
  misc_feature (41)..(41): n is a, c, g, or t
  misc_feature (46)..(46): n is a, c, g, or t
  misc_feature (67)..(67): n is a, c, g, or t
  misc_feature (71)..(71): n is a, c, g, or t
  misc_feature (86)..(86): n is a, c, g, or t
  misc_feature (103)..(103): n is a, c, g, or t
  misc_feature (121)..(121): n is a, c, g, or t
  misc_feature (175)..(175): n is a, c, g, or t
  misc_feature (194)..(194): n is a, c, g, or t
  misc_feature (201)..(201): n is a, c, g, or t
  misc_feature (203)..(203): n is a, c, g, or t
  misc_feature (213)..(213): n is a, c, g, or t
  misc_feature (219)..(219): n is a, c, g, or t
  misc_feature (222)..(222): n is a, c, g, or t
  misc_feature (224)..(225): n is a, c, g, or t
  misc_feature (233)..(233): n is a, c, g, or t
  misc_feature (236)..(236): n is a, c, g, or t
  misc_feature (239)..(239): n is a, c, g, or t
  misc_feature (241)..(241): n is a, c, g, or t
  misc_feature (261)..(263): n is a, c, g, or t
  misc_feature (277)..(277): n is a, c, g, or t
  misc_feature (304)..(304): n is a, c, g, or t
  misc_feature (306)..(306): n is a, c, g, or t
  misc_feature (309)..(309): n is a, c, g, or t
  misc_feature (317)..(318): n is a, c, g, or t
  misc_feature (320)..(320): n is a, c, g, or t
  misc_feature (325)..(325): n is a, c, g, or t
  misc_feature (332)..(332): n is a, c, g, or t
  misc_feature (337)..(337): n is a, c, g, or t
  misc_feature (339)..(339): n is a, c, g, or t
  misc_feature (355)..(355): n is a, c, g, or t
  misc_feature (359)..(359): n is a, c, g, or t
  misc_feature (363)..(364): n is a, c, g, or t
  misc_feature (372)..(372): n is a, c, g, or t
  misc_feature (375)..(375): n is a, c, g, or t
  misc_feature (378)..(378): n is a, c, g, or t
  misc_feature (382)..(383): n is a, c, g, or t
  misc_feature (386)..(386): n is a, c, g, or t
  misc_feature (399)..(399): n is a, c, g, or t
  misc_feature (403)..(403): n is a, c, g, or t
  misc_feature (408)..(408): n is a, c, g, or t
  misc_feature (410)..(411): n is a, c, g, or t
  misc_feature (413)..(413): n is a, c, g, or t
  misc_feature (416)..(416): n is a, c, g, or t
  misc_feature (420)..(421): n is a, c, g, or t
  misc_feature (434)..(436): n is a, c, g, or t
  misc_feature (438)..(439): n is a, c, g, or t
  misc_feature (442)..(442): n is a, c, g, or t
  misc_feature (444)..(444): n is a, c, g, or t
  misc_feature (455)..(455): n is a, c, g, or t
  misc_feature (457)..(457): n is a, c, g, or t
  misc_feature (460)..(463): n is a, c, g, or t
  misc_feature (467)..(467): n is a, c, g, or t
  misc_feature (470)..(470): n is a, c, g, or t
  Probeset Number=SeqID_19151
ttcctntagncggcggantccccatngtcgcccccgggccnggtcntcctcctgcagttccgcgttngggnggtcctcttcgacanggcctcggccgcgctcntcctgcccccccggggtngggcccctgtcattctccattccatcaacgccaactatctgcgagttcatgganatgatatttatttctcttnggaagangnggaggaacgncacccntcntnnttttgtgnatnctngngctgcgttcagaccaaggannntttttttccccccncccggggggggggggggggggatgaananttncctgaccnngnccccngcccatntgatnanaaatttcgtttttttnggtngggnnggcttttnttnggngacnnaanatttaccccctcntcanccccntnngngcntggnnttggctttttctnnngnnttncncgattcacatntnaannnncggnggnttt

SEQ ID NO: 4749 - DNA, 334 bp, Zea mays
  misc_feature (329)..(329): n is a, c, g, or t
  Peptide Sequence Number=SeqID_12465
  Probeset Number=SeqID_19152
tttgaaacacggaattctgaagatctattcacaactatttataataaattttcatatgaagatatcggagccactccgctctcattttgttagaatgccaaacatccaaaaatggaatggagcaactgtattcttacactgttctcaaccaaatggagcatgctctcggagtttgtgtttggttagtgggttgatgcaggttggaacgagttcaagccacaacaagcccacgtttggttcaaaatgcttgtgggttaggttggttttggcaatcacaggttctcgaatgggaatgtgaaaagtatggattggtgtttaatcacagtacngttgg

SEQ ID NO: 4750 - DNA, 689 bp, Zea mays
  Probeset Number=SeqID_19153
gatgcccgttgcacttacagcgatagcaccatccgactagaaaattctagtggcttgtggcagaccattgtcagtcgcaaatatgttaaaaataaatctatcatttctgagaaaaaaacctactgattctcacttatggaaaggtatcctctcagttcgagacaaattttataatttttgcaaaaaaaatattggcaatggaaagagcacaagtttctggaaaaacatctggtgtggctctgaaaaaatggcggacaagtaccctaacttgtttgagttcgcttatgataaggatatcacagttcataaagtcatctccccgaactttcaggcgcttattttcagaagaagattaactggtgttttaggtgacgcttataatgacctcattacccaatgtagtgatgtcttgctttctgaggaagaagataattctgtgtggctgttgggtggtaaaagtttttcagttaattctttgtacaaagaaatgaagagttctcagattgctattccttcgaattttttgtggaaaaccagattaccacataaaattaaagtgtttttgtggctggtcagatataagaagattcttacaaaggataatctgtttaaaagacactagcaagggaaccttgattgtgttttctgtggacttctggagtccatagatcatttattttttcattgtc

SEQ ID NO: 4751 - DNA, 819 bp, Zea mays
  misc_feature (788)..(788): n is a, c, g, or t
  misc_feature (791)..(792): n is a, c, g, or t
  misc_feature (798)..(800): n is a, c, g, or t
  Peptide Sequence Number=SeqID_12466
  Probeset Number=SeqID_19154
gggcagagatttagagtttttatttgtggatgggcgccgctctggtatttgggggggtcggggacgatgcagaaattgatatatagtcgttgggggggccgggaggtctccggcgtggcggtctctttaggaattaggggatcccccgggttgcaggaattcttttttttttttttttactagtacgcactaggaattcatttattaagttcttgagagttgaggagataaccataattaggatcatagtcataaactataatgtataatacgtatgcatgcatcgatcgaccactctctatatatagtgtttttttttttttacaccaccgctaactctttcattttgggtcttgatctctcctcctgatgaggctcaggagacatggccttccttttgctaatattattattgttgttattgttactgttattgctgttgttgttgatgacattgtcattgtttgaatctatggaactgttagcagattctttttcacaagaattgtcaagcgatttcagaaagtacggctgaagcttatccaaatccgataactgaagaggcttcaatagaaactcttgtgccccttcttctaagcacctatcaacaatttaatcaacttgggggggggggcctacgtagctgactcgagggggggcccggtacccaattcgccctatagtgagtcgtattacaattcactggccgtcgttttacaacgtcgtgactgggaaaaccctggcgttacccaacttaatcgccttgcagcacatccccctttaatttntcnnctcccnnnggcgattcaaaagtccccc

SEQ ID NO: 4752 - DNA, 2279 bp, Zea mays
  misc_feature (1)..(49): n is a, c, g, or t
  misc_feature (2279)..(2279): n is a, c, g, or t
  Peptide Sequence Number=SeqID_12467
  Probeset Number=SeqID_19155
nnnnnnnnnnnnnnnnnnnnnnnnnnnnnnnnnnnnnnnnnnnnnnnnnctgcctcgtccggtcctctcggctctcggtgtgggaagggaaccaaaccgagacggaggcggagtacgacgcctgccttccctcttccgccgagcgcccgctgcgtcattctcgtccctcctcttcatcttcatcggccaaccgattgccgctgaccccggccatcggcgactgtcccccggtttttctttaacgatttccgattcgattccatggccggctggaccgattccaccggcagcggcggccgaggatcaggaggaagaggcttcacgacaccccgctatactactaattccaccaatgacatgatccatggaggtaccagcggcggaggcggaggtagcggcaggtggagaggaggcaggtcaagggggtggccgcccccgcagcctcaccatcgctaccgccgtgtggatgccgttcatcgtgactccgcgcctgtctctctatcggagctacaggcggcctcctccacatccagccgccaccggtaccttactcgttccatctcagcggacaagtcttccgcctcgggaaccgcgggttcaacagataccagggagcctgacgacaaggctaaccgcagcgctgccaactttgagtgcaacgtctgctttgacatggccgctgaacctgtggtcaccaggtgcggccatctcttctgctgggagtgcctctatcagtggctccatgtccattctcaccaccgtgagtgccctgtctgcaagggtcaggtagctgatgatgctatcatacccatctatggggcgtggtggacccgcagtatctggggacaacgttccccccaggcccactgcagtcaggatagagagaacaaggcagcaacaacaccagctgacaattttccatcctcccaatgtttttgaattcataggccttggcttggccgctgcagccagaggagagcactccaccgagcagctgctgctgccaactttctcccaccccacggtgtttgatgatgacgacgggcatgaatgggacatggatcttgtgaacaacggcattgatcctttggacctcataactcccggcacccaagacttggacatggatgattatgatggcactattgatttcgatgatgatgattatgaatatgactaccatttggcgggtgctacgttgtttgcttctgctgggactgaggccagcaatcccagctcttcacaagcacatgctggtatgatcaatattagggacaacattcttggcactgccaccagcatctatcatcagcaagagtttggctactctggcgtgagacctcataataacaggggacggcgccggcaccgtaatcgcgcaagggcatcagcaaatcactcaggcgctgatgaaatggtgatcgaggataccagtcatttctaccttcagaacggtggcagttctaacattagtgcaggcgctgcttttcggcccaacggtggctggactgggagaagaggaagaagcaacctgaactcgaattcaggtggtggaagcaacctgaactcaaactcaggtggtggaagcaacatgaactcgaattcaggtggtggaagaggagggattcagggtaccagaagacagaggacaaattacaactgatagtgatgttgggacatgcttcgaaataggagcgataactgatgagataaacaaacttaatcctttgtcttccattttttttctttgtttctctcgtattattaatccttttgtagcctgtggctattggcaccttgtcaaacatcttctctccgtttcccctgaattgttatgcctggttaatgttacttatttttagtaccaccatccacaaaaaatctaaggaatataggatcctggttaagttgcggaaaaaaaaaaaaaaaaaagcggcctttggagtgcagcattggggaagttgagaccccgaactacggtagcccagacgaaatgttcagcaaggattttaatccttgcctgaccaattactttggcgaatgaaacattgctgtctatttccggctgactgtgcggggttggaggtaaaggtaaggtcgttggtggatattgtggttctggaagggtacaacatcgcggagctgctggtgatatacgaggcggagtccggggtccgcagcctcgtgctcggatccccctcccacttatactcattgtttttaacatgtacaatttaagtgcctcaatcaagaactggtaaaaatctggccatttgttn

SEQ ID NO: 4753 - DNA, 830 bp, Zea mays
  misc_feature (459)..(459): n is a, c, g, or t
  misc_feature (465)..(465): n is a, c, g, or t
  misc_feature (467)..(467): n is a, c, g, or t
  misc_feature (472)..(472): n is a, c, g, or t
  misc_feature (474)..(474): n is a, c, g, or t
  misc_feature (478)..(478): n is a, c, g, or t
  misc_feature (480)..(481): n is a, c, g, or t
  misc_feature (489)..(489): n is a, c, g, or t
  misc_feature (491)..(491): n is a, c, g, or t
  misc_feature (495)..(495): n is a, c, g, or t
  misc_feature (497)..(499): n is a, c, g, or t
  misc_feature (502)..(503): n is a, c, g, or t
  misc_feature (507)..(507): n is a, c, g, or t
  misc_feature (516)..(516): n is a, c, g, or t
  misc_feature (518)..(518): n is a, c, g, or t
  misc_feature (522)..(522): n is a, c, g, or t
  misc_feature (526)..(526): n is a, c, g, or t
  misc_feature (536)..(537): n is a, c, g, or t
  misc_feature (539)..(539): n is a, c, g, or t
  misc_feature (544)..(544): n is a, c, g, or t
  misc_feature (547)..(547): n is a, c, g, or t
  misc_feature (550)..(550): n is a, c, g, or t
  misc_feature (552)..(553): n is a, c, g, or t
  misc_feature (555)..(555): n is a, c, g, or t
  misc_feature (562)..(562): n is a, c, g, or t
  misc_feature (566)..(566): n is a, c, g, or t
  misc_feature (574)..(574): n is a, c, g, or t
  misc_feature (576)..(576): n is a, c, g, or t
  misc_feature (580)..(584): n is a, c, g, or t
  misc_feature (589)..(589): n is a, c, g, or t
  misc_feature (602)..(603): n is a, c, g, or t
  misc_feature (606)..(606): n is a, c, g, or t
  misc_feature (609)..(612): n is a, c, g, or t
  misc_feature (619)..(619): n is a, c, g, or t
  misc_feature (622)..(622): n is a, c, g, or t
  misc_feature (624)..(624): n is a, c, g, or t
  misc_feature (626)..(626): n is a, c, g, or t
  misc_feature (628)..(629): n is a, c, g, or t
  misc_feature (631)..(632): n is a, c, g, or t
  misc_feature (642)..(642): n is a, c, g, or t
  misc_feature (645)..(645): n is a, c, g, or t
  misc_feature (652)..(652): n is a, c, g, or t
  misc_feature (654)..(654): n is a, c, g, or t
  misc_feature (657)..(657): n is a, c, g, or t
  misc_feature (659)..(659): n is a, c, g, or t
  misc_feature (661)..(661): n is a, c, g, or t
  misc_feature (664)..(664): n is a, c, g, or t
  misc_feature (666)..(666): n is a, c, g, or t
  misc_feature (673)..(674): n is a, c, g, or t
  misc_feature (678)..(678): n is a, c, g, or t
  misc_feature (681)..(681): n is a, c, g, or t
  misc_feature (686)..(686): n is a, c, g, or t
  misc_feature (694)..(696): n is a, c, g, or t
  misc_feature (699)..(699): n is a, c, g, or t
  misc_feature (708)..(708): n is a, c, g, or t
  misc_feature (712)..(712): n is a, c, g, or t
  misc_feature (714)..(715): n is a, c, g, or t
  misc_feature (720)..(720): n is a, c, g, or t
  misc_feature (722)..(722): n is a, c, g, or t
  misc_feature (728)..(728): n is a, c, g, or t
  misc_feature (730)..(731): n is a, c, g, or t
  misc_feature (736)..(736): n is a, c, g, or t
  misc_feature (739)..(740): n is a, c, g, or t
  misc_feature (742)..(742): n is a, c, g, or t
  misc_feature (744)..(746): n is a, c, g, or t
  misc_feature (748)..(749): n is a, c, g, or t
  misc_feature (759)..(759): n is a, c, g, or t
  misc_feature (762)..(762): n is a, c, g, or t
  misc_feature (767)..(769): n is a, c, g, or t
  misc_feature (776)..(776): n is a, c, g, or t
  misc_feature (779)..(779): n is a, c, g, or t
  misc_feature (781)..(782): n is a, c, g, or t
  misc_feature (785)..(786): n is a, c, g, or t
  misc_feature (789)..(790): n is a, c, g, or t
  misc_feature (794)..(795): n is a, c, g, or t
  misc_feature (797)..(798): n is a, c, g, or t
  misc_feature (804)..(805): n is a, c, g, or t
  misc_feature (809)..(809): n is a, c, g, or t
  misc_feature (822)..(822): n is a, c, g, or t
  misc_feature (825)..(830): n is a, c, g, or t
  Peptide Sequence Number=SeqID_12468
  Probeset Number=SeqID_19156
atcgtaaggtggtgaacatcgatgatccaagtgccccatttttcgccgcacaaggagggcatgatgtccctgtggtaacatattcatttgagaacaagaaggctgatgtgcacacgcttaaataccagctttccctgtttgagacggaggttctggtacagacaccacatgggatcctcgagatctcctctgggctgcttggaagagataacatctacagcatccttgcaactgtggcagatggcattgcagggggtgcaccactggaggactatagtcaggggcatagaagagggggttgccatccccggtcggtgtgcgcctatcgatgaggagcaagcctccggggtcgtccgccatctcgcttgggcaccgcaccctctggcgtggcttctgcatcgtgtcagggtcctgcgaccacgccgggttgtcactgtgggtgctggtcgcggtgaatgnacaatnanaaacnanacgnannagtagtananacantnnntanncacncactacaancnatantcantataacgtanncntatanaangcncnntncaccgcntccncgaattantntgcnnnnnacatntcgaacaacaccnnganagnnnntatacanaangnananngnntggacagatncanaatcatntngcngncncancntacacannatangtncacgntcacatannntanaatagtaancacntnnacacntnaatgantnngaganccnnangnnnanngacacatcantgngatcnnncatacanatnannatnnaannatanngnntacccnngcanctacagatacatnacnnnnnn

SEQ ID NO: 4754 - DNA, 568 bp, Zea mays
  Peptide Sequence Number=SeqID_12469
  Probeset Number=SeqID_19157
attaaggtcaaaatctagattatacgacatccaactacgatgtaaattttggagcatgctctgaagaaaattttggagtatgcatacactggtttggtcactgtagatgatgccattgttaagcctgtgaaaacacttgcaaagtattgccactttaaatgatgaagtggcaagtcttaatgcccaacttaagacttgcaaagatgactttgacaaattaaaatttgctagggatgcctacaccattgatagacatccctgaattaaggatgggcttggctttcgaagggaagccaagaacttaacaagtcaaagggcttccattctaaacaaggagaaagggaaggctcctatggctagtaagatatgaggaatcgtgaattggcttgaccatattactatcagcgccagatatataaaaaaacctgtcatctttactcctgtcttggatcgccgacatggtcgcctctcccacgctctacctccacacacacacaacacacaggtacgcacagacgctatgtacatctagacacctcatgcatggtctggtcgcctaccatgtctc

SEQ ID NO: 4755 - DNA, 1440 bp, Zea mays
  Peptide Sequence Number=SeqID_12470
  Probeset Number=SeqID_19158
atggacaccctagtgacactataccatagaggaagcgtagaggaagatgtttatgaaaaatgttagttttgatggaatgaagaaggtgacggttatgtttgatgaaaggccctcttttagcccgattatctctagggcttgtgaggtgatttgttgcaatttaaatgaccctagcatatcaattgagggtttattgtcccatgttgcatcaggaaaaatattccaagggttgatccccattggctctgaagatgactgggtgaaatatgtcaaaattgtgatgacggttcttcctctatgtttggatctggtcgtgtgaaagttaaccattaatcattttgaagctccagtcgagttatctccacaattgcccaatgcatctccttgtccgaccgtccggaagaagtggttgctgtggcgaatgctcaataggctccgactgaggttggaatttcttgtccagtctgtggtgattgtggggcctccaattctgtggtagcccccaggagatccctttgacccaggatcatcctagaggtccacagctagacaatgttgcttatcttcatatgccactatcatccaacatggaccacacatgcagggcgtcaaatagtgttgatgttcagatagaggatggggaggagccatatgaggctgcacgagccttagattctgatgacgatcgtccagttcaagaattgatcgagcaagaaatagaattcatcatacgtttgtgtcctgaacatgaccccacagtacatgaatttagcagtctcagacattcccatggtgcatatgcagaaggacgagatgatgagctgctagaggctcctgataacagtgatagcattgtgattaagaagggcttgatctttaaggacttgcctacacttagaaggtggctacaggaatattctgtgaagtgtaagatatcattcaaggtaagacattcgtatgcacatcgacgttacacagttctgtgcgaggtgtcggattgtaattggagggtatgtgcccgcaagcagaaggcaactggaaaattataggtgcacacacttgtgcccagatggagctgaactctaagcaccgacagttcacatctaccctcattgcgaaaaggcttttggtgaaattgaagggtcaaccaaatttgaaggtgaagtcaattatgaccatgacttgggagttgttcggttacaggataaagtatgggaaagcatggagggcaaagaaatgggcatggaagatgatatatggggattgggaggagggttacaagaagttctcagtgttgttcaatgcaatgaaagcaaaaaaacccagacatgcattatgagtacatccctaaacccaacgaatggaggaatgtcagagtgatattcttctgcgctttttggtgtttttgaatggacaaagcacgcatccgattctgcaggg

SEQ ID NO: 4756 - DNA, 801 bp, Zea mays
  Peptide Sequence Number=SeqID_12471
  Probeset Number=SeqID_19159
ctacgcatgtttgcgtacggtagtgttactgactccatcgatgagtacatcaaaataggaaacagttccttattagagtgtctcgagctattgtgtagaggtgttattgcatgttgtagggcggagtacatgcgtcatcccactgctgatgaccatatgcatcaattagctaaggggtagggaagggattttctagtactatagggagtatagcttgcatgcattagaagtggatgaactatcctattggatggagaggacaattcataagaggggacattagatctccgacaatcatgctcgagacggttgcctcacatgacttgtggatctggcatgcttttttagggtgacgacattgaatgataatgtgaatgtgctcaacctgacatgcttaaggatgaagcacaaaatgtgaacttcacggtgaatgaccatgagtacaaccaagggtactacattgtcgataacatataccctctgtgtttggtgttcatgaagacgattccactcccatagactccaaagtagtgagtgttcattgtgtgccaggagagcaaatggaagaacatgtacatggtatttgtggtgcttaaggctcgatttcatattctcacaaccttaggtcgttctttctttcagtaggtactcggtgtgatcatgtgtgcatatatcattatgcatactaatgatcattgaggatgagcgtggaggaccatacgaagtggacgatctcgtccaaatacggctagctgtgtttactctacggcacggcctacgggtgtcgggtgcgttgccttg

SEQ ID NO: 4757 - DNA, 1441 bp, Zea mays
  misc_feature (1)..(467): n is a, c, g, or t
  Peptide Sequence Number=SeqID_12472
  Probeset Number=SeqID_19160
nnnnnnnnnnnnnnnnnnnnnnnnnnnnnnnnnnnnnnnnnnnnnnnnnnnnnnnnnnnnnnnnnnnnnnnnnnnnnnnnnnnnnnnnnnnnnnnnnnnnnnnnnnnnnnnnnnnnnnnnnnnnnnnnnnnnnnnnnnnnnnnnnnnnnnnnnnnnnnnnnnnnnnnnnnnnnnnnnnnnnnnnnnnnnnnnnnnnnnnnnnnnnnnnnnnnnnnnnnnnnnnnnnnnnnnnnnnnnnnnnnnnnnnnnnnnnnnnnnnnnnnnnnnnnnnnnnnnnnnnnnnnnnnnnnnnnnnnnnnnnnnnnnnnnnnnnnnnnnnnnnnnnnnnnnnnnnnnnnnnnnnnnnnnnnnnnnnnnnnnnnnnnnnnnnnnnnnnnnnnnnnnnnnnnnnnnnnnnnnnnnnnnnnnnnnnnnnnnnnnnnnnnnnnnnnnnnnnnnnnnnnnnnnnnnnnnnnnnnnnnnnnnnngcccgccccgacccacgttagggcgttcgcgccccaagggcccgtgccattggctcagcccgcccggccgacgccccccggcgggccccctcgaaagccccttcccaacggggggggtgttgacatcctttgcgtaacagccttaaaaccccccggtttgatctaagtggcaaagtgcctcctctcccccgatcccctgattcccacccccttgtcgcccggatccctcaaaaaaaaaaaaaaaaaaaaaaaaaaaaaaaaaaaaaaaaaaaaaaaaaaaaaaaaaaaaaaaaaaccccgatagtaattcaacctagtacgagaggaaccgtttattcccccaattggtcatcgcgcttggtttaaaaaccagtggggcgaagctaccgtgtgccggattacccgggaacgcctttaagtcagaatccaaggtagcaaccggggcctttgctttccgcccgccccgacccgcgttagggggttcgcgccccaaggggccgtgccattgtttctgcccgcccggccgaagcgcccagtcgggcccctcccccgctccctgtccaacggcgggagttactgaatcctttgcaagcgactcaaaacccgacggggctaagtaggtggcaaaggggcggatttgccccgatccccctgtcctccagccccgcgtcgccagaccctgtccaagggaacgggcttggcggaatcaccggggaaaaaagaccctgttgagcttgactttagtcccactgagaaaataggccggaagccccccggtggagtcctctcgttaggtcgtcgggcttagattaggttagctagcttgcctttaataaaaaaaaaatggtggttgtcggcgtcggcttcggcggtttgcttttttttccttcagtgcgtcggtcggtttaaagtttgtcccgtgtcccgtccttgaactgcagtttttgttaataaagtattgtttttttttggtt

SEQ ID NO: 4758 - DNA, 474 bp, Zea mays
  misc_feature (12)..(12): n is a, c, g, or t
  misc_feature (36)..(36): n is a, c, g, or t
  misc_feature (70)..(70): n is a, c, g, or t
  misc_feature (79)..(79): n is a, c, g, or t
  misc_feature (81)..(81): n is a, c, g, or t
  misc_feature (84)..(84): n is a, c, g, or t
  misc_feature (86)..(86): n is a, c, g, or t
  misc_feature (91)..(91): n is a, c, g, or t
  misc_feature (96)..(96): n is a, c, g, or t
  misc_feature (100)..(100): n is a, c, g, or t
  misc_feature (103)..(103): n is a, c, g, or t
  misc_feature (107)..(107): n is a, c, g, or t
  misc_feature (111)..(111): n is a, c, g, or t
  misc_feature (125)..(125): n is a, c, g, or t
  misc_feature (129)..(129): n is a, c, g, or t
  misc_feature (136)..(136): n is a, c, g, or t
  misc_feature (141)..(141): n is a, c, g, or t
  misc_feature (152)..(152): n is a, c, g, or t
  misc_feature (156)..(156): n is a, c, g, or t
  misc_feature (158)..(158): n is a, c, g, or t
  misc_feature (163)..(163): n is a, c, g, or t
  misc_feature (166)..(166): n is a, c, g, or t
  misc_feature (169)..(169): n is a, c, g, or t
  misc_feature (173)..(174): n is a, c, g, or t
  misc_feature (186)..(187): n is a, c, g, or t
  misc_feature (200)..(200): n is a, c, g, or t
  misc_feature (205)..(205): n is a, c, g, or t
  misc_feature (241)..(241): n is a, c, g, or t
  misc_feature (267)..(267): n is a, c, g, or t
  misc_feature (275)..(275): n is a, c, g, or t
  misc_feature (297)..(297): n is a, c, g, or t
  misc_feature (375)..(375): n is a, c, g, or t
  misc_feature (378)..(378): n is a, c, g, or t
  misc_feature (384)..(384): n is a, c, g, or t
  misc_feature (388)..(388): n is a, c, g, or t
  misc_feature (393)..(393): n is a, c, g, or t
  misc_feature (396)..(396): n is a, c, g, or t
  misc_feature (407)..(407): n is a, c, g, or t
  misc_feature (410)..(410): n is a, c, g, or t
  misc_feature (413)..(413): n is a, c, g, or t
  misc_feature (434)..(434): n is a, c, g, or t
  misc_feature (438)..(439): n is a, c, g, or t
  misc_feature (445)..(445): n is a, c, g, or t
  misc_feature (447)..(447): n is a, c, g, or t
  misc_feature (449)..(449): n is a, c, g, or t
  misc_feature (454)..(454): n is a, c, g, or t
  misc_feature (457)..(457): n is a, c, g, or t
  misc_feature (461)..(461): n is a, c, g, or t
  misc_feature (465)..(467): n is a, c, g, or t
  misc_feature (469)..(472): n is a, c, g, or t
  misc_feature (474)..(474): n is a, c, g, or t
  Peptide Sequence Number=SeqID_12473
  Probeset Number=SeqID_19161
ccctctctcctncgcctggcacatcctcggcggcgnggcagcatgcttcttcaccggggtggctgctccntcacccggngnggngngctgnttctncgangangggnaggnctgcgggggacgcnacgnggaggantgtgncggatgcgacncggngnactancgntcngacnnatgccgggaganntgaatatccagcnatagnatccatattgggtagaagagggcatcgcatacaagnatcttacgggcgttagcattgaccgnccaacaancatatgccctattgcaacaacnatccttaatgaatctatatctccaaagaatcgcagcacaacaactacaacaacagttgcttccaataatcaatcaagnagntgcagngaancttgntgnttacctccagnaanaanaatttcttccattcaatcaantaanntggggngnancctgntgnttanttgnnngnnnnan

SEQ ID NO: 4759 - DNA, 746 bp, Zea mays
  Probeset Number=SeqID_19162
tgattttgtagtatggtttggaccatagtcacagtttctgggttgacatggtcaaggcctcaaggggccgtggaacatggcttgttacttattggaggtttttgcccttcggctaaaaaatgaatccgtgaacctgggtctgggtcgatgaacctggtcaaaggacaaaatgcattgaacccgttttatgtgactgcgttgcaccacagctgtgcttcccattgtgacatttggaactactaagcttatgcaaatggtgcacttcgtccttttacctgatgctatgatccttttttacttctgttggtctttgttctagcatttgcttgccgtatagatagctctggtgatcatttttcccagcggtttttagcaaagtgtattaatccctttattcgaaatgataaacttttctgttgcataggggtatcaccacttattctcatgcttctccactcttccccccctcatgttctccccccctgcttctggcaataagccatcctctcgggaatctagctccccgcctgtatgccacacttgctcaacacccgaccaagccttttaaacccggcctcttaaaatatggctgtgcggcaaaaccacccacactctgatggcacccctctgtcaaaacgcttccctccaaggccatccgaaaactaggcaccctccccttggcacggcgcgcaaaataaacacgcgttaccgaacctctttcaccgcgctcccctataactctctcc

SEQ ID NO: 4760 - DNA, 886 bp, Zea mays
  misc_feature (1)..(40): n is a, c, g, or t
  misc_feature (641)..(886): n is a, c, g, or t
  Peptide Sequence Number=SeqID_12474
  Probeset Number=SeqID_19163
nnnnnnnnnnnnnnnnnnnnnnnnnnnnnnnnnnnnnnnnattttacgtcccagctatctttttgttacatgtaaactggcaaagcaatcacaatgcagctaaacataacatcacattctactttgttgtactagccctgcaatatatttgtacactgatgcagagaacattcttcaagccttcgaaatcttcactcttgcttgttcaagctaacttctgatgatgctcaaacgccagaaaggtagggaggttcaagcgctcatggtcatggtcatggctcgcagcttagctctgctaaaatactggaatgcacaacgactaataacttctgatagcagaaactatttctattgaaaacaggattccggcttggattatatacccataaagaaacagcatcggcgaattctccgttacagtattattcaggtacacttgaccgcagttcatggcctatggatttgagtctggccaacaaacaagaacgaaacagcagagccattcatccattattacaaactctcatacggaaacctaacccgatatttacatgccactggaacaagcaaaattggatttagtgcttgctactgattctgcagacgttcgtcatcatggcccgcctcacgcctttgcctgnnnnnnnnnnnnnnnnnnnnnnnnnnnnnnnnnnnnnnnnnnnnnnnnnnnnnnnnnnnnnnnnnnnnnnnnnnnnnnnnnnnnnnnnnnnnnnnnnnnnnnnnnnnnnnnnnnnnnnnnnnnnnnnnnnnnnnnnnnnnnnnnnnnnnnnnnnnnnnnnnnnnnnnnnnnnnnnnnnnnnnnnnnnnnnnnnnnnnnnnnnnnnnnnnnnnnnnnnnnnnnnnnnnnnnnnnnnnnnnnnnnnnn

SEQ ID NO: 4761 - DNA, 1031 bp, Zea mays
  misc_feature (1)..(64): n is a, c, g, or t
  misc_feature (707)..(1031): n is a, c, g, or t
  Probeset Number=SeqID_19164
nnnnnnnnnnnnnnnnnnnnnnnnnnnnnnnnnnnnnnnnnnnnnnnnnnnnnnnnnnnnnnnncccaagacgtacaagcacacggccaccgaaccaagcaagcagcatcggaccagcgggcgcatcgatcgagccagtactcctcgaccggcccggccatagaagcataataacactacagggggtgtggagcggagaggtagatggcgagcgggagcggcaaggcgaaggcgtcgtcgtgggcggcggcgatgagcgtcggcaccgtggaggcgctcaaggaccaggccggcctgtgccgctggaactacgcgttccggcaggcggcgcagcagcagaagcagcgcgccaggaggccagcggcaggcgcgagcggctcagtcggccccggcagcggcagcggcagcgcgcacgcgccgcctgcttctgctccctcgggctgcgccgcggcggcgaggaggagagccaggcagcagcaggaggaggagctccggacggtcatgtacctcagcaactggggtcccaacaactagctacgaactatagcaggcgaagcgaagctggccgggcaacaatctgagatgcactgcccccaaatgcccgtcgacaagcttgcctctagctagctagattatcgcgctgccgcttcgtgactacctctagtctgttgtactcatgatacgatcgacaaggccagtgcttgtgnnnnnnnnnnnnnnnnnnnnnnnnnnnnnnnnnnnnnnnnnnnnnnnnnnnnnnnnnnnnnnnnnnnnnnnnnnnnnnnnnnnnnnnnnnnnnnnnnnnnnnnnnnnnnnnnnnnnnnnnnnnnnnnnnnnnnnnnnnnnnnnnnnnnnnnnnnnnnnnnnnnnnnnnnnnnnnnnnnnnnnnnnnnnnnnnnnnnnnnnnnnnnnnnnnnnnnnnnnnnnnnnnnnnnnnnnnnnnnnnnnnnnnnnnnnnnnnnnnnnnnnnnnnnnnnnnnnnnnnnnnnnnnnnnnnnnnnnnnnnnnnnnnnnnnnnnnnnnnnnnnnnn

SEQ ID NO: 4762 - DNA, 619 bp, Zea mays
  misc_feature (569)..(569): n is a, c, g, or t
  Peptide Sequence Number=SeqID_12475
  Probeset Number=SeqID_19165
tatttcggcacgagggttggtgggggggggggggggtgcagtttatggatcacccaaaaactcaccctgcgcagaaaattttcctcttactccaaacaatccatatgggcaaacaaagcttgtggtggaagatatttgccgggatatctaccgtgcagatcctgaatgggagatcattggacggaggtacttcaatccttttggggcgtatcctaggggatatcttggggaggacccacgaggaattcccaacaatcttatgccctatgtgcatcaagttgcgggtggtaggaggccagctctaacagggttaggaaatgactatgcaacaagagatgggactggggtaattctgatgcgtatgatgtgcgtaattgtgattttttgggataccattcaaattgattaatctgatgcgtttgaagctgggtattccaaataaaactgctggcaattttctgggaaaatttaataatgctgggggggactaggactaacaagaggtatgagaactctcatctcttccttaaaaaacttgactagggctggttatatgacttgctgcctantgaatagacccggcttgttgaagttgatctttaactacacaggacttcct

SEQ ID NO: 4763 - DNA, 664 bp, Zea mays
  Peptide Sequence Number=SeqID_12476
  Probeset Number=SeqID_19166
gtcgtagcatcaatgatgcttggcatcaacaacgacgtcctttttagcagtgcctggccggacgctgtgttgtacgcccgcgctggccatggctttgccagcgccacgccgggaacgccggaggatgcacgcacgtgagtctacgccgcgccaggggccgatgtgcccacgccggtaccggcctcgctgccaccggggctggggctgcgcgctgccgtggccacgccaggctagacgccggggaagccgcgcgcctggccggctgctcagccggccaaccgctagggccacgtgcccgtcttggccgtgtgccgcgcctctgcaccggagcccgcgcgtcgtcaaggctgcagcgtcgtggggccgcacacccgtaccctgtcaaggccgctgcacccgcgacaggcagctgtgccgccaagcgaggggccgcgcgccggcgctcgtgcaccgagcagccgaggccgtcgcgggcccgcaccgggcaagtggaacggcgtcgagaggccgcacgcccacctccaccgcgcccgcgtgacgtcgggagtcgcgcccgcgcgctgccaggggctacctgcccactctgccgcagggcctcgcgcctgggcctccacgccgccgcccggggctgctggggcctcgccctcgcaccgtcgggggctgc

SEQ ID NO: 4764 - DNA, 286 bp, Zea mays
  Probeset Number=SeqID_19167
gtctcttgcttctaagagccggaggccgcgttggcgtgcgcagcgcggggtcgctttccccggccgcggtggcgcctacaatggacacccagaaggacgttcaacctccaaagcagcagccaatgatatatatctgtggagagtgtcacaccgaaaatgaaataaaatccagggatccaatcagatgcagagaatgtggatacagaataatgtacaagaaaaggactaagagattggtggtttttgatgctcgatgaaacagtggagttgaggaatgtcttcatac

SEQ ID NO: 4765 - DNA, 832 bp, Zea mays
  Peptide Sequence Number=SeqID_12477
  Probeset Number=SeqID_19168
acgaggcatgaccgatccaactctaactgtgcatccgcaaccaatccctgcaacccctccaaaacagcaaaagactgtgttcacagaaaaatcacctggcaaaagatggaacattcctgcttggacactgatgccaccggagacatcagattacattactatcttgaaatcacatcgcagcaaccaaagacgctcctccctggacgtattttctcaccatcaacctgtccgcatactccacttctgctatggtacacaactgtagacaatgctgcgtcgacaccagagaatgatcccatcccaaccatagaacctacttatgcttccacaactcccaaaagagatcattctactctgtccttctgacaactctccctcgcacagtgattgcgactttcatcgaagccttccttccatatcgctcaacaagataccgccggatgcatactaacataagatcccatcctgcggtactgccaccccacctgccgacatcccacatccctcccgggtcgcccccctcgtcctgcgttgcccacccctcactccctggtcctgtggccacccgcaccctgacgcagaccttggaccacccgctttccgctcccctccgtcgggcaccttccctgcccaccggcgccgtggccccctcgtcatcgcttcacaacccctccgagtgccaccctcccccccgcctctctcactgcccctgcccccggcctcacttacgccacagttacaatctgccgcatcgatactaccaaaatatccgatgctgaagtgatgatcaccctccatttttgaggatatgttagctctttctcttctcgat

SEQ ID NO: 4766 - DNA, 550 bp, Zea mays
  misc_feature (532)..(532): n is a, c, g, or t
  misc_feature (542)..(542): n is a, c, g, or t
  misc_feature (548)..(548): n is a, c, g, or t
  Probeset Number=SeqID_19169
ctagtccccccccccccccccccaaccccacacgccgtcggccgccgcactcactgccgcagatagccactcgcccactcagctctcgcccctcagcccctctcgccaggcaccggcagccgccccagccccactgcctcgggcctcagccaggagcccaggagccatcactccgtcagctccctgtgggctgcggggagcaccctgcgacctgcatccctgcctgcctcatctgcgattagccggccaggggagggcaatctgcggcggatcaacccatggcccatccgcatgcggcacgcggcatgccggccaggggagcgagacgcccagacccagtgccgtcggctgcgcgtcaggcgtcagccaccagctggccagaagcagtgctgtgcgtcaatggctcaacgcccagtgctacgcgttagccatccaagggagcagccgctgtccgctgcgagcattgccgggctgccggctgcagtgttgagtgttgtctgttgcagtgctgtgcgtgccgggccggctaaanaattaccagnggtatngg

SEQ ID NO: 4767 - DNA, 690 bp, Zea mays
  Peptide Sequence Number=SeqID_12478
  Probeset Number=SeqID_19170
ttttggcaggtcccaatgaacgcggtcgattttgtggtggatcccccccgggatttcgccaaggaaagggtccgccttgtaaagggttgccaaaagcttgaccgaaaggagttcaccaaggtggaagcggggacggcaaaagggttggtcgtaatgggtttggtgggttttttggtaaagttaattttcattcccatcaaaaaaattatggtgggttccggttaggctaagggggcgactagaatgggagtagtgcgatacttttgaaagcaagggaaagcgaggattttggtttttggaaaagaattgttaatgacttttttttccggttgtgtttttggagtaaatcgttgaacgacaaggcttcagaatgtctggatgtggattttgagtagaccttgaacccttgataaaacacccagttttggaaaaaaagttccattttgttgttccataaagcaatttttgttgctgtcaacagctctctcggcgatggtaagcccgatttgggggtttaatgttttagaaaatctgaccccaactgtagactgttgcttttgtgagaacccaaaaaaaaaaaaataaccgtttgggcggattgtcgctttttttttaaaaaaaaaaaaaaaaaaaaaaaaaaaaaaaaaaaaaaaaaaccaaccaaaaaaaaaaaaaaaaaaaaaaaaaaaa

SEQ ID NO: 4768 - DNA, 591 bp, Zea mays
  misc_feature (1)..(1): n is a, c, g, or t
  misc_feature (7)..(9): n is a, c, g, or t
  misc_feature (14)..(16): n is a, c, g, or t
  misc_feature (18)..(19): n is a, c, g, or t
  misc_feature (37)..(37): n is a, c, g, or t
  misc_feature (41)..(41): n is a, c, g, or t
  misc_feature (45)..(45): n is a, c, g, or t
  misc_feature (49)..(49): n is a, c, g, or t
  misc_feature (51)..(51): n is a, c, g, or t
  Peptide Sequence Number=SeqID_12479
  Probeset Number=SeqID_19171
ngtctgnnnggcgnnngnncccgtcgagtcgcggggncggngacnggtncnccgcgggggggtcacgggggccggtggccccccagaggccacctagggggcaaaaaccctttcctctctagatcttcgagtcgactgcggatcaaggagcaggcaggaaaggaatccataggaccagtgcaagcacgaacgaagaaggaagaagaacaggggagcacacagggaagcttcaagggagagggagaagaagatgcccgaacacgaggttgcggtaagcgaaactagacacatgcaccctcccctctgttttatgctcaagagaaggaagcctaggcggcgcttggaaggtgtgcccacacaaaccgctcaaaaaagattcatcccttcgggggaacgatgcctcggaaacagggtggaagactgtgtgttttgcaggaaaacaaccgcatcggacggaccgccaagagagcacacaactggaagggcactggtaacaggcatgaggttagccacccaatcatgccacctgtgtgcgatacagcaaatgggccaattcacatcccatggggtggggggggggggggggggacc

SEQ ID NO: 4769 - DNA, 754 bp, Zea mays
  misc_feature (704)..(704): n is a, c, g, or t
  misc_feature (709)..(709): n is a, c, g, or t
  misc_feature (717)..(719): n is a, c, g, or t
  Probeset Number=SeqID_19172
cgttgttggggggccggcttaagggagctaggtggatttccacgggcatgcaaggtattttccacggggagcgttttcttaggagcatcattattcaaaaattccttgttaaagtatgcaaagcttttatagcgtgtatgttggagcttatttgcggtcgtagttgttgcttcctatgttatattcttctgcgatcatcggtacaaattttatgcttaggaggtgctcaaaggtcatagacgcctcgtggcggacatgctaatcagtgggaccgaggagttcgaagataagggggccctgcatacaaatgagtcacggcggcaagcaggcgaatcagcaatggaacatattgtcgcggcgtccattggtgatgaagtctacttgtgcaatgagggcatagttcaggacaatgggcttgcttggttggtagcaagcaactcgtcttattagttaaggttcccggagcaatcatgtagcaagtagtaggtatctattgcttgcaaagcatggaaatggcatccttgtttgtaaatgttctggagaagtgcacgtacatgtaagctagtaggtagcacgtgcgagcggtgggcagcttgagggctcgcattgtcgcatcccgcacagacactagtaaggacgccatttggctatttgcccattagtaagggacgattcgaggtaactgatatccaagaagcattcgngttgnattatttnnnttgtgtttttttttcttctttctcttgttccttcc

SEQ ID NO: 4770 - DNA, 308 bp, Zea mays
  Peptide Sequence Number=SeqID_12480
  Probeset Number=SeqID_19173
acctccactccaaccatctaagcattcactactcctcattcaatataagagcaatacacaacactccaagacacaaatcaaagcctccgatcaaatcaaaaagtcacacatttctgtgagcattactcttttgtttcctctattgagccatacagggtagaggatgcattaagagattcagattgggtggtggctatgcaagaggagctcaacaacttcacgaggaatgaggtatgacatttggttccacgtcctaatcaaaattttgtaggtactgaatggagaactatgcggaataccgacaaaga

SEQ ID NO: 4771 - DNA, 451 bp, Zea mays
  Peptide Sequence Number=SeqID_12481
  Probeset Number=SeqID_19174
agagtcgtcgcgggtggtaaccccctcaccagccccccttctgggccctttcagcgcccctcccctcgccccttctgcctttccacctgttgggaaggcgcttaacggtgcgggccctggttcggctttttcgccagtcggccaaagggggactgggggatgggcgactaggtggggtaaagggcgaggggttttccccgagtctccccgttgtaaaagggcgcaccagtgaatccaatcaaggcgacctaatagaagagccaaggagttgcattcacgcgatccgtaaagttggttcctttagatcctctccccctttttttcttttttttttttttttttttttttttttttttttttttttttttttttttttttttttttttttttttttttttttttttttttttttttttttacgaattgtgtctcatgtgtttcggacgcgtgg

SEQ ID NO: 4772 - DNA, 1035 bp, Zea mays
  misc_feature (1)..(99): n is a, c, g, or t
  Probeset Number=SeqID_19175
nnnnnnnnnnnnnnnnnnnnnnnnnnnnnnnnnnnnnnnnnnnnnnnnnnnnnnnnnnnnnnnnnnnnnnnnnnnnnnnnnnnnnnnnnnnnnnnnnnncctccgcgcttcagcagcagcggcttccactgtagtcccaagccggcgtgaccattccaaatcttccgcacccatctctcgccgcctcgcctgcaccggagactggccctagtgcccgcgcgcctgcgaggtatcgaacacccaaagatggcaatggcaaccttcacatcatccccagtcctctgcagcttcaggaccatcgaacagaagaaggcccctctgctgaacaacagcacaaaaccgccccttcgcctgggcttcccaaggagcatgccgccgtcgccgagcttcagagcgaggccagaccggcgcgtcgccgctgtctacaaggtgaagctcatcggccccgaaggacaggagagcgtgctcgaagtgccagaggacagctacatcctggacgcggccgaggaggcccggtatagacctgccctactcctgccgcgccggagcgtgctccacgtgcgccggcaaggtcctggagggctccgtcgaccaggcggaccagtcgttcctggacgacgcgcaggtcggtgccgggtatgcgctcacctgcggtcgcgtatcccgacgtctgactgcgtcatccagacgcacagggaggaccgacctgtactaggcacgagcccagtccccgcgtaacggatcaacgttccagaccccagggaagccttgtatagagactgtgcacttccatagctcccattcggattcgatcttgagttcttgacactgattcgcacttgtgcttttgtccttgcaggtagctggaactagtagtgcattctttaatcgttattgttcaagtgtaggttgctttggtttgattcgtcccctgttttgctctctggatatctcggtacctgccaaccgctgtatcgaaatcaacggtagcttggtgaccatgcattgatctatcagtttcaattttacaggccg

SEQ ID NO: 4773 - DNA, 478 bp, Zea mays
  Peptide Sequence Number=SeqID_12482
  Probeset Number=SeqID_19176
tgaaaaggcaaatcaagaatattttgagcaagtgtgtcaggcaaggaaggataaagggcttattaagaatacgattccaacgaagagagcagcactaagctattcagagggtgaaagtgctcctttcagctcattcaagaggcgatggcagtctcttatgggggaaaatgaaggcaaaatcaaggaaaaaaaagggtgatgtcatgtttgacttcctgcctttggagctctcagcgagatgcagtttttgcaatgctttaagcccgtacgtgctgtgcttagtttcttgggcacgtgagttgaatcccccaagggctggtggctttgtagtgtaagttatgcaccgatgccatagattagttattataaaccctaaatgaggtatgtatgcgcatcctgtattgtagggctgtaaattcggactccccaattgcaactgttgcaacacttttggtcagtgataatccccttccctgcc

SEQ ID NO: 4774 - DNA, 631 bp, Zea mays
  misc_feature (27)..(27): n is a, c, g, or t
  misc_feature (46)..(46): n is a, c, g, or t
  misc_feature (53)..(53): n is a, c, g, or t
  misc_feature (85)..(85): n is a, c, g, or t
  misc_feature (132)..(132): n is a, c, g, or t
  misc_feature (141)..(141): n is a, c, g, or t
  misc_feature (146)..(146): n is a, c, g, or t
  misc_feature (156)..(156): n is a, c, g, or t
  misc_feature (158)..(159): n is a, c, g, or t
  misc_feature (163)..(163): n is a, c, g, or t
  misc_feature (165)..(165): n is a, c, g, or t
  misc_feature (167)..(167): n is a, c, g, or t
  misc_feature (171)..(171): n is a, c, g, or t
  misc_feature (173)..(174): n is a, c, g, or t
  misc_feature (176)..(178): n is a, c, g, or t
  misc_feature (182)..(183): n is a, c, g, or t
  misc_feature (188)..(188): n is a, c, g, or t
  misc_feature (190)..(190): n is a, c, g, or t
  misc_feature (194)..(196): n is a, c, g, or t
  misc_feature (202)..(202): n is a, c, g, or t
  misc_feature (205)..(205): n is a, c, g, or t
  misc_feature (207)..(207): n is a, c, g, or t
  misc_feature (217)..(217): n is a, c, g, or t
  misc_feature (221)..(221): n is a, c, g, or t
  misc_feature (225)..(226): n is a, c, g, or t
  misc_feature (228)..(228): n is a, c, g, or t
  misc_feature (233)..(233): n is a, c, g, or t
  misc_feature (237)..(237): n is a, c, g, or t
  misc_feature (239)..(239): n is a, c, g, or t
  misc_feature (241)..(243): n is a, c, g, or t
  misc_feature (245)..(248): n is a, c, g, or t
  misc_feature (252)..(252): n is a, c, g, or t
  misc_feature (254)..(255): n is a, c, g, or t
  misc_feature (257)..(258): n is a, c, g, or t
  misc_feature (263)..(263): n is a, c, g, or t
  misc_feature (266)..(268): n is a, c, g, or t
  misc_feature (271)..(272): n is a, c, g, or t
  misc_feature (274)..(274): n is a, c, g, or t
  misc_feature (276)..(276): n is a, c, g, or t
  misc_feature (278)..(279): n is a, c, g, or t
  misc_feature (283)..(283): n is a, c, g, or t
  misc_feature (285)..(286): n is a, c, g, or t
  misc_feature (292)..(292): n is a, c, g, or t
  misc_feature (294)..(294): n is a, c, g, or t
  misc_feature (300)..(300): n is a, c, g, or t
  misc_feature (302)..(302): n is a, c, g, or t
  misc_feature (305)..(305): n is a, c, g, or t
  misc_feature (308)..(308): n is a, c, g, or t
  misc_feature (311)..(311): n is a, c, g, or t
  misc_feature (313)..(313): n is a, c, g, or t
  misc_feature (316)..(316): n is a, c, g, or t
  misc_feature (318)..(320): n is a, c, g, or t
  misc_feature (324)..(324): n is a, c, g, or t
  misc_feature (327)..(327): n is a, c, g, or t
  misc_feature (331)..(331): n is a, c, g, or t
  misc_feature (334)..(334): n is a, c, g, or t
  misc_feature (341)..(342): n is a, c, g, or t
  misc_feature (347)..(348): n is a, c, g, or t
  misc_feature (351)..(351): n is a, c, g, or t
  misc_feature (354)..(354): n is a, c, g, or t
  misc_feature (362)..(363): n is a, c, g, or t
  misc_feature (365)..(366): n is a, c, g, or t
  misc_feature (371)..(371): n is a, c, g, or t
  misc_feature (373)..(374): n is a, c, g, or t
  misc_feature (378)..(378): n is a, c, g, or t
  misc_feature (382)..(382): n is a, c, g, or t
  misc_feature (386)..(386): n is a, c, g, or t
  misc_feature (388)..(388): n is a, c, g, or t
  misc_feature (393)..(393): n is a, c, g, or t
  misc_feature (397)..(400): n is a, c, g, or t
  misc_feature (402)..(403): n is a, c, g, or t
  misc_feature (406)..(406): n is a, c, g, or t
  misc_feature (409)..(409): n is a, c, g, or t
  misc_feature (412)..(412): n is a, c, g, or t
  misc_feature (414)..(414): n is a, c, g, or t
  misc_feature (426)..(426): n is a, c, g, or t
  misc_feature (428)..(428): n is a, c, g, or t
  misc_feature (431)..(431): n is a, c, g, or t
  misc_feature (435)..(435): n is a, c, g, or t
  misc_feature (437)..(437): n is a, c, g, or t
  misc_feature (439)..(439): n is a, c, g, or t
  misc_feature (443)..(443): n is a, c, g, or t
  misc_feature (449)..(450): n is a, c, g, or t
  misc_feature (452)..(452): n is a, c, g, or t
  misc_feature (457)..(458): n is a, c, g, or t
  misc_feature (461)..(462): n is a, c, g, or t
  misc_feature (465)..(465): n is a, c, g, or t
  misc_feature (468)..(469): n is a, c, g, or t
  misc_feature (471)..(471): n is a, c, g, or t
  misc_feature (474)..(475): n is a, c, g, or t
  misc_feature (480)..(480): n is a, c, g, or t
  misc_feature (484)..(484): n is a, c, g, or t
  misc_feature (486)..(487): n is a, c, g, or t
  misc_feature (489)..(490): n is a, c, g, or t
  misc_feature (493)..(493): n is a, c, g, or t
  misc_feature (495)..(495): n is a, c, g, or t
  misc_feature (501)..(501): n is a, c, g, or t
  misc_feature (504)..(504): n is a, c, g, or t
  misc_feature (512)..(513): n is a, c, g, or t
  misc_feature (524)..(524): n is a, c, g, or t
  misc_feature (527)..(528): n is a, c, g, or t
  misc_feature (531)..(531): n is a, c, g, or t
  misc_feature (533)..(534): n is a, c, g, or t
  misc_feature (538)..(538): n is a, c, g, or t
  misc_feature (541)..(544): n is a, c, g, or t
  misc_feature (553)..(553): n is a, c, g, or t
  misc_feature (568)..(569): n is a, c, g, or t
  misc_feature (571)..(571): n is a, c, g, or t
  misc_feature (574)..(575): n is a, c, g, or t
  misc_feature (579)..(580): n is a, c, g, or t
  misc_feature (583)..(584): n is a, c, g, or t
  misc_feature (588)..(591): n is a, c, g, or t
  misc_feature (593)..(594): n is a, c, g, or t
  misc_feature (597)..(597): n is a, c, g, or t
  misc_feature (599)..(599): n is a, c, g, or t
  misc_feature (601)..(601): n is a, c, g, or t
  misc_feature (603)..(605): n is a, c, g, or t
  misc_feature (607)..(607): n is a, c, g, or t
  misc_feature (612)..(612): n is a, c, g, or t
  misc_feature (616)..(618): n is a, c, g, or t
  misc_feature (621)..(621): n is a, c, g, or t
  misc_feature (624)..(624): n is a, c, g, or t
  misc_feature (626)..(626): n is a, c, g, or t
  misc_feature (629)..(630): n is a, c, g, or t
  Peptide Sequence Number=SeqID_12483
  Probeset Number=SeqID_19177
attccatccaccttcatcttcttgtanccacagagcgagccagcgnaccgagnagcggcgatttccatttcatctcagaattcanacggtgttgttgtctagggcaagaggggtttcttggtgttgatgtcnacggcgtanggtgngcctgagatncnntccncntnggcngnngnnncacnnatcgnancccnnncgtcanacncnccgcccgctntgcntccnngncggtntgcncngnnngnnnntttncnncnnccccnttnnnctnncncngnngtantnncccccncnacgccncnctngangcncnccngnnncccnctnaagncantcccggnngttanncgntgngcggccgnntnnatatnannatcnccangctncntttgntcannnncnnagnccnttncncagccgccgaangngtnacantncntgtnttcacnngnctatnnggnnacncanntntannaacgntccncnncnngcncnttcagntantcccgccnncccgcccagcnttnntcncnnaccntgnnnncgctccatnttttataggacattnntnctnncacnnacnntatnnnncnntcncnanannngnatacnactnnngcngcncnccnnt

SEQ ID NO: 4775 - DNA, 845 bp, Zea mays
  misc_feature (89)..(89): n is a, c, g, or t
  Probeset Number=SeqID_19178
cagatggcaaggagacttgatcctgacgtgatgatggccttcggggatgtcgtcgtatctaaaaggtgtcttcaacaggtcgataaatncgtggagggcattactgaggaggggagtctatggtagaggcaagactagtgaaaaattcgggactggcgaatagtagggcgtgcatgcaagtggttcggtggtaatactgtcaaagaggtaggctcagtatggcaatagaatcagtgggtcgatatagacatatgcgtgtgaagatcacatcagtgggtcaaggacgactggcgttcagggatcatatatggacggcaatcgcctatggtgcaccatcgcatgtcaagaaacagcgcgttacatggcatggtctgtgcctagacgatcctcttgtatcagagcaaagacggcggcttatcatagcagtcatggtgttacgacactcatgtggggcagattctcggacgggatagagtcctgatcagtagtttggttagaacgggagtatgattagaacgggcgtatcagtagatcattagaggcaggcgaataccaggagcattggagtaagaaaatggggaaagggtatagatgggaaagaagtataaatgtgcatgaggtatcatatctccatcggtagtacgtccacttcagtccaatgtccggcagacgtctaattttggcaggctaagaatgcatgatcggtaagtggtgctttaaaaatgggttagttaagacataagaggtacaaaagaaattcgtgggcaataaaatcatatacgctttgagccaatacgcggttaaaaacaattcgtggagaaaaatgcagcattgagcaaatagag

SEQ ID NO: 4776 - DNA, 885 bp, Zea mays
  misc_feature (1)..(28): n is a, c, g, or t
  misc_feature (717)..(717): n is a, c, g, or t
  misc_feature (725)..(725): n is a, c, g, or t
  Peptide Sequence Number=SeqID_12484
  Probeset Number=SeqID_19179
nnnnnnnnnnnnnnnnnnnnnnnnnnnnccgtggccaacaggccaagctcctcacgggtcctcacccgccgccatgctcctcacctgaggtctcctcatccacgcccaggctcctcaccgcgcccacgccagcagggggcttgcgccagcagccagcgctctccggtccccacaccaccgactgcagccggtggttgttcgattgccgccccgaaggtctccaccatcgccgccgttgtcgccctccaagttggctgctcctcccaggtcgtgggaggattgcccgtggcatattctgggccgtaggcaaccccaagggaagcctgttttggtgacagtgttacttgatgaacaataaggtacctcaaaagctagatgacagaccaattcacctactattgaatgtgtcgcatcaatggctaatcagctgttaaagaaatcagcaatgggaactaaagatgctgatatgtgaaatcagctagtatttattagtagcatatctgagatgtgaactgaaccactattagtagcatgtatctgagatgtgaactcgaccactattagtagcatgtatctgagatgtgaactcatgcgctattatgtatctaagaaagtttgagatggctacttgcctttgcctaaaaaaaaaaaaaaaaagcgggcctttatgtatctgagaaaaaaaaaaaaaaaaaaaaaaaggggggggggggcatncacccaancttataggcctccactagtgcatggggggaggagccttcaacaaccaattgcccaattgcaacaacaatccttggcacatataaccctacaaaccatggcaacgcaacaacaacaacatgtttatgccatcactgagccacctagcaggggggaaccctg

SEQ ID NO: 4777 - DNA, 849 bp, Zea mays
  Probeset Number=SeqID_19180
cgacgacagagccatgatcagctcatcacaacctctaggcaggaacaaagtgggtgcgcaccgatcactcttccctgcagcccggcaggtccactagctcatagaccgaccgccaccgctaatatagctccagctttcgctccctttagtgagggataccttctcatcttgtcgccatcatgcccatatctgcttcctgcctgatattgctatccactcgaccttcctcacgacgtactgtccgtcaccgatagaaagtagagcccgctatgactaaacgagtgatccaactcacattagttgcagtaccgctctactgccccctattccccccctccaacctgtctcgccccctgctgcattgtttcgtccggccccccccgcccgctaaatccctaatcgtgaggtctcccgctgcctcgtcccccctctcgttgcgcccggtccctcggctggcccgtcccgacccttccccctcgaacgcgcgcgggcgcccttcctcgtattcagggcggggggcacggggcctcctcccccgcagatgcccggcgcaacgccgccccccgcatcaagccccccccccccccgcagcgccataggctccccgcccccgacgtcccgctcaatgcgcgcccctctggtcccgcgcgtgtgttccccagccgcccccccccccttccgtgtgttctccccctgaaaagctcccaccttccgattccccgcgggccgcccttcccccccccccgtttgacctgggcccgcccctctccgctctcccccccccggaatcccccgccttggccccttccgcgctgttgcccccctgcggctgtcctgtgtcgctacaac

SEQ ID NO: 4778 - DNA, 2928 bp, Zea mays
  Peptide Sequence Number=SeqID_12485
  Probeset Number=SeqID_19181
aggtcgagcggtctaagagagtaaggaggccgacccactcgaggctatcaaggttgtgtatgaatttctagatgtgttccctaaagatttaccaggtatgtcgcctaagcggaaagttgattttgccatagagcttatcgctggcaccgtccctatttctaaaagagtctatagggtatctggaccagaattggtggagctcaagaagtagatagatgagctgtcagagaagggttacattagaccaatcacctccccttgggccgctcttgtcctattcgtggaaaagaaagatggcaccaagagaatgtgcatcgactacagagctctgaatgaagtcaccatcaagaacaagtacctctgcctagaatagaagatctgttcgaccagctgagaggagctagtgtgttctcgaagatatatctgaggtcaggttatcatcagctcaggatctgacctttaggcataccgaagacgacatttatcaccaagtatgggctatatgagctgtcttttggtctgacaaatgtgctagccttcttcatgaatctgatgaacaatgtgtttgtggattacctagacaagtttgtggtggtgtttatcaacgatattctcatatattctcaaagtgaggaagagcatgtggatcatctgaaggtggtattgcagaggctacgagagcaccagttatatgcaaagttgagcaaatgcaagctctggattcaagaagtcctatacttgggtcacattataaacaaagatgagttagccgtagatccaaagaaggtagcagacattctaaactggaacaccgaatgatgtttgaggaatcaagagtttcattggaatggccagatattatcggcaattcattgaagggttttcaaaaaattgctagacccatgacaaccttgctagcaaataaagtcgagtttaagtggacctagaagtgccaagaggcctttgaagtgttgaaagagaagttgattacaacgcctgtcttagttctgcctgatgttcacaagacattctcggtgtattgtgatgcttcctacaccggcttgggatgtgtgctgatgcaagaaagaagagtcgttgcgtattcatctcgacagttaaaggttcatgagaagaattatcccacccatgacctggagttagcagcagtggttcatgcattgaagactttgaggcactatttgtatgggcaaaaatgtgatgtctacactgaccataagagtttgaaacacatatttacctaatcggagctgaatatgaggtagtgaagatggcaagaactgattaaagactacgacatagagatacactaccatccaggtaaagcacacgtggtggcagatgctctaagaagaaagagtcaagtcaacatgatgatcgttcacccgatgccctatgagttagtcaaagaatttgacagactgaacctcgaatttttgaacaacacacaaggagtaacagttgagttagaacccaccttagagttggaaatcaaagaagtgcaaaagaaagacaagaagatcaacgaagtccggtagctaattctataaggaagaggcaaagattttcgggaagatgtagaaggcatagtatggttcaaagacctcctgtgtgttcccaatatcaagtccattcaggagttaatcctctaagaagctcatgaaatagcctattccatacatcccataagcgagaagatgtatcaggatcgaaatgagttgcactggtggtacgaaatgaaaagggaaattgcagagcacgtggctatatgtgacaattgttagagaatcaaggcggagcatcaaagatcagtcgatatgttgcagtcgctacaaattcctcaatggaattgagatgagatcaggatagacttcatagtcggattaccccacactcgagctagttatgattccatttgggtagtagtggaccgtttaacaaagtcagctcacttcatacctatcaagaccaactacaacagtgcagtattagcagagttatacatgtcccggattgtttgtcttcatggtgtgccaaagaagatagtgttagatcgagggacgcggttcacctctcatttctggtagtagttgcatgaagccttgggtacacatttgaattttagttttgcatatcacccatagacagacgaccagactgatagaactaatcagatcctagaagatatgttgagagcctatgcgttgcaagataagtcaggatgggacaaaagattatcctatgtagaattctcctataacaacaattaccaggccagtctaaagatgtcaccgtttcatacactttatggaaggagttgtagaactccgttgcactgggatcaacctagagagagacaagtgttcagcccgacatttttctcgaagccaaagagaatatcaagatggtttgagagaatatgaggatatcacagtcaaggcagcgaagttatgcagacacaagaagaagagagctgagttttgaagtgggagattatgtctacctaaaggtatcacctatcagagaagttaaaaggttcggagtcaaagtcaagctagcacctcgttttgttgggtcgtattaaattctagcaaagcatggagaagtggcataccagctcagcttaccggaaagtttgtcagtggtgcatgatgtcttccatgtgtctcatttgaagaagtgtctgtgagtgccagaagatcagttgccaatggagggcctacaggtccaagaagacctgacatacatagagaagtcaacgcagattctagagactgcacacagagtcactcagaggaacaccatcagaatgtcaaagtcagatggggtcaccaatctaaagaggagacaacatgggaacgagaagatgatctgaaggccaagtatgccgaactatttgctagccaaccc

SEQ ID NO: 4779 - DNA, 902 bp, Zea mays
  Peptide Sequence Number=SeqID_12486
  Probeset Number=SeqID_19182
cttgaaggcaggccttcggttcccgctgagtaagtttgtggtcgaagtattaaagatattccaaatctttctccatcagatcacccctgaagctataatcaggatgagaatatttgtctgggttgtaaggagccaggggctggagccgagcgcgaagtgcttctgcaacatgcacgagcttttatatgagacgaaggctatcggcaaagaacaataccataacaactttggttgttacgggttcattgcccgttctaatgcaagccacccagtgctaacattccgaaaaaggtggcccggggcctgaatggaggagtggttttacgtaaaaatgatttaattaaaagagaagacatcaaggtaattatccagcgccccatctggtctcgcttcgtcctccgaaggtcgaaggtggatattaatgacaatgttgaagcatgtcagaaggcctttaatactatgtgtgccttcattggtacaagggatttaattcaagagcacatagccttcagggtatggccacttgtggagaattgggaaatgccgaaggatactgttgttgaacccagtgaaggtggcctagttcgattaaagtatactttcagattcagggagaagttatgagcctgatgatgactggttgaaatgtattgaagctaccagtgatgagctgcttgggacatattcccgggccaaagatgatgccctttccgcagccttcgggggccgagggaagaaaagattgaacatggtatttgatgcgattggcttcgtataccctggttaccgctacccgctacgagggccagggggatgcgcttgcagtaggggttacaagcgttcgcgagaaagagaggatgagcctgttcgtcagctcgttctcccgcgcgaccctcccgcat

SEQ ID NO: 4780 - DNA, 546 bp, Zea mays
  Peptide Sequence Number=SeqID_12487
  Probeset Number=SeqID_19183
gaaacgaatgtcacatctttaatatataacagagttctgtacaaaatagttaaataattacatcatatgaagacaacgatctagcaaccatagttgactgggagacgaaggcctagacctctcacgaactcatcgcgacatccttcatgctcctcatcttgtcggtacctattcttgaccttaaacttgagatcccacatacttcaccaaactggtcttcgggtgagtcgtaacctcgctgctactcgtatcaatacatacagatagacaaggcgaaaataaacataacagaacaccaaacataagatcacccatagtaagcatattctacgcgatgctacgagagcgcaagcacgagaatgtccacattctgagatacatcgtcctagaagagcaccccatgccttgtaaccaataatccatgctccaccagtcacaaaggccaccactggacagggcctactattatcgtgtaccccgcctccgccagggatgccgccggcgccttcttggccgtcgtcctcgccacctgttctttgagctgct

SEQ ID NO: 4781 - DNA, 958 bp, Zea mays
  Peptide Sequence Number=SeqID_12488
  Probeset Number=SeqID_19184
ccccccaaaactggtcctttccatggattcccaggaaccttgtggccccgggggttttaggcaccctttgggcacccctaaaaaggtttgggggggtcccccgggcaaaaatttaacatttgtttttgtaagccacttgttataaaaagggaaggggtttttcccaacgaaaaagggcttttttaggcttatgttaaacttttgtagggagggggtattccccccggggggaaattttaagaagggggttgcccttccccaaagggcggcccccggtggcgcccttttctgtttttttccccccccccgaaaaaaaaggggggggagggggattaaattttagggtttttggcttaacgggggaggggttgaggccgaagggggttttttttttttttttttttttttttttttttttttttttttttttttttttttttttttttttttttttttttttttttttttttttttttttttttttttttttttttagaacagcgaaaccttattcagtttacaattgcatgtcaaccatatatggatcgatgcatacatttgcactacgtcgtactatgatggttggcagcagcactgccggagatgaagacggccagaaccaggccgtttatagcagaaagcaccggcgtcgttgaagcctgatgatgcgcagaaactctggtgcttcacccaacaacagaagccagtggtggtctagaagcacgtcgccgccgccagtcgctgccgaagcgccggtccatgttgacggcggccatcgtcgctcacatgatgcagaaaggacggggaagacgttgaagtgatcaacagaagaaccaagagaggagctacaaattctgtgatgatgcatctcatgagttgtgccatgatgagaggaaacaattgttgttgctccttttcgattcctttcgaggagcggcgaggtggaggactatactat

SEQ ID NO: 4782 - DNA, 479 bp, Zea mays
  Probeset Number=SeqID_19185
actctgtactacctgatgaaatgaatgactatgtcgagtgcaaggttgataggaagagcacatcaaggacttgtcagtttctgggaagatccctggtgtcttggagttcaaagaaacaaacttccgttgccctatccatcgccgaggccgagtatgttgccgcgagttagtgttgtgcgcaactactttagatgatcaaacactctgggactttggctacaatttgagcaaagtcccattcctatgtgataatgagagtgcaatacacttgatagataatcccgttgaacacaaccacaccaagcacgtagacatccgacatcactttctgcgagatcaccagcaaaagggagatatcgatgtttgccacattagtaccgatcaccggctagccaatattctttaccaagcctttagatgataaaaggttttgtaagctgcgaagtgagctaaatgtcttagattcgtggaatttagat

SEQ ID NO: 4783 - DNA, 1427 bp, Zea mays
  Peptide Sequence Number=SeqID_12489
  Probeset Number=SeqID_19186
ctctcccttgagctgtcgtctgccagtggtgagctcaccgaccccaacaagcgttgtgccatgctagaggagtacgaggttgtactggtgaaccatacataggacctggtgtcacacccctctggcaccaatgtggtcactgggaaatgggtctttaagcacaagcccaaggcgcatggctctctggattggtacaaggctcgctgggtcctacggggtttcacccagcgtcccagggtgtactatgacaagaccttcagtcccatggtgaagcctggcgccatctagatcgttctaactatggctctctcacgggcacgacctgtgcatcaactcgatgtcaagaatgccttccttcatggcaccctaacagagacggtgtactgctctcagccggtgggctttgtggactcgactcacccctacatggtctgcaaattcaactggtccctctaaggccccaagcatgctccccacacctagtacagtcgcgtcgccaccttattgctctcatagagctttgtcgaggccaaggcagagacctccatgttcgtcttccgtcgtggcatggataatgcatacctcctcctctacttcaaacgtaccatccacacgacgtcctcccacgacctcctgtggcgcgtcatatcatctctccaacagtagttcgccatgaaggacctaggcgagctggaccacttcttggtgatcaccgtcgagcgtcggccctagggattgttcctccaccagcgccagtacaccatcgacatcctcgagcacactgccatgactaattgcaagtcatgctcgactccggtggacattcagggcacggtctccatcaatgtgggccctctagtagctaatccagccagctgtcggagtcttatcgaggccctgtagtacctcatcttcacacgccccgacatcgcctacgtcgtccatcaggtatgccattatatgtacgccccgcgggagccacatctcactgctacgaagcggatccttcggtacctctgtggcaccaccaactttgacattctcctttgtcaatctgtgaccatcaaccttgctatctacaccgacgctgattggggtggttgtcccgacacctatcggcccacttcccgtttcgttgttttccttggcaacaaccttggattctggtttttgaaaagacagctcgatgtctcccactccagcggtgaggccgaggctgagtaccgcgatgtggccaacggtgtcgccgaggcagcgtggcttcatcagctactctaggactacactgcccgctgacgcggagcacccttatctatattgtgataatgtcagtgccatgtgcctctctgaaagggaaataggcttacaacgctaatcccggcttgtagttgtgcttaaactttataaatttcagacttgcctattca

SEQ ID NO: 4784 - DNA, 655 bp, Zea mays
  misc_feature (1)..(1): n is a, c, g, or t
  misc_feature (142)..(142): n is a, c, g, or t
  misc_feature (176)..(176): n is a, c, g, or t
  misc_feature (243)..(244): n is a, c, g, or t
  misc_feature (266)..(266): n is a, c, g, or t
  misc_feature (286)..(286): n is a, c, g, or t
  Peptide Sequence Number=SeqID_12490
  Probeset Number=SeqID_19187
ncaaactcgtagtaggggttcaaacggtcgagagagggagagaagcttcccagttctcttttccgggtggaagtggagcatagaagtgtggggtggagtcttaactaagtattttcttggcggggctctgactttctggtcntcatcggcgttctctttcctccctgttcgtcctngtgggtttgtgttcatctgaaggcatctggttgcctaagagctctctcctctcgatcctgtcgatcnntattaatccccctgccctaagnccagcctccccttttatagntggaagaaagggtcggccagcggtggcttccctgagaaggagccgcaaggcaagggtaaaactagtgttttaccccgtgtagagtcacacatacttgtggagcccgggctaactggatgtcttgtatttaccatggcgaatgacatgggggcggtaatggtcccaagcgtcatcactgtggctacgccgacccctggcctcgttagcctggggatcgatgtaggccattgtaatgccctgtgggaggtctgcatactcaggcctagtccgataggccataagtgcatcgtaggctttaatgtgacgcagttcgaggactttgtaggtcatgagtgttgtgggctcgagggggggcccggtacccaatcg

SEQ ID NO: 4785 - DNA, 980 bp, Zea mays
  misc_feature (1)..(379): n is a, c, g, or t
  misc_feature (980)..(980): n is a, c, g, or t
  Probeset Number=SeqID_19188
nnnnnnnnnnnnnnnnnnnnnnnnnnnnnnnnnnnnnnnnnnnnnnnnnnnnnnnnnnnnnnnnnnnnnnnnnnnnnnnnnnnnnnnnnnnnnnnnnnnnnnnnnnnnnnnnnnnnnnnnnnnnnnnnnnnnnnnnnnnnnnnnnnnnnnnnnnnnnnnnnnnnnnnnnnnnnnnnnnnnnnnnnnnnnnnnnnnnnnnnnnnnnnnnnnnnnnnnnnnnnnnnnnnnnnnnnnnnnnnnnnnnnnnnnnnnnnnnnnnnnnnnnnnnnnnnnnnnnnnnnnnnnnnnnnnnnnnnnnnnnnnnnnnnnnnnnnnnnnnnnnnnnnnnnnnnnnnnnnnnnnnnnnnnnnnnnnnnnnnnnnnnnnnnnnnnnnnnnnncccccttcctctggctccgcccggccctgatctgatacaagcacacaagctagggcggaatcccagatcgaagcagcatctgcacaaggaatcgagattctcccctccggattcaccattttcacctacactagacataggatccagtgattcggtatgcatcagctcgttctcgatcgttccatgaaactactataattgtcgtcgctctcctcctcacctcgcgtgcatcgttgtggaatcagtaattcatcagcatctgtacaataccatgtggctgggcagagtatgtattgtcagtacgagttagttatttcatcaaaaatggaataaacataaatattccagcttctatgtctgggattcataaaaaaaaaaaaaaaaaaaaccagttatcttcatgaaaaaatgtgactacacttcttgaaatgtgagaacagcttgcacacgtggtgaacttggcgcgtttcttctgaagttgctagcttcatcattaggtcggaagcttaaagcagtaccgcagaaaaatgaaacaatctttttcagcagtaaataaagatgggaaaagggaagtttgcagtcaaaaaaaaaaaaaaaaaan

SEQ ID NO: 4786 - DNA, 294 bp, Zea mays
  Peptide Sequence Number=SeqID_12491
  Probeset Number=SeqID_19189
attccttggggctaacagatcaacctagggttcaggaaaaaacttttaattggagtggcagcaatgttttggtctatttggttgtgccgcaatgatgtggcctttaattttaaaccaataccatcaattttgcaggttcttttcagggggatgtattggctcagactctggagattattgcagaaacaagaagctcaccaagagattcttgtggtatgtcaatccttagagatggtggcaatggagatccttgcaaaacatggttggagttctaatgccagattaaaggacgct

SEQ ID NO: 4787 - DNA, 575 bp, Zea mays
  Peptide Sequence Number=SeqID_12492
  Probeset Number=SeqID_19190
cacctggcgctgctgtacgaccccgcgccgtcgccgcaactgggctacgaatcgctgttccgcgaagacctggtgctggtggccgccgccgaccaccagccgcccctgcccgcccgcgtggccgtggccggcctgggcgcctatccgctggtgctgcccagcctgcccaacgccatccgcaccctggtcgagagcatctgccgcgcccagggcgtgcggctgcaggtcgcggccgaggtggacgcggtgcagaccatcgtggaactggcggcccagggcgacgcctacgccatcctgccgcgctcggccgcgcgcgggccggcggccgaacacgcgctgtcgctcagcgacatcgtgtcgccgcggatcaccaacaacctgctgctggccagcgcccgccatcgccccgccacccggctgggcatggtcaccggcgacctgatccgccatgtgaacctgggcgcgcttgaagcgccggaccccgcgctggtcgttacgccgaatgcccccgcgctcctacgcgcggctgtgatcgacgttgtctcgtccccctgtcgacggagtctccgcccttg

SEQ ID NO: 4788 - DNA, 493 bp, Zea mays
  misc_feature (2)..(3): n is a, c, g, or t
  misc_feature (5)..(6): n is a, c, g, or t
  misc_feature (11)..(12): n is a, c, g, or t
  misc_feature (19)..(19): n is a, c, g, or t
  misc_feature (26)..(26): n is a, c, g, or t
  misc_feature (38)..(38): n is a, c, g, or t
  misc_feature (51)..(52): n is a, c, g, or t
  misc_feature (54)..(54): n is a, c, g, or t
  misc_feature (60)..(62): n is a, c, g, or t
  misc_feature (65)..(65): n is a, c, g, or t
  misc_feature (71)..(71): n is a, c, g, or t
  misc_feature (74)..(74): n is a, c, g, or t
  misc_feature (83)..(83): n is a, c, g, or t
  misc_feature (88)..(88): n is a, c, g, or t
  misc_feature (90)..(90): n is a, c, g, or t
  misc_feature (92)..(92): n is a, c, g, or t
  misc_feature (94)..(94): n is a, c, g, or t
  misc_feature (107)..(107): n is a, c, g, or t
  misc_feature (124)..(124): n is a, c, g, or t
  misc_feature (177)..(177): n is a, c, g, or t
  misc_feature (186)..(187): n is a, c, g, or t
  misc_feature (189)..(190): n is a, c, g, or t
  misc_feature (195)..(195): n is a, c, g, or t
  misc_feature (201)..(201): n is a, c, g, or t
  misc_feature (205)..(206): n is a, c, g, or t
  misc_feature (210)..(210): n is a, c, g, or t
  misc_feature (218)..(218): n is a, c, g, or t
  misc_feature (222)..(222): n is a, c, g, or t
  misc_feature (224)..(224): n is a, c, g, or t
  misc_feature (226)..(226): n is a, c, g, or t
  misc_feature (234)..(234): n is a, c, g, or t
  misc_feature (252)..(252): n is a, c, g, or t
  misc_feature (256)..(257): n is a, c, g, or t
  misc_feature (261)..(261): n is a, c, g, or t
  misc_feature (277)..(277): n is a, c, g, or t
  misc_feature (281)..(281): n is a, c, g, or t
  misc_feature (287)..(287): n is a, c, g, or t
  misc_feature (293)..(293): n is a, c, g, or t
  misc_feature (373)..(373): n is a, c, g, or t
  misc_feature (381)..(381): n is a, c, g, or t
  misc_feature (391)..(391): n is a, c, g, or t
  misc_feature (396)..(396): n is a, c, g, or t
  misc_feature (399)..(399): n is a, c, g, or t
  misc_feature (403)..(403): n is a, c, g, or t
  misc_feature (405)..(405): n is a, c, g, or t
  misc_feature (408)..(410): n is a, c, g, or t
  misc_feature (412)..(413): n is a, c, g, or t
  misc_feature (415)..(416): n is a, c, g, or t
  misc_feature (418)..(419): n is a, c, g, or t
  misc_feature (421)..(421): n is a, c, g, or t
  misc_feature (424)..(446): n is a, c, g, or t
  misc_feature (448)..(450): n is a, c, g, or t
  misc_feature (452)..(453): n is a, c, g, or t
  misc_feature (455)..(459): n is a, c, g, or t
  misc_feature (461)..(467): n is a, c, g, or t
  misc_feature (469)..(479): n is a, c, g, or t
  misc_feature (481)..(493): n is a, c, g, or t
  Peptide Sequence Number=SeqID_12493
  Probeset Number=SeqID_19191
gnnanngctgnnttgctcnctgcccnatttctaccccntggggtagccgcnncntcttcnnnggntagtantcntcgattgcntgctncncntngatgtcccgctanagaaatcggatcgagangaggaggagcacgattgaattgaagaggaagagaggatcatgcaggagttctnctccatctnntnntgagnattttnttgnntaangcgtaggngttnangntgcagagnatgtcgagtacatttctncttnntcgntgaaggtggttgttgntcancaaggngagtgngaggtagcaggacgtcctccttcactctcgtaataaggctgcccagacacagtcatgatttaattagaaacttcttgtcnaaggatgnttgtttttanctagncgngcgnantgnnnanntnngnncntgnnnnnnnnnnnnnnnnnnnnnnngnnnanngnnnnngnnnnnnncnnnnnnnnnnncnnnnnnnnnnnnn

SEQ ID NO: 4789 - DNA, 576 bp, Zea mays
  misc_feature (3)..(3): n is a, c, g, or t
  misc_feature (7)..(7): n is a, c, g, or t
  misc_feature (9)..(9): n is a, c, g, or t
  misc_feature (11)..(11): n is a, c, g, or t
  misc_feature (13)..(13): n is a, c, g, or t
  misc_feature (15)..(15): n is a, c, g, or t
  misc_feature (17)..(17): n is a, c, g, or t
  misc_feature (548)..(548): n is a, c, g, or t
  misc_feature (550)..(550): n is a, c, g, or t
  misc_feature (554)..(556): n is a, c, g, or t
  misc_feature (560)..(561): n is a, c, g, or t
  misc_feature (563)..(563): n is a, c, g, or t
  misc_feature (569)..(570): n is a, c, g, or t
  misc_feature (572)..(573): n is a, c, g, or t
  Probeset Number=SeqID_19192
ganaaananananananagctcactagtcccccccccccatgggttccatatctgttctccttccggtgctccgataatcccagcgttcagtgtgatgccgtgaagactatagtatgccacaacctgaatgatgtgcagcgtttggtctttgccgagaattttgtttgccctttcccagagctcctgttcaagaggcttgcctccccggacaagtcgcatagccaagtcaaatgcaacactttctttctcagttaagccatctggcttgatcccatcggtgattgacttcatttggtccgcactcagaagttgcttgctagcaatgatccttgagtgcgagtaggtgaggaagccgccgaaggaaccggtaaagtatccttgtgttgccatgatggccacctcagttgggccaggctccagtgcagggaggctcaggacctcactgtttagccgcatagtgtgtgttgagtactggggggggtgtacatcattatcgacaagggtcccagcaaggctccttccttctgtcgccgtgcgctattttacnancgcnnnaatnngnaaccanncnngcc

SEQ ID NO: 4790 - DNA, 1243 bp, Zea mays
  misc_feature (1160)..(1163): n is a, c, g, or t
  misc_feature (1165)..(1166): n is a, c, g, or t
  misc_feature (1243)..(1243): n is a, c, g, or t
  Peptide Sequence Number=SeqID_12494
  Probeset Number=SeqID_19193
aattcggcacgaggcgggagtggtggtggtgctcgtgggcacgcagcggagcaccctgtacagcagcagcgctgcggcagtagagagtgccattggtggagctggtaactagccctcccccctccgttcccgtcccgcgcgcagccgtctgccgagcctgctcagtgcccatcatggtgaggaagaagagaactggccctggtagctctggagaaacttctggagagtcttcaggagcctctggacaaggttcctcacagcagcctgagcgaactcaacaacctgggggaggacgtggctgggtgcctcaacagggtggccgtagtggtgggcaacaccagggccgtgatcgacattatcagggacgtggaggaccagggccacatcaccttggtagtggggcacctgagtatcgcccgcgtgaataccagggacgtggtggtgaatatcagggacgtggtggtggccgctccagaggtggaatgccacagccatactatggtgggcataggggaggtaatgttggacacaatgttcctccaggtccatccaggacagttcccgagctgcaccaagccccatatgtccagtatccagccccggtggtagcaccctccctattgggacctggctcgctcacacagcatatggcagaggtcagctctgcatggagccagcaacaagtgaagcaacatctatatcaagccgtggccctccaccaggggggcgcaacaccaaggctgccggtgttgggaatgttgctgtgaggccattacctgccctcaaggaaaacgtgaagcgggtcatgttctactgctaagactgatgctattaaggcagggctaccttttattattacagtatatcgtgaagactagagtattttttttccatgtacttgatgatgctgagctaccttttattatgtcgtacgatatatatgggtggtattgtatactggttacagtaactttagttgtgtgttccatcgtgctagtctctagctggtgggcgggtggtgttacgtgaaaaacattctcctctaaaattcaacaaaaaaaaaaaaaaaaaaaaaaataaaaagaaaaaaaaaaaaaaaaaaaaaggagggaggaaaaaaaaaaaaaaagggaaggaaaagaaaaaggaaaaaaaaaaannnnanngggggggggcgcttaaaaggatcaaaatttaacgccccgtgcttccgacgtatatagtttttttttagggggccctn

SEQ ID NO: 4791 - DNA, 702 bp, Zea mays
  misc_feature (1)..(84): n is a, c, g, or t
  misc_feature (668)..(668): n is a, c, g, or t
  misc_feature (685)..(702): n is a, c, g, or t
  Peptide Sequence Number=SeqID_12495
  Probeset Number=SeqID_19194
nnnnnnnnnnnnnnnnnnnnnnnnnnnnnnnnnnnnnnnnnnnnnnnnnnnnnnnnnnnnnnnnnnnnnnnnnnnnnnnnnnnngtcgccataggagcggcaaccaattcaagcgatgttgtcttcttcgcgcgtctactctgccattcaaggtacgcagactgcgatccatttccgagcttcgaggaatcgacagtcaagcttcgacgaccaagggatcgaactcttcgagttctacaaggctgaagaccctgagcatctgtttggtgaaggcaagtgtcctctgacctattatgtcccatttactttataattcactgtcccgcataccatgaacaacctaaggattgactagctttctatttaccctatccttgattaccttttgggttactatggttagattcatgctaatgctttactttaatcaatgaacatgatgtgaacacttatgatacgatgttgttattattattactatgttgggctggtgatactttagggggctcgagcggtttctcgagtgcctctccgtaaggacctattcgttggatgaccgcccgagaaaacagtgaaccatgagggtggtatgggactcccttagctgaataattagaggaactgtggtgtagttcgccttcgtcgtcgtgccgcaatgggggctcggntgtatgtggctcgctcnnnnnnnnnnnnnnnnnn

SEQ ID NO: 4792 - DNA, 656 bp, Zea mays
  Probeset Number=SeqID_19195
gggggctggtttcgtttatcttctccgttgttgtggtatgagttggctcttggttctcgatgttcttgctgttgtattgattgtgatctcctgcgttctctggtgtttttttgttcgcattctttatttcactttgatctaaaatacaaggactttttgatattaccaatcctctgaagaaagttgttcacgttaggggacagcttctcaggatagtgaagactcttggtatccagctgcagtcatgtgacagagatatgcaggcagttagaaaggccattattgctggttcattttctaatccatgtcatctggaggaatccacccaaatcggaatgtataaaacaattaggacattacaagaagtttatattcatccatcttcaggtctctttagggtcaatccaaagggggttgcctccccagcctcctcgtctcacctggcaagcattatatgcggcacgttattgccattggccctttttgcctcaccccagcggccgcagggttttactccccccccccctccaccccgcccccccccacctatacccccccccccccccccccccccccccccccctccacccacccacccaaccccccggcccccaacaccgccccgcaccctcccgaaccacccccccccccccccc

SEQ ID NO: 4793 - DNA, 516 bp, Zea mays
  misc_feature (516)..(516): n is a, c, g, or t
  Peptide Sequence Number=SeqID_12496
  Probeset Number=SeqID_19196
aatcaaagaacaacctcgaaaccatggatccagattccgaccaccctcacctccccacaatcaaaatccaccaccctccttcccctcgccactccccccaccaccaccaccaccactcctcctccaccccctcctccgccgccaccccaactcccaccgccggcgcccgccgcaaaatcggcgtcgccatcgacctctcctgcgaaagcgccttcgccgtccgctgggccgcggaccactacatccgccccggagacgccgccgtcctcctccacgtctccccgacctccgtcctctacggcgcccgattccgcatctggggaaaatttacgggggcgccggtcgggccgccgggctaacggagaaagggcggccacggcagtgggacagtggcaaacgggcgtgcgggggccgacgctcgggtaggtggggatggatatcataaccccgccacccggggtcccccggccgccgcgcgccgggtttatgcgccgcgctgaatctcgcggcgccgan

SEQ ID NO: 4794 - DNA, 968 bp, Zea mays
  misc_feature (957)..(957): n is a, c, g, or t
  Peptide Sequence Number=SeqID_12497
  Probeset Number=SeqID_19197
gagagggatgaactagatttaacagggctaagatggaagagggatgacgtgttgatatattaaagcaataatattatagagaggagtcagggagaagagtagttgaaattaatggagaatagaggaatgatgcgaccgtgcgggagagggtacagtaattttggatgatgaggggggtcgttgtctctatcttacaaacagataaaagatatagggcgagttgtgggcgggaggccattctgaaggcaagctatgtttcacattgcggagacaaaagctgggaaagaccccctcaggtcatacctggatgatgcaagccaaagcgatagtgggttgagaactttttgcaggggggggccaaaaacatgacctagacgggttttcaaggggggggtgttggggcgtgtggccgtttagcctactaccaaaggtggccggtgccagaaggcagctcctcaggctggcggggcggtgacacagaggcctggcaaaaaacgcatgtggaacctggagcggcgactggcaagcgtcagaaagagacagctttcagtccgaggaagatcccccgtcctacagggcctcatctcttcttaccatagacagattcccagagaggtgaccctggtctctggagtcaggaggccggtgtccaggagagtcgctcatcaaccccgggtgcaagagtaagaaaccaactggtggcgtggacttcgatgagacctgaaggtgcagcacaagcgtggccccgcggggagtcctcctatgaggggagaggcagtctttgaggcccccatcagagaccccccgccaccacctccacctgcctgtcctgggccaggactaacacagctcctcaaatcgttgcgcgtcaaaaaacaatgatgaggagggggagagggggatgaagaaggggggggggggagtgagagtgaaatgtgggggagagggaaaaagganaaaaaaaaagg

SEQ ID NO: 4795 - DNA, 522 bp, Zea mays
  misc_feature (24)..(24): n is a, c, g, or t
  misc_feature (36)..(36): n is a, c, g, or t
  misc_feature (42)..(42): n is a, c, g, or t
  misc_feature (46)..(46): n is a, c, g, or t
  misc_feature (48)..(48): n is a, c, g, or t
  misc_feature (62)..(63): n is a, c, g, or t
  misc_feature (66)..(66): n is a, c, g, or t
  misc_feature (70)..(70): n is a, c, g, or t
  misc_feature (77)..(77): n is a, c, g, or t
  misc_feature (85)..(85): n is a, c, g, or t
  misc_feature (103)..(103): n is a, c, g, or t
  misc_feature (115)..(116): n is a, c, g, or t
  misc_feature (118)..(118): n is a, c, g, or t
  misc_feature (231)..(231): n is a, c, g, or t
  misc_feature (237)..(237): n is a, c, g, or t
  misc_feature (277)..(277): n is a, c, g, or t
  misc_feature (281)..(281): n is a, c, g, or t
  misc_feature (341)..(341): n is a, c, g, or t
  misc_feature (349)..(349): n is a, c, g, or t
  misc_feature (359)..(359): n is a, c, g, or t
  misc_feature (366)..(366): n is a, c, g, or t
  misc_feature (369)..(369): n is a, c, g, or t
  misc_feature (378)..(378): n is a, c, g, or t
  misc_feature (380)..(381): n is a, c, g, or t
  misc_feature (384)..(384): n is a, c, g, or t
  misc_feature (393)..(393): n is a, c, g, or t
  misc_feature (398)..(401): n is a, c, g, or t
  misc_feature (404)..(404): n is a, c, g, or t
  misc_feature (409)..(417): n is a, c, g, or t
  misc_feature (419)..(420): n is a, c, g, or t
  misc_feature (422)..(522): n is a, c, g, or t
  Peptide Sequence Number=SeqID_12498
  Probeset Number=SeqID_19198
acgatcacacatcgcactccatcngcatgtagtatngagggntagngnaaggccacagcacnnacncacnccactantaggctangctatgccttttagttcntcgaggaggcannangaagggcgcgcacgcaagcaggcaagcaagaagagagccgatcgaccgagagctagcacgcggatggtgaggtcttccaagatgatggtggcggcagctctgctgggcttggncctggncgtgtcgaccgccgaggcgaggaacatcaagaccacgacnacgnagaagaaggacgacgccggtggtgcagccgcagaccttcccgcccttcgaccgcctcggnggcggcgngtccccgggngttcggnggnctccccggngnnagnattcctggnagcannnnttnccggnnnnnnnnngnncnnnnnnnnnnnnnnnnnnnnnnnnnnnnnnnnnnnnnnnnnnnnnnnnnnnnnnnnnnnnnnnnnnnnnnnnnnnnnnnnnnnnnnnnnnnnnnnnnnnnn

SEQ ID NO: 4796 - DNA, 714 bp, Zea mays
  Probeset Number=SeqID_19199
catatgcttattttgacaaaaaaagctctgactgttcatccccgtacagttctgtctactccctccaaaacaatttcttccgtttccgcatttcgccgcacatgaacccctctgcttatttcctagcagcacacacgacgactcatttgaacagctatctacggccatgcccgcttcgttcttgacgcaacaacagtatgatgctcacctaccagcatactgaggataaccccgcccccctattgacaactgcgacaggtgctgcccttgtgcccaacttgttttgacaaacccaacaaccttctatccaacaacactgccattggcttatgcacctcttttatatagcgcattagttgatcttcgataatgtgctaacttggctgatgaacgtggactccatactaacaatgagctcttcttcctcctcaaaaccgacaccctgtatcctgaacgcctacctctgggtatgccccgactgccaattctcccgatagagatccgcaatacccacggtctctgcacgcactatgacaagctgctaactgtatataccctgatgctatccctatgaatccccttgctcgaatcctgctttaccgacttggccgactaccgaacactgctcgcttcgatagctcttaccactattgactacgctgtatggcgatcgcaactcgtactgtgtatctctacgcagatgcatcgtaatct

SEQ ID NO: 4797 - DNA, 534 bp, Zea mays
  misc_feature (527)..(527): n is a, c, g, or t
  misc_feature (530)..(530): n is a, c, g, or t
  Peptide Sequence Number=SeqID_12499
  Probeset Number=SeqID_19200
ccctcgtttcacgagatgagaaagaagcagagccccccccccccacctccctccattgcatgcgaaagagcgatctaacccggccggcatcccatactggaggtgatcgggccgtttggagaatcttttgtccttagttcgattcccgtggtggcgatctttcattgggtcatccatcctccgtgtcgcttggccgtgataggttgacgcgatggcgctgggatgttgcttctgcgcgaccggcatttgcttctgttattgggttgggtgcaggttcaggttgcgatgcagccatcatcgcgcagcagggctggaatgctgataacgagcccccattcacaaggttcgtgcagatacgaccacacgtccttccagaaggctcacggaaggttgctgtccacggagacctccctggtcaggtatgcagcaatccgcgaacgtacggagtatggcatgatgacaaggttgtgatgcccaggcgcccagtaatgccaacccccaactcccatcttggcgtattcgcccanctncatg

SEQ ID NO: 4798 - DNA, 784 bp, Zea mays
  Probeset Number=SeqID_19201
ttttttttttttttttacacccgaaaaacagcttacaggccatcagcaaaacaaccaaactcatatacgaataacaaaactaaagcgctaaaacaagtttaggtcgtgcaatggaatgcaacagaaagcaccctacaagttttggctgacagaacaaaggcttaggacattcagcgatcatgttcccctcgggcaacatccattctaggagccttctctacctctgtcccagcaacataattcctcaatttgaaccttcctaaagtggcccaagatcatccctttgaatatttcgaccgagaccatcattcctctgcccccatctctctgtcgtcaccaccaaaccctatgtcctttcccccaccctccccaaaacccctactcccgtatttcaacatatgaataggcgcctccgtgtccattcaatttcagcctccggcaaaatattcttgatggcacatcgggcccaactccccacaaccccctgggaaaattaaaaaacttgtagctaaggccacacgtgcgccccgaaccgaaaactcgaaacaacctgggcttgcgcctggaaaacctcattttgcggccccagaatggcttgcccccacaaaaaatctccccaggggggggtttccccctgcttcatccacacttggcacaccaccaaagattcgcattttgccccccggtattacaccccaccaatatttcaaaatttcatctccgccgcatataacacccccaaaagcacacccgcgccagagaaggctcctccaatatggagcgc

SEQ ID NO: 4799 - DNA, 742 bp, Zea mays
  Peptide Sequence Number=SeqID_12500
  Probeset Number=SeqID_19202
ggaggacgtgttgttgccaataaggtctacaagctggtgaagcatccgcagatcgatgtgcccaacctcctggtgatcaagctcatgcagagctttaagtgcaaggagtatgttagggagactttctggtgtcagtattcttgatggtttttcaccaacgatggcattgagcacctacgcaagtacctgaacctctcgtctgagatcgttcctgtcacgctcaagaagtctcccaagtcgcctggggggtcatttgggtctggccctcctggtggccgaccaaggggcccaggccgttttgatggcgacagaacaaggtttggtgacagggatgggtgacgtggtggtcctcgtggtgctcctggtgactctggtggcgataagagtggagctcctaatgatttccagacatacattcaggaggcctgtctttgggcgtgttgccgacagcgagttcggcacggtcccaacctatttttccatggagtgaagcaggccttgttttggacatggtgtttcccttcgcatgtgccctttagttttgaaggacagttattatgtgctagtaataatgctcggatcgtccagtggtgacatatgcaaaaatgttctgtcgttatacattggttccagtattatatcttcccaaaactcttgggttttcaagttgttactttttcagtgatattcgagtattccgtacctgcgtttggtggttggctgatcaaaaaaaaaaaaaaaa

SEQ ID NO: 4800 - DNA, 1019 bp, Zea mays
  misc_feature (2)..(4): n is a, c, g, or t
  misc_feature (6)..(6): n is a, c, g, or t
  misc_feature (8)..(8): n is a, c, g, or t
  misc_feature (12)..(12): n is a, c, g, or t
  misc_feature (16)..(18): n is a, c, g, or t
  misc_feature (23)..(23): n is a, c, g, or t
  misc_feature (30)..(30): n is a, c, g, or t
  misc_feature (34)..(35): n is a, c, g, or t
  misc_feature (37)..(40): n is a, c, g, or t
  misc_feature (44)..(44): n is a, c, g, or t
  misc_feature (46)..(46): n is a, c, g, or t
  misc_feature (52)..(52): n is a, c, g, or t
  misc_feature (54)..(54): n is a, c, g, or t
  misc_feature (57)..(59): n is a, c, g, or t
  misc_feature (63)..(64): n is a, c, g, or t
  misc_feature (69)..(70): n is a, c, g, or t
  misc_feature (79)..(79): n is a, c, g, or t
  misc_feature (81)..(84): n is a, c, g, or t
  misc_feature (86)..(86): n is a, c, g, or t
  misc_feature (88)..(88): n is a, c, g, or t
  misc_feature (91)..(91): n is a, c, g, or t
  misc_feature (94)..(95): n is a, c, g, or t
  misc_feature (100)..(101): n is a, c, g, or t
  misc_feature (105)..(106): n is a, c, g, or t
  misc_feature (108)..(109): n is a, c, g, or t
  misc_feature (124)..(124): n is a, c, g, or t
  misc_feature (126)..(126): n is a, c, g, or t
  misc_feature (131)..(131): n is a, c, g, or t
  misc_feature (134)..(138): n is a, c, g, or t
  misc_feature (140)..(140): n is a, c, g, or t
  misc_feature (155)..(156): n is a, c, g, or t
  misc_feature (158)..(160): n is a, c, g, or t
  misc_feature (162)..(164): n is a, c, g, or t
  misc_feature (166)..(166): n is a, c, g, or t
  misc_feature (169)..(169): n is a, c, g, or t
  misc_feature (171)..(171): n is a, c, g, or t
  misc_feature (184)..(184): n is a, c, g, or t
  misc_feature (187)..(187): n is a, c, g, or t
  misc_feature (189)..(190): n is a, c, g, or t
  misc_feature (192)..(193): n is a, c, g, or t
  misc_feature (208)..(208): n is a, c, g, or t
  misc_feature (212)..(212): n is a, c, g, or t
  misc_feature (216)..(216): n is a, c, g, or t
  misc_feature (222)..(222): n is a, c, g, or t
  misc_feature (225)..(225): n is a, c, g, or t
  misc_feature (230)..(231): n is a, c, g, or t
  misc_feature (240)..(242): n is a, c, g, or t
  misc_feature (245)..(246): n is a, c, g, or t
  misc_feature (248)..(248): n is a, c, g, or t
  misc_feature (254)..(254): n is a, c, g, or t
  misc_feature (260)..(260): n is a, c, g, or t
  misc_feature (272)..(272): n is a, c, g, or t
  misc_feature (280)..(282): n is a, c, g, or t
  misc_feature (294)..(295): n is a, c, g, or t
  misc_feature (297)..(297): n is a, c, g, or t
  misc_feature (302)..(302): n is a, c, g, or t
  misc_feature (305)..(305): n is a, c, g, or t
  misc_feature (311)..(312): n is a, c, g, or t
  misc_feature (316)..(317): n is a, c, g, or t
  misc_feature (319)..(319): n is a, c, g, or t
  misc_feature (321)..(321): n is a, c, g, or t
  misc_feature (324)..(324): n is a, c, g, or t
  misc_feature (332)..(332): n is a, c, g, or t
  misc_feature (337)..(337): n is a, c, g, or t
  misc_feature (348)..(348): n is a, c, g, or t
  misc_feature (354)..(354): n is a, c, g, or t
  misc_feature (356)..(356): n is a, c, g, or t
  misc_feature (362)..(363): n is a, c, g, or t
  misc_feature (367)..(369): n is a, c, g, or t
  misc_feature (387)..(387): n is a, c, g, or t
  misc_feature (394)..(394): n is a, c, g, or t
  misc_feature (399)..(399): n is a, c, g, or t
  misc_feature (419)..(419): n is a, c, g, or t
  misc_feature (434)..(434): n is a, c, g, or t
  misc_feature (436)..(436): n is a, c, g, or t
  misc_feature (442)..(442): n is a, c, g, or t
  misc_feature (461)..(461): n is a, c, g, or t
  misc_feature (484)..(484): n is a, c, g, or t
  misc_feature (523)..(523): n is a, c, g, or t
  misc_feature (700)..(700): n is a, c, g, or t
  misc_feature (759)..(759): n is a, c, g, or t
  misc_feature (784)..(784): n is a, c, g, or t
  misc_feature (815)..(815): n is a, c, g, or t
  misc_feature (838)..(838): n is a, c, g, or t
  misc_feature (854)..(854): n is a, c, g, or t
  misc_feature (858)..(858): n is a, c, g, or t
  misc_feature (870)..(870): n is a, c, g, or t
  misc_feature (873)..(874): n is a, c, g, or t
  misc_feature (877)..(877): n is a, c, g, or t
  misc_feature (881)..(881): n is a, c, g, or t
  misc_feature (890)..(890): n is a, c, g, or t
  misc_feature (893)..(895): n is a, c, g, or t
  misc_feature (908)..(908): n is a, c, g, or t
  misc_feature (910)..(910): n is a, c, g, or t
  misc_feature (913)..(913): n is a, c, g, or t
  misc_feature (922)..(924): n is a, c, g, or t
  misc_feature (927)..(927): n is a, c, g, or t
  misc_feature (929)..(930): n is a, c, g, or t
  misc_feature (932)..(938): n is a, c, g, or t
  misc_feature (940)..(940): n is a, c, g, or t
  misc_feature (945)..(947): n is a, c, g, or t
  misc_feature (949)..(949): n is a, c, g, or t
  misc_feature (952)..(952): n is a, c, g, or t
  misc_feature (955)..(955): n is a, c, g, or t
  misc_feature (962)..(962): n is a, c, g, or t
  misc_feature (966)..(966): n is a, c, g, or t
  misc_feature (973)..(973): n is a, c, g, or t
  misc_feature (976)..(976): n is a, c, g, or t
  misc_feature (978)..(979): n is a, c, g, or t
  misc_feature (982)..(985): n is a, c, g, or t
  misc_feature (989)..(992): n is a, c, g, or t
  misc_feature (994)..(994): n is a, c, g, or t
  misc_feature (996)..(997): n is a, c, g, or t
  misc_feature (1000)..(1000): n is a, c, g, or t
  misc_feature (1005)..(1006): n is a, c, g, or t
  misc_feature (1008)..(1010): n is a, c, g, or t
  misc_feature (1013)..(1013): n is a, c, g, or t
  misc_feature (1016)..(1018): n is a, c, g, or t
  Peptide Sequence Number=SeqID_12501
  Probeset Number=SeqID_19203
cnnnananctanttgnnnatcangatatanagannannnnacananggatananaannntcgnntgagnnaaacaatanannnnananganatnntatannatgnngnntaagaaataaaagananagaanaannnnnangaagaaatcgatganngnnnannnantangngatgtaagatatnatntnnannaaaaagtataagganatanacgntgaagnaanataanngaaacttannntgnnangtccanattcantcgtagaaaagncataaaannnacccgagttagnnanccacnatncaatannagannananagnttgtccanccagngtaacagtgtngtagtncnaacaannaccnnncaagcaggtcagagcaangagcagngtggngttcaagaacgaacaccccntcaaacgcccgtgtntngtctgntgcctcaaaaggccgaccntctacgaccggtgtgcgcacatngatgggccatccagctgcaccagccacacgcacagctcngccaagcatcaacatcgtctacgactggcagagcttccgcaggcttgaccaggacagccagtggacggacatctatgggcgccagaccactcgtctcacggacagtaccaaggcgcccttctgcagactctgaagcggcaagagatagcggctcccaagatgaggcggcttcatcancagcatcgcccaaagaagatcctccaatactttcgccgcagcccaaagccccgattgcngctaagaccagtgccatggaacggntgacagcggcatcgtcaacatacaccggcanagaagaacacgccaactaggacngagccctaatgctgcngcgnaccgagatctcnagnncanaagncataatcanagnnncgaggggggccgncnaancgtcaacannntcnanntnnnnnnnanttttnnnanaanaangagaagnaganagactanaangnncgnnnngaannnngngnngangatanntnnnaancgnnnt

SEQ ID NO: 4801 - DNA, 537 bp, Zea mays
  misc_feature (4)..(5): n is a, c, g, or t
  misc_feature (11)..(11): n is a, c, g, or t
  misc_feature (15)..(15): n is a, c, g, or t
  misc_feature (34)..(36): n is a, c, g, or t
  misc_feature (41)..(41): n is a, c, g, or t
  misc_feature (91)..(91): n is a, c, g, or t
  misc_feature (146)..(146): n is a, c, g, or t
  misc_feature (148)..(148): n is a, c, g, or t
  misc_feature (153)..(153): n is a, c, g, or t
  misc_feature (174)..(174): n is a, c, g, or t
  misc_feature (184)..(184): n is a, c, g, or t
  misc_feature (207)..(207): n is a, c, g, or t
  misc_feature (219)..(219): n is a, c, g, or t
  misc_feature (230)..(230): n is a, c, g, or t
  misc_feature (234)..(234): n is a, c, g, or t
  misc_feature (246)..(246): n is a, c, g, or t
  misc_feature (248)..(248): n is a, c, g, or t
  misc_feature (251)..(251): n is a, c, g, or t
  misc_feature (255)..(255): n is a, c, g, or t
  misc_feature (258)..(258): n is a, c, g, or t
  misc_feature (278)..(278): n is a, c, g, or t
  misc_feature (285)..(285): n is a, c, g, or t
  misc_feature (302)..(302): n is a, c, g, or t
  misc_feature (306)..(306): n is a, c, g, or t
  misc_feature (311)..(311): n is a, c, g, or t
  misc_feature (338)..(338): n is a, c, g, or t
  misc_feature (365)..(368): n is a, c, g, or t
  misc_feature (376)..(376): n is a, c, g, or t
  misc_feature (388)..(388): n is a, c, g, or t
  misc_feature (390)..(390): n is a, c, g, or t
  misc_feature (403)..(403): n is a, c, g, or t
  misc_feature (414)..(414): n is a, c, g, or t
  misc_feature (419)..(419): n is a, c, g, or t
  misc_feature (444)..(444): n is a, c, g, or t
  misc_feature (448)..(448): n is a, c, g, or t
  misc_feature (451)..(451): n is a, c, g, or t
  misc_feature (462)..(462): n is a, c, g, or t
  misc_feature (466)..(466): n is a, c, g, or t
  misc_feature (487)..(487): n is a, c, g, or t
  misc_feature (490)..(490): n is a, c, g, or t
  misc_feature (516)..(516): n is a, c, g, or t
  misc_feature (535)..(535): n is a, c, g, or t
  Peptide Sequence Number=SeqID_12502
  Probeset Number=SeqID_19204
atcnncaagtnttgnattccaggcagcggggccnnnaggcnaggtctccacccgctcagcctcctcatgctgtgcaaccttgctccccatntgctcagcctcagcatgtagattcccgcgaagggagcgcgctcccggctctatcnanggacngagtcgccggcctcgtcgtcnagctcctcgncctcttcttcgacgccggggccncggttgcagganccggcctcgangccngagaggcactcnanagncagngcntacccagggacggagcttcntcctcgngcgatcgatcggttcantggnggacnatgggcatccccttccctcggcttgcnactatgaaggatggtggcccaaggccnnnnctggattnccgatatcgacncncgtatcttacaangtgggggtgcncgctnttgctgccggcataagctcaaaccnttgntgntattgattaanatgnccccccctggagaccaaggcngcntctgtatgatattgctaatggcaagngagtcgttgcaaatctcancc

SEQ ID NO: 4802 - DNA, 885 bp, Zea mays
  misc_feature (1)..(284): n is a, c, g, or t
  misc_feature (885)..(885): n is a, c, g, or t
  Probeset Number=SeqID_19205
nnnnnnnnnnnnnnnnnnnnnnnnnnnnnnnnnnnnnnnnnnnnnnnnnnnnnnnnnnnnnnnnnnnnnnnnnnnnnnnnnnnnnnnnnnnnnnnnnnnnnnnnnnnnnnnnnnnnnnnnnnnnnnnnnnnnnnnnnnnnnnnnnnnnnnnnnnnnnnnnnnnnnnnnnnnnnnnnnnnnnnnnnnnnnnnnnnnnnnnnnnnnnnnnnnnnnnnnnnnnnnnnnnnnnnnnnnnnnnnnnnnnnnnnnnnnnnnnnnnnnnnnnnnnnnnnnnnnnnnnnnnnttttttcccccccagcgcccccaatttttccccccctttaaagaggggcacaaaaaagtgtgggttttcccccccgcgggggggggccccccctttttaaaatttttaggttttccccccggggttcccgggaattttcccccgggaccctttttcttttaaacctttcttttttgaaaaatttcccaaaaatttttcccccattttcacaaggggttccatggttttccaatcgtccctactcccttacttcccggaaaattttaggcggttttgatggccccccaagccggaaaagaaacccgcggcgaagaaagttgccgagaaggacaccttggagaaggcggcttcggcggagaaagcccccccggggaagaaggccaaggcggagaagcggctacctgcgggcaagtccgccggcaaggagggcggcgacaagaaggggaggaagaaggcgaagaagagcgtggagaggtaattttgataggttacattatgttaagttatagtggtcgtgtttttctgttatttcgtaatgcttgtcaagacattatgaacaagtcattgagctgttactattggcaaaaaaaaaaaaaaaaan

SEQ ID NO: 4803 - DNA, 417 bp, Zea mays
  Peptide Sequence Number=SeqID_12503
  Probeset Number=SeqID_19206
cccattaagaaacgaaaacatcctttttttttcatacattaggccgatcgggtcgagaccagatacacagcacactccaccagacaggacacgtacacaggtgtcatttcgtacacgcttaactgctcaaagatcaaccgcgcgggggcggggctaaacttattagccccgccaccacgcggccggacctttttttggctttgggtaaaccaggcaccgggccggcgtccttggaaattgggacacaaaaaaaacccccgcgagggaaaacaaaccaaagtttaaaaaaccatgggccccgggttacttacttcaggtcctgggattccgcgagggggggccctttgctgcaatgggtgggcgcgtacgggttgcacccctgcttgataacccccgggcccttggggagcgggcccc

SEQ ID NO: 4804 - DNA, 485 bp, Zea mays
  Probeset Number=SeqID_19207
tttttttttttttttaaagcataataccacaaatttaataagtattagtagtaattacattatcggagtttcaaaaataataaccataaatttttaatgcagsggaataactaacggayaaaaccgamtaacamggcyaagcctgaccacactacttctcctggtcctctcctgcayaagcaataacccactcyaccgtrtatcccggmggcatggatgaaggccaagtcacaccatcaaccaaatcaaggaggtkcctttaatttaacacttaaatagtgtttgctgggcggaggtactcscttggcyagcatccactggtcaagtccatcattcttcaggtcgtccaccaactgcaccttgmggttggcaccacatcactggctcggmcatcatctctcggmcctggctgactcgtgtckcbcatgtrtgcatgctgtccacagcttggggcttttgtcgagcwtggaatgcacgaggcatga

SEQ ID NO: 4805 - DNA, 679 bp, Zea mays
  misc_feature (304)..(304): n is a, c, g, or t
  Peptide Sequence Number=SeqID_12504
  Probeset Number=SeqID_19208
actaggttagacaataccaatttcatgcctggacatccgacaccttgctcactacagttactcctaatactgcgaaccgcagccttctgattctgctgctcatgtactgggagcacattattactgaacgttaaatgtaccattcacgcccatttcatgtctgctcgtgagataaaagtaaatttgggaaataaccccgggcctttgacgatagagcatacgttcgcgacaacatcccactgagatgtacacgcacagctacgtgcactgttagagctcagcaaatcgtaccatcgtcatgcgnaggaacaaaaagtttatccttacgtccaacgctcaaggggtgatcaccggaacccttttccccctaaagtgatcccaaattaatggcctacccgggcggcctctttaaaaggaattaataggaaaaccccttgggttcccccattaacgcccccgggaaacatcccccttttcccggtggggcagaaaaaagggaaggccccctccggaaaaccccccttcaactaggcgccccccaaagggaaaaaggggaatttcccccccaaaattttttgtgaaaaaccccgaaaaatttctttaaaaaaaaactttttttttttattaaaggggcgccccccccccccctcccttttttttaaaagaaaacggggggggg

SEQ ID NO: 4806 - DNA, 776 bp, Zea mays
  misc_feature (630)..(630): n is a, c, g, or t
  Probeset Number=SeqID_19209
ctctctctctctctctctctctctctctctctctcttcggaccaagaaatcgcagctaccccttttctttctttgctgctgcttggtcagagctctctttttacctgctatgcctcttttgccaaattgatatcggtcgtgttcttggcacagaagataatctcccagcgaaaaaatgggtatcccttgtcaggacgacactgaataagaatcctggttcatgcttttatggtggctttcgcacgccatctcctgtccctgatgcagttgtaatacaagatgctgattttgagcgatcgtccctgcggctggacattttatcctatttgaatcgtcggtcgttcagacttatgcggaggttatgagttgaagggaatcatatcctgccaagccaagggtatcacttaaggttcggtgactgaacaagaaccctgagcctagcagtcatggtggctatcgcacgccatcccctgtccctgatccgcatgtggaactagatgctgattttgagggatcattgagaagacaggatagctcatcatttttccaccggcgatcattccagaaccttagtcggagtttaagggtttcaggaaatgatatgttctcacaaccaagattggaccgtangtttagtgtgtgtgacccagttaacattggaggccgaccaagtgattttgatggaaatttcagtgtatcggatcaccagcgatgaatatatggacgaggatacagtaatggagcatattttcaccattccatatggctatggtact

SEQ ID NO: 4807 - DNA, 2007 bp, Zea mays
  misc_feature (1)..(1174): n is a, c, g, or t
  Peptide Sequence Number=SeqID_12505
  Probeset Number=SeqID_19210
nnnnnnnnnnnnnnnnnnnnnnnnnnnnnnnnnnnnnnnnnnnnnnnnnnnnnnnnnnnnnnnnnnnnnnnnnnnnnnnnnnnnnnnnnnnnnnnnnnnnnnnnnnnnnnnnnnnnnnnnnnnnnnnnnnnnnnnnnnnnnnnnnnnnnnnnnnnnnnnnnnnnnnnnnnnnnnnnnnnnnnnnnnnnnnnnnnnnnnnnnnnnnnnnnnnnnnnnnnnnnnnnnnnnnnnnnnnnnnnnnnnnnnnnnnnnnnnnnnnnnnnnnnnnnnnnnnnnnnnnnnnnnnnnnnnnnnnnnnnnnnnnnnnnnnnnnnnnnnnnnnnnnnnnnnnnnnnnnnnnnnnnnnnnnnnnnnnnnnnnnnnnnnnnnnnnnnnnnnnnnnnnnnnnnnnnnnnnnnnnnnnnnnnnnnnnnnnnnnnnnnnnnnnnnnnnnnnnnnnnnnnnnnnnnnnnnnnnnnnnnnnnnnnnnnnnnnnnnnnnnnnnnnnnnnnnnnnnnnnnnnnnnnnnnnnnnnnnnnnnnnnnnnnnnnnnnnnnnnnnnnnnnnnnnnnnnnnnnnnnnnnnnnnnnnnnnnnnnnnnnnnnnnnnnnnnnnnnnnnnnnnnnnnnnnnnnnnnnnnnnnnnnnnnnnnnnnnnnnnnnnnnnnnnnnnnnnnnnnnnnnnnnnnnnnnnnnnnnnnnnnnnnnnnnnnnnnnnnnnnnnnnnnnnnnnnnnnnnnnnnnnnnnnnnnnnnnnnnnnnnnnnnnnnnnnnnnnnnnnnnnnnnnnnnnnnnnnnnnnnnnnnnnnnnnnnnnnnnnnnnnnnnnnnnnnnnnnnnnnnnnnnnnnnnnnnnnnnnnnnnnnnnnnnnnnnnnnnnnnnnnnnnnnnnnnnnnnnnnnnnnnnnnnnnnnnnnnnnnnnnnnnnnnnnnnnnnnnnnnnnnnnnnnnnnnnnnnnnnnnnnnnnnnnnnnnnnnnnnnnnnnnnnnnnnnnnnnnnnnnnnnnnnnnnnnnnnnnnnnnnnnnnnnnnnnnnnnnnnnnnnnnnnnnnnnnnnnnnnnnnnnnnnnnnnnnnnnnnnnnnnnnnnnnnnnnnnnnnnnnnnnnnnnnnnnnnnnnnnnnnnnnnnnnnnnnnnnnnnnnnnnnnnnnnnnnnnnnnnnnnnnnnnnnnnnnnnnnnnnnnnnnnnnnnnnnnntctgctttttttttctggtcttgctgttgtgactagatctttaatgtttctaatgtttccacgatcttgaggaacatttggtctccttaaagattgagttttactctgtaatgaaatgcataaaaagaagtgatctttcacttgttaaaaaaaaaaaaaaaaaaaaaaaaaaaaaaaaaaaaaaaaaaaaaaaaaaaaaaaaaaaaaaaaaaaaaaaaaaaaaaaaaaaaaaaaaaaaaaaaaaaaaaaaaaaaaaaaaaatccccgggggggggcccggaacccaattcccccaaaagggggggaaaaaaaaattcaggggccggttttaaaaaacgggggaggggaaaaaacccggggggtgacccaattaaaccccttggaaaaaatgccccttttccccaatggggaaaaaaaaaaaaaacccccccccaattccccttcccaaaaattttcccccctaaaggggaaggggaaatttgaaggcgtaaaatttttgtaaaattcccggaaaatttttggtaaacccccctttttttttaacaaaaaggccaaaatcggaaaaatccctttataatccgaaaaaaaaaccgaaaaaggggaaaagggggttacctcccgccagaaaaaaccacattaaggaacagaaaggggaccgcgcagggggtgggaaaccccgaattaagggggggggggccctcccgtaaaacaacccccggaacgaaaattgccccgcggaggagaaggaccaaaacctcgtggggggaaacctgaagagaggcccaaatatggaactttcggagggaaacgcccaggggaaagggtccagaaaa

SEQ ID NO: 4808 - DNA, 591 bp, Zea mays
  misc_feature (132)..(132): n is a, c, g, or t
  misc_feature (238)..(238): n is a, c, g, or t
  misc_feature (247)..(247): n is a, c, g, or t
  misc_feature (297)..(297): n is a, c, g, or t
  misc_feature (306)..(306): n is a, c, g, or t
  misc_feature (310)..(310): n is a, c, g, or t
  misc_feature (316)..(316): n is a, c, g, or t
  misc_feature (338)..(338): n is a, c, g, or t
  misc_feature (405)..(405): n is a, c, g, or t
  misc_feature (412)..(412): n is a, c, g, or t
  misc_feature (419)..(419): n is a, c, g, or t
  misc_feature (432)..(432): n is a, c, g, or t
  misc_feature (444)..(445): n is a, c, g, or t
  misc_feature (456)..(456): n is a, c, g, or t
  misc_feature (465)..(465): n is a, c, g, or t
  misc_feature (469)..(469): n is a, c, g, or t
  misc_feature (472)..(472): n is a, c, g, or t
  misc_feature (486)..(486): n is a, c, g, or t
  misc_feature (490)..(490): n is a, c, g, or t
  misc_feature (493)..(493): n is a, c, g, or t
  misc_feature (496)..(496): n is a, c, g, or t
  misc_feature (499)..(499): n is a, c, g, or t
  misc_feature (511)..(511): n is a, c, g, or t
  misc_feature (530)..(530): n is a, c, g, or t
  misc_feature (539)..(539): n is a, c, g, or t
  misc_feature (541)..(541): n is a, c, g, or t
  misc_feature (548)..(548): n is a, c, g, or t
  misc_feature (559)..(559): n is a, c, g, or t
  misc_feature (561)..(564): n is a, c, g, or t
  misc_feature (578)..(578): n is a, c, g, or t
  misc_feature (580)..(581): n is a, c, g, or t
  Probeset Number=SeqID_19211
ggagtgtggaggagaagttgagtatgcgggagaccggggtttgaagctagttggatggtaaagatctccaggactctggacagggagtatctgctttctgttttgatactaccgattaattgtattgactgnataattattttcatttttgctttaagatatgtttgattagtaatgcttttgattgggaaaatcgatttggtcatacgagacttctggcactgacatggtgtatccncccttttgnttttaaaaatgttttagttgggggttctcatcattcagcctgcaggtttntgggattcncccnaaaaanctcccccctggcacagaaaaantttccctccttaactcccaaaccaatcccataatgggcaaaaaccaaaagggtctggctgcccctcnttttttncaatggngaaaaaccctggnctggaaaaaatnnggttagcctcntcctaaagnttgnacntggaaaaagttttnaaanggnttngcnagccttcgtttngttgagggataattttggncggggaatntntacccgnttccaaaatcncnnnnaaatgggaaaaaantnntttttttcct

SEQ ID NO: 4809 - DNA, 930 bp, Zea mays
  misc_feature (290)..(290): n is a, c, g, or t
  misc_feature (294)..(294): n is a, c, g, or t
  Peptide Sequence Number=SeqID_12506
  Probeset Number=SeqID_19212
agaagccaatgaggcaattgattgtgtgtgaggctgctgctcctaccaagaaagctgattcagctgcaaagagagctcgccaagctgagaagaggcgtgtttacaacaaatctaagaaatctgaagcccgtacccggatgaagaaggtcttggaagcacttgaggggctcaagaagaaaactgatgcgcaagctgatgagattgtgacggtggagaaactgataggagaggcttattctgcaattgacaaagcagtgaaggttaaagcactacacaagaactacttgggntggnccccgtgggcgcgcccccaccccaccggccctcctgccagtccccagatcgccaggagcaatagaacgcaataatagagcgaaaagagcgctaaccaccgttttatctgtgcgccctcgctcctccacagaggcctagtcgcgccgcgtccacgccccatttcggcgctaacaggctgtccgctgacctccgcgtctaccctcccaacccccaggagggcgagcacccccttatttaggtcagccccgagctcgaggtccatcgatgtacttacctcctagagtgcttcatgcaataccagagcaagttagtgactctcagacctacgctgggacatgtctgacgctcttatgtgcaacgctctagtcatctcgctatcctgccgtcccccctatgctgatggaatctagtcctagtcgcgcgcgccgttctgtggaatgctggtcacaacggtgcgcagggactcaggagtctctcttctctcacggtcggccgcccctaccgacaccccgtcctacagatcagtacacgcagacccctacgccgcttctgtggtccgctgattgatgggcaactctccgcagccgcgccttattcccccactcgcgtttattcctggctccccgccttcgcccc

SEQ ID NO: 4810 - DNA, 831 bp, Zea mays
  Peptide Sequence Number=SeqID_12519
  Probeset Number=SeqID_19213
ttttttttttttttttggctggttcagtttaccactactatcatcgccattctgagatccatccatgaaattacagagcacagcatacaaaatgatgcatgaagatagacagacacacacacagttttcttcttcttcttctggattactactacttcttggagcagctgactactaaggaggggtattatttatactactactatcatatactgactgactgactgacttaattaaggctggctagagctaaaacaaccctagatttttctttcctttcttctgatgctgttgttgttggtgtccctgctcctctctcgggatcacttctattatttgttagagccttttaccttccattcactcacttcatggggtgctcatggcttcgtctgcttaagaggaaaggagacccctgttttctgcttaatattcacagcccgatggcaccatggccaggagagaacctgggcacttgtaagaagcaggatttgtaaggcggcagctcaagggcagttggtgtaaacagagaccaggccacccgatgagggctgcccgttgctgttcaatgaatgctgccaccgagggctggttctgcagaagcaaaagaaaccccagcctcctttgtcattgtgggaaatgcaaaggggctattcagcaggttgtgctcctccaaccccgctttcttggaaaccattaacactggccccctattgctccaggaagaccaggttccctcttttcatcttcccccggagttgaaccccctggtttggtacttgcggtagaccctccctcctccctgctttgccttcagcggcaaatgggagg

SEQ ID NO: 4811 - DNA, 462 bp, Zea mays
  misc_feature (453)..(453): n is a, c, g, or t
  Probeset Number=SeqID_19214
attctctctctgttctcttgtgcgtgcctgcgctctgtagtgacgacgactgggcggcggccgctgccgccgacctacgtgcgcaggtctccatcttccggaccttcgctggagacgagcacccaccaccagatctgtttgcggctggatggtttgtgtgtagcgttgttcattattgatccgacggggacacacaaggctgcgctatggcccttgccaccgcgatcggtgaggggcatggtcgcccatgccgactgagcgtgcaagtgggcctatgcccatgtctcggcccgtcagctgggccccgccaggtctgttcacgccatggttgattctgttacaaaatattgtcatatattggtcatgtgatcaaccctcttccccgacgatctcttccctgacaattttcttccaaaggacacacaattttctcccaaaggacacaccctttangagacactg

SEQ ID NO: 4812 - DNA, 508 bp, Zea mays
  misc_feature (414)..(414): n is a, c, g, or t
  misc_feature (462)..(462): n is a, c, g, or t
  misc_feature (465)..(467): n is a, c, g, or t
  misc_feature (469)..(469): n is a, c, g, or t
  misc_feature (473)..(473): n is a, c, g, or t
  misc_feature (475)..(475): n is a, c, g, or t
  misc_feature (480)..(480): n is a, c, g, or t
  misc_feature (483)..(483): n is a, c, g, or t
  misc_feature (485)..(485): n is a, c, g, or t
  misc_feature (490)..(491): n is a, c, g, or t
  misc_feature (495)..(495): n is a, c, g, or t
  misc_feature (498)..(499): n is a, c, g, or t
  misc_feature (502)..(502): n is a, c, g, or t
  Peptide Sequence Number=SeqID_12520
  Probeset Number=SeqID_19215
actttccaggatcacctccctgccaattcaatcaccagcgcacgcacgtcctgctcctccacgtaccctcgcacgtgtgacctgatggccgccgctccccccatctgggcccggcttccagcatcgcgttgcgctccctggtgctgagcctcccctccctcagcgccggcagccgccctctcacccagctcctcgccgatgacccagtacccgttctcgcgcgcgcccttcctctacgcagctcgccagcgccggctgtctttgccggggccgcgtcccaacgccgcgggctcgccccggcccctggcactcgtctactacctccggtgctgtgctgtgccctggtggccgctgtcgctgctccctacgctcgcggctccctgaacgcttctcctccagctagaccagaccagncacccccgtgctcttccccgcgctctccaagggccccccccccccccnaannncncatnanattcnttntnccccnncccnccnnccncccccc

SEQ ID NO: 4813 - DNA, 579 bp, Zea mays
  misc_feature (160)..(160): n is a, c, g, or t
  Probeset Number=SeqID_19216
ttttcttttttttctttcttttttttttttttatgctactttttcttttttattttttattttttttttttttgattttttcttattttttttttttttttttatttttttttgttttttttcttatattttttttttgttttttttttcttttttattntgtttttttcttttacttcttgattttctttcccctgttttctttttttttattttattttttgtttgctttggtttcgtggttttttcatcttttttatcttttattgttagttggtttttagtggtattccgatgtacttattatcgtgacattttcgcgctcggagttcggtgctgccattgtgagtgatggcggtctctggtggtagtactcgagccgaatttttctcgctgctgctaataacgattcctgctggtcgttggatcgacggccgcgatcagtacgcccttagcttatgcttgtgatctcaaaaatgaggttagaggttgatgatcggatccaggaattggatgtctgcaactcgagagaatgtatactgtacagccctgttattctctgcaaaaaaaaaaaaaaaa

SEQ ID NO: 4814 - DNA, 776 bp, Zea mays
  Peptide Sequence Number=SeqID_12521
  Probeset Number=SeqID_19217
aaaccgcatttggtcctgagaggatttcttataggggaggttattgctgtaagttgttgcaaaagggatgtggcgcgggagccctcgggaggagtcctgtcgcggatcaatatgtaggggcctatgttttacaaaaggagatgggccgtaactctcggcaagcgatcttggttgcccacacaaagccattggggctctcgataaggcaatccatcctattccgtcgcgactccagcggtgaggccctggaaggttattctggagcaggattatatgataggtcaccgatggatgaggaggacgaggttgtacttgattatgcaacagagcctcttatactggaccgtggattccgaacctcaatcctctcaagcatagcacgtgctggccgtgccatcggggagttatatggttctcctcacgacgtcgagggcgtactgaaggatggaaaactgtatgtcgtccagacaggtcccctggatgtagtgacgtatgcgtctattagacagctcaataagcactgttgtcctcttctatggttgggacatatgggcgttatggcatgcatagttgtctgcctagatgtgccacgcgtgtcctcgtatgtatatgtatgaatgctggcacaagcattggtcctgtaccgtagtttgtacatttcactgtctccagtaattaagtgtgctcttacgcctgggagtctatgaaaatgggcgtgtgggcttattgggtaatcaataattctatctatattcttgtggaaaaaaaaaaaaaaa

SEQ ID NO: 4815 - DNA, 468 bp, Zea mays
  Peptide Sequence Number=SeqID_12522
  Probeset Number=SeqID_19218
ggacggtatgtggattcgtgtttccagtcgactacatgtgatatttattagactatctgaatggtttacattagtttgatgctcgacaaaatgttcgaacaagtcatcgatttcgtgggtttaagtcggatttaatggatggtaagttggttcgttattacagtcgactaggtttaatatttattagattgcctgagtcgttaaagtgaggattccggtagtcatccatgttgctgatcccttgctttatagtagttattacgttctatgtggtttgcttgggtttagattttcgaaatatttaatagaagtacggtatttaacgtgtaatcaacgaaaaacccggcgtattcgttaatcaatgtagtaaatctgagctaaatttattattggcactcaagttgttagccgaattgttagatagattaaataaatatgtgtgataaaaaaaaaaaaaaaaaagcggcc

SEQ ID NO: 4816 - DNA, 839 bp, Zea mays
  misc_feature (101)..(101): n is a, c, g, or t
  Probeset Number=SeqID_19219
gatggactgttcaaatacttcttctgcccgcactacacatgcgagtgcttgctttacgtcggactcgctctggctggggcacacaaaggaagcatcttcancaagacaatcctctccggcctacttttcgtcactgtcaactggggagcgacggcgtatggcacgaaacagtggtatatgagaaagttcggcgccgatcaggtcggcaagcggtggatgatgatcccgtacttgtggtaggcggggtgaaagcgagtcagagtgtgagcgctcagcgcttcagaaatatgccaagcttgctgcctactttggagactttgagaacgtctcgatatgtaagactagtccttgtttgtcgtacatttcggccgtcctcaaacgaggtgcttgatcgtagaagagaccaattaaccacggtttcgggcgtaagagcggtgtcttcctcaatatcggcgataccatggagataatccgtgtagaggctatctgtggtgataagcagactacgaggctcttgtaagatgcgccatgctggttcagggtccaaagcgccgtcttctttactccgatggagattcaggcataggctggatccgagactcacagtgcagacgactggccagtatgcagcgccgtcctacgtaggatgagcacaagactacagtgtcggggacgctacagacatgaacttaacttatgcggcatgattccgatgcctggaggatattcattgataaggacatggtttggccgttgatgtggactctgttggaaaacgtggtccccattgtcacttgtcagacttaaggattgtaaccgattgataacaggctcctcga

SEQ ID NO: 4817 - DNA, 421 bp, Zea mays
  Peptide Sequence Number=SeqID_12523
  Probeset Number=SeqID_19220
gtaaaagatgaagtgatgcttatttactcttatattatctgagccacccttaccaaaatcaatgtcatgagcatatctttgcatactaaattgctaagttccaacttgaattttaaatttcaaaggcataggcgtctgggcagagcggcagaccatttgtctgcctttgtaacagggaggggggggggtgtgatgggcaccggctccctgctggagatcgcggtcaagccgcgacgagcgtggggggaggctttttttacgggccgcaggactcgcccccgctcctgggaactctttgatgagccctggtagtacaaggagagcgtcctccctgctgctcgtcgcagcgacgatcagcatcctgaggctgggtccactcttgtctggcggaagtacgttgtgtcccagtgctaggccattg

SEQ ID NO: 4818 - DNA, 385 bp, Zea mays
  Probeset Number=SeqID_19221
gagatggaaggagtatcatcatatatatactagtaatgctacactggcagcatttccgtaatacttccttcaaaacttgaaaatcactccaactattattaaacaaaatcgataaatatagaagaccctgtttatggagaggagcaaatattaatggaaagaaaccatcaatggcagcatggaaactagtaacaagaccaaaaagcgaaggagacttgggtgtgctcaacatttcggtacataatgaggcattcttaatgaagaatctgcataaattctttaacaggcacaacatccctcgggttcagttactctggatcccatatcactccaaaaaaaaacttccttcaaaacttagagaaagcagtttttatgtaaatgattc

SEQ ID NO: 4819 - DNA, 858 bp, Zea mays
  misc_feature (22)..(24): n is a, c, g, or t
  misc_feature (836)..(836): n is a, c, g, or t
  Peptide Sequence Number=SeqID_12524
  Probeset Number=SeqID_19222
ctcccccaagtcgggagatgannncggtgtcatgcgttccgtgaaaatcattcccaccgttcaaccctaaaaatgaatcgagccttggaatagcttctcttttcgacgaagggcgggagggtttgttttggcggcaccatgaaaaggaattctgcgtgcgcccgaagagggataaatttgatgcttttttcatcaaccaactggggggggattggccttttccgaaaacccttatttttattggctgtttgggggccaacaagtgtgaggtgcagaaaatggaaacaactttttgacctgcaaccggggttcattcttacccttccagttttggactttttagaacaaaccccggcgggaagggcttcttctcatttgggccttcccacccagaggcccggaaatgatgggtcggtttgtcagatcctttccaccccggggccgggaaatgtgagttgctttagttcccaagagaggggttctgtttagccagatggtttgaagccttggccattggccaggcttgttaaatagatttgggggtttttgttttaaatccccctgaaggggggggggggccccaaggatgccggtcaaggggtatttggatcgggctccgtttttataaaccgtcaaatatttttttggaaatattttgggttgattttgggggaaggggactttttatggcccgggcccttgtgttttttcttgaaaaataaggaaggtattatttttgtttttggactttaaaagcttaaaagaagggatccttttgggtgggaaaaaaaaaaaaaaaaaaaaaaaaaaaaaaaaaaaaaaaaaaaaaaaaaaanctcgagggggggcccggtccca

SEQ ID NO: 4820 - DNA, 596 bp, Zea mays
  Probeset Number=SeqID_19223
ataaacccccactgcccagatccccctcgtcgtccctccccgccgccgagccgccgccatgcatcccgacgccacctccccctcgcaccgcatcgcccgcgtcgccgcgcacctcaaccccactcgcccgcagatggaggagggcgcggcgctgaggcccgcggcgtgccgcgccaagggcggcgcgccggggttcaaggtggcggtggtgggcgcggccggggggatcggccagtcgctgtcgctgctcatgaagatgaacccgctcgtctccgtgctccacctctacgacgtcgtcaacacgcccggggtcaccgccgacgtcagccacatggacacccagcgccgtggtgcgtggcttcattggccaacaacagcttgaggcagcactaacagggaatggatctttgtcatcatccctgccggcctcccaagaaaaccaggaatgacaagggatgatcggttcacaaaaatgctgggaacgttcgctccaactgtgaaagcgttgccaagagctggcctaatgttattgggaatttgatcagcaaccctgtggaactcaaccgtccccattgctggcaagggtttccggaaaa

SEQ ID NO: 4821 - DNA, 1491 bp, Zea mays
  misc_feature (1)..(890): n is a, c, g, or t
  misc_feature (1491)..(1491): n is a, c, g, or t
  Peptide Sequence Number=SeqID_12525
  Probeset Number=SeqID_19224
nnnnnnnnnnnnnnnnnnnnnnnnnnnnnnnnnnnnnnnnnnnnnnnnnnnnnnnnnnnnnnnnnnnnnnnnnnnnnnnnnnnnnnnnnnnnnnnnnnnnnnnnnnnnnnnnnnnnnnnnnnnnnnnnnnnnnnnnnnnnnnnnnnnnnnnnnnnnnnnnnnnnnnnnnnnnnnnnnnnnnnnnnnnnnnnnnnnnnnnnnnnnnnnnnnnnnnnnnnnnnnnnnnnnnnnnnnnnnnnnnnnnnnnnnnnnnnnnnnnnnnnnnnnnnnnnnnnnnnnnnnnnnnnnnnnnnnnnnnnnnnnnnnnnnnnnnnnnnnnnnnnnnnnnnnnnnnnnnnnnnnnnnnnnnnnnnnnnnnnnnnnnnnnnnnnnnnnnnnnnnnnnnnnnnnnnnnnnnnnnnnnnnnnnnnnnnnnnnnnnnnnnnnnnnnnnnnnnnnnnnnnnnnnnnnnnnnnnnnnnnnnnnnnnnnnnnnnnnnnnnnnnnnnnnnnnnnnnnnnnnnnnnnnnnnnnnnnnnnnnnnnnnnnnnnnnnnnnnnnnnnnnnnnnnnnnnnnnnnnnnnnnnnnnnnnnnnnnnnnnnnnnnnnnnnnnnnnnnnnnnnnnnnnnnnnnnnnnnnnnnnnnnnnnnnnnnnnnnnnnnnnnnnnnnnnnnnnnnnnnnnnnnnnnnnnnnnnnnnnnnnnnnnnnnnnnnnnnnnnnnnnnnnnnnnnnnnnnnnnnnnnnnnnnnnnnnnnnnnnnnnnnnnnnnnnnnnnnnnnnnnnnnnnnnnnnnnnnnnnnnnnnnnnnnnnnnnnnnnnnnnnnnnnnnnnnnnnnnnnnnnnnnnnnnnnnnnnnnnnnnnnnnnnnnnnnnnnnnnnnnnnnnnnnnnnnnnnnnnnnnnnnnnnnnnctgcacaacttatccaaaacaatgataacatttaaaacaagggagaagatgatgaattttcactggtatttgctaggtattgaaaaatcactcctgtatgaattaggaatttttaccctcggtctcattcctattggacaatgttgataagatccgacatattaaaggatttatttgtacagggactttatgatgtttgtcgtcctatgatgtctgctggggatcttcacaaggctgtagcagaagcaggattcaaggtcaaagcagttgccgtcccctccgaactgaagtcaggcaccgatgtaaactgagagacttgctccgcaaatcagccggcgaaaggcaacctgcacctctatctgatcatggaactcagaggcccataataattacatagctgtgtaacggttagcactgtgccgttaaacaatgtcattgtcaccatcgactatgttgtttgtttgctcgctggagtgtatgaggaattgaagttagacctggtctgtatagccagttgtgccagggcaacacaccctggctctcacctagatcctgtttggttgctaaaaaaaaaaaaaaaaaaaaaaaaaaaaaaaaaaan

SEQ ID NO: 4822 - DNA, 768 bp, Zea mays
  misc_feature (1)..(1): n is a, c, g, or t
  Peptide Sequence Number=SeqID_12526
  Probeset Number=SeqID_19225
ntttctctatagtttttttattcttgcatttgttatcatttttggtttgttttgtttttttttttttttttttgatatttcttattttttttttttttttttttttttttaggatcgcaaaatccaaattgggatcatagtattagcatcgatcaggcaggattacagaaacgaaacccccttggcgacccacacatcaccaaggaaggaacgaaggaaggaacaacagacgatcacataattaggggaaccgggaggagtaaatagataagtaagacaacgagtagttaatgattaatcgggtgaaccaaacacgatgttcccatcccaggattcccggactcccgcgcgggacatcgacacagccgcagagaaagatgcgcttaagtaacaatcctagaaaatgcacgcccccacccacatcgatggatttgtatgccccagcacacccgccgggaccaagagtgcaggggccccggtccttcgccgcgcactcggctgccattcacgccgtggaggggcgtcgctagggcgcttgtccaacagtctggtgtaggatgcggcgtaacaggctccgctgcaacggccagacagctttcaggtcgccctcatcaactaaagtgcaccgcgcgtgatggtggaatatcgaccgccggcggggtctgcacccagcgatatacgcgcacgcatacgtccgcagcctcgtccccaataatgtcgcttgcccaccgattcctgtactgccacgctaccgggcgcggccacccg

SEQ ID NO: 4823 - DNA, 779 bp, Zea mays
  misc_feature (601)..(779): n is a, c, g, or t
  Probeset Number=SeqID_19226
gcagcgggcgcggcgccgcgcttcgcggcttttgctgcgggcgcggctgtgggagccgggggacaagatgaggtggggggggagcggggcatttacagtgatctgcctgcgccctgtggggagagcagggtggtcggcaactcgtgctgggttgtgcgctctcttgtcggcaccggagagaaagcaaggggtagtgggcgtcgtcgccggcggcaagccttcggatgtgcgtcgagctccacatcgtttatatcgaatccacccagggggagattgaagcccctttgtctgggaatttcgcggggaagcaagcggttggtgatttggtggtgaaggaggctatggggtcgtcgtcgaaggtggtgcggccggaggaggtgctggagtcgctgaagaacgacggcagcatcgacgcgctccgcatgaagatcatcgcccagctcaaggccaatgtgcgtgcacgcctcccttcctcccccattcccctcctattcctctgaagggggcaggggttgtatctgccgggcgagtgccgcctcgtggttagacttgatcttctacggggcccccgccccgccgcgccacccccccgcgtgtcccnnnnnnnnnnnnnnnnnnnnnnnnnnnnnnnnnnnnnnnnnnnnnnnnnnnnnnnnnnnnnnnnnnnnnnnnnnnnnnnnnnnnnnnnnnnnnnnnnnnnnnnnnnnnnnnnnnnnnnnnnnnnnnnnnnnnnnnnnnnnnnnnnnnnnnnnnnnnnnnnnnnnnnnnnnnnnnnnnnn

SEQ ID NO: 4824 - DNA, 1026 bp, Zea mays
  Peptide Sequence Number=SeqID_12527
  Probeset Number=SeqID_19227
cccagccccccccccccccccccccacacacccgtcactacctaaaaaaacaccgattgggtacgggccccccctcgagagccttgtcacagctcagtcgttggcaagagagggtggggctcccgagggagccgtcgccggaaacgcctgacgacgacgacgacgatgaagatgacgacgaggaagacgacatggctgctcgccttggtctcagccctggcttggggttaggccgggagctgtcaagccagcccccgagcgggctgatgccgtcagtccccggagccggggtcccgacccgaagagcggcggcagtccgagagggtacctgacccctcggctggggcagctgaggcgacaccggggagccaggccaaggcgtctgctccccgagagccgccgcccacgccggcagcgcatgagagcgaccctcaggtccccatggcagtgcctgtgccgcccgccccccggccgttcagggtcgtccaaagcaagagtggtcgccgacgctgcccgcgaaagcggacctcggtcggaagctcccggggcgtcgagatccacagagaccctccccccccgccacgcgttgattcatcgccccgcgagccgcaacagtatccttgggaatgcccttcggtccggggctttttccattctttatgattcccggccgccgcattctctctcttttcccccttcagccagccgaacagcccgtggtcactggaccggaacctgggctcccccggaaaagggctccttaacaaaatgagctccggccttgccgcaggtactggcgccccgactccgggggcatatgccgcggaaactgtccaacctttctccgccagaggggcctccccacggacgagcccctcccaggcggggctcccagctaccctctggataccggacgtttcccgaaggaccgacctccctcttgactgtcgggcgctcactcaagcctaacgcgcagcctcgcttcaccctgtatacgactccccgcaccctcaccaaacacgccac

SEQ ID NO: 4825 - DNA, 2022 bp, Zea mays
  misc_feature (1)..(1): n is a, c, g, or t
  misc_feature (1633)..(2022): n is a, c, g, or t
  Peptide Sequence Number=SeqID_12528
  Probeset Number=SeqID_19228
ngattactattaccttttctgttccaaagacaaaggtggatttcacactttgaaatcctgtacctaaagtgacctttaggaaaaggagacctaatcttaggaacaaaaacaaaactatttttgtaagtatctatacgctttaatgtttgttcctatgataactgtttgatttggttctttgattgagtgtcatgagttgtggagtaatgtccacaattgcatctgtatatgcatataggcataaaaaatgtttatggccattcacaatatagacgaagccgaagctcaccagcagcataaatatataagagataaaactgcttcggtggatcaaccaaagtctatgcttttgtgtgaagacacagctgagcataaagtggtgttttgtaacaccccgtccaatcccggactgacggtacttactcctgttagctctctaggatcatatattggccccacagaccaacacgagtcttttgtgcgcactttgtcctcactcatgcgcacccgagaaaacttcccggtcggtcacccatcccaaattgctccaagacaagcacgcttgtcggcgtttcgagacagggggtccctaagccgacgagtgagtgtgctgcgtgccccagcccagatgggtctagcgcgtgggcgagcgcggaggggggataggcgaggcggccggagccgagcgtgagagaggtggaagtcccgcggccttcgtgttcgtcccgcgcccaggtcaggtgcgtcttgcagtgggggggttacaagcgtccacgcgggtgagggaagcgagcggccccaagagagcgcctgtcccgtcctccgccccgcgtcggtcaaccttgtctgaggaggtcctgctgcctccttacatgatcgttgggtgtcacctgtctttaagaatggagtggaagattagtaatagcatttaaggggaagggttagaggttccagatgttactttcgaagtgtttggcaaaggggctgagccagacaccttggcttaattgctaagcctaagatgggttggctctggcatcgtcagagaaggcccttgttgcgatgaagtatcttcataagcttctatacggaaatcatatggcagggagcccccaaggacatctttgagccaaagcaagtgcattgtgcctgacgcatttctgaccaagctcgtgtcatacatagaccaatgtaaactttgtcgatattagcatcagttgagtgggagttttccgttaaattggggacgtccgcagaaggtaggcctgtccggattccttgatgacccgtgggttagatagaatgtgtccggttcttcggcgacctggggtccctggaccgacagagtcaaactgtggccggcgtgccccagcgcagatggggcggcgcgagacggagcgcgaaggggcgaggcagcctgagagaaagaggtggaaatcccgcggccttcgtgtttgtcccgcgcccaggtcgggtgcgctggcagtggggggttacaagcgtccaggcgggatggagcgagcgtcctcgcgcgagcgcccgtcgcgtgcgttttccccgcgtggccaaccctctgtgagatggccctcgcccggacccgagagacaccctgacccgtcgtgagtgccgcagnnnnnnnnnnnnnnnnnnnnnnnnnnnnnnnnnnnnnnnnnnnnnnnnnnnnnnnnnnnnnnnnnnnnnnnnnnnnnnnnnnnnnnnnnnnnnnnnnnnnnnnnnnnnnnnnnnnnnnnnnnnnnnnnnnnnnnnnnnnnnnnnnnnnnnnnnnnnnnnnnnnnnnnnnnnnnnnnnnnnnnnnnnnnnnnnnnnnnnnnnnnnnnnnnnnnnnnnnnnnnnnnnnnnnnnnnnnnnnnnnnnnnnnnnnnnnnnnnnnnnnnnnnnnnnnnnnnnnnnnnnnnnnnnnnnnnnnnnnnnnnnnnnnnnnnnnnnnnnnnnnnnnnnnnnnnnnnnnnnnnnnnnnnnnnnnnnnnnnnnnnnnnnnnnnnnnnnnnnnnnnnnnnnnnn

SEQ ID NO: 4826 - DNA, 2058 bp, Zea mays
  misc_feature (1)..(439): n is a, c, g, or t
  misc_feature (1705)..(2058): n is a, c, g, or t
  Peptide Sequence Number=SeqID_12529
  Probeset Number=SeqID_19229
nnnnnnnnnnnnnnnnnnnnnnnnnnnnnnnnnnnnnnnnnnnnnnnnnnnnnnnnnnnnnnnnnnnnnnnnnnnnnnnnnnnnnnnnnnnnnnnnnnnnnnnnnnnnnnnnnnnnnnnnnnnnnnnnnnnnnnnnnnnnnnnnnnnnnnnnnnnnnnnnnnnnnnnnnnnnnnnnnnnnnnnnnnnnnnnnnnnnnnnnnnnnnnnnnnnnnnnnnnnnnnnnnnnnnnnnnnnnnnnnnnnnnnnnnnnnnnnnnnnnnnnnnnnnnnnnnnnnnnnnnnnnnnnnnnnnnnnnnnnnnnnnnnnnnnnnnnnnnnnnnnnnnnnnnnnnnnnnnnnnnnnnnnnnnnnnnnnnnnnnnnnnnnnnnnnnnnnnnnnnnnnnnnnnnnnnnnnnnnnnnnnnnnnnnnnnnnnnnnnnnnnnnnnnnnnnnnnnnnnggccaatcaatgggcgccatttacaacgctgacattcaatggggcgcgaatgaaaggggagaggaagataacgggcggccgttacagcgcggggatggggcacgtggggccgagcgcggacgccggggcgcgggtcgccgggggcgtcggggctagcggcgacgccagctccaagcgcgagcgcaggcccgtgcggcggctggagtgggggccgagtgggccccgcccgtaagggacagagagggggggaatttagggcaggggcgcggcgcgcggctgggccattcgcgggccgcctcggctggggccggattcggactgaccgagggtttggttttcttttcttttttttctttcaaatataaatgaatatatatttaaaatatttggaaaatccaaaataaatcataataatatttagaacttaaatataatatttaatactaattaatctgttttcacggtaaaagaatagattcatcagtcaaatactagtaaacaaaaatctatgctccatatattaatacaccaaacacttgattcaaattttaaatttaccttctactaaacttaacaactagtaacacattattttaattgatggatttgaggtgctacacataccgagggatgttgccgagcactcgctggatatccgagctagagcccgacccgtgaagcagcctctgcgcccgattcgacgaagaaaagcgccagagccataggcgaggagatccacaagctgatggctgcggggttcatcaaagaggtattccatcccgaatggttagccaaccctatgcttatgaaaaagaaaggtgggaaatggaggatgtgtgtagactacactggtctaaacaaagcatgtctaaagggttccctaccctctgcctcgcatcgatcaaatcgtggattccactgctgggtgcgaaaccctgtcattcctcgatgcctacacaggttatcaccaaatcaagatgaaagagtccaaccagctcgcgacttctttcatcacacctttttggcatgtactgctatattactatgcccatttgggtttgaaggaatgcagatgctacataccaaagggtgcatgaaccacgtgttcggagagcacattcggccgaacggtcgaggcttacgtcgatgacatcgtagtcaagacgaggaaagcctcccgacctcctctctgaccttgaaacgacattcaagtgtctgagggcgaagggcatgaaactcaatcctgagaagtgtgtcttcggagtnnnnnnnnnnnnnnnnnnnnnnnnnnnnnnnnnnnnnnnnnnnnnnnnnnnnnnnnnnnnnnnnnnnnnnnnnnnnnnnnnnnnnnnnnnnnnnnnnnnnnnnnnnnnnnnnnnnnnnnnnnnnnnnnnnnnnnnnnnnnnnnnnnnnnnnnnnnnnnnnnnnnnnnnnnnnnnnnnnnnnnnnnnnnnnnnnnnnnnnnnnnnnnnnnnnnnnnnnnnnnnnnnnnnnnnnnnnnnnnnnnnnnnnnnnnnnnnnnnnnnnnnnnnnnnnnnnnnnnnnnnnnnnnnnnnnnnnnnnnnnnnnnnnnnnnnnnnnnnnnnnnnnnnnnnnnnnnnnnnnnnnnnnnnnnnnnn

SEQ ID NO: 4827 - DNA, 1021 bp, Zea mays
  misc_feature (8)..(9): n is a, c, g, or t
  misc_feature (15)..(17): n is a, c, g, or t
  Peptide Sequence Number=SeqID_12530
  Probeset Number=SeqID_19230
caaaaaannaataannnacctcctccccctcctccccccctcctctttccccccctacttcccttcgaattgggtaccgggccccccctcgagactctagtgtcatcaagtgtgcataagttcaaccaagcctagacgaggtgccaaagttcaagactgtaggtacctgcggcgtaaagaagatcatgattgctattgggcaggagcaacagcagagcaagggcaggcatgtatcatgtcttcgactatcagaagattcctcacgagtagtcccaaaacaaatgatgatctcaattgaagaattgtccgttcgtgttatctatctaggcagccttcccattgcccccggtgtaagacgtcatgtcaagaagcacgcgatgcagtgacatgtcaggaaaacgcgtgaagagcatagtccacgtgctaagggacacgcgacctggctcggaatggaaacccttgaatcctggttagctccggagagaggataccagctttctgggagagatcatattagtccctaggagaattctcactaggcccaagtggtcgtcagtgtctcgcgtgtcccctgcgaaacctcgtattctatccaaaccatgattagcgggtcagcgactcagatcgaccattcagtcgcaactatctagtcatgttagcccccaccccctcgccccccccgcccccgacgcggctttcgcctcgactctccctcccccccctgccccctctcctcccgccccccgttcccgcctcccccccccgcgccccctcgcccctctcctcccccgcccccccgcccccccgcgtcgctaccctccccctccctctttcgcccccactcctcgcccctcccacctctttatcgcctatatctaccaattactatatcaccctccttcatctccactgcctactattctctccctataccccacccccccctcctcctttttctttttatctccctcatttcactctaccctctctctccttcctctttactccctccctaccctct

SEQ ID NO: 4828 - DNA, 543 bp, Zea mays
  Probeset Number=SeqID_19231
gggccccaacacctttttccgttcctttgtccagtacagataaccgttcggggatccgtgccctgcccccaattgaaactggctggttggggcgttactcggttcggtccccatcgtttccagtactatattatgctttactccccctagactggggctgtttctactagtttcctccccccaagtacgggggaacggaacagctattttttttcggcggccttgggaggggaggtgtttccggtccccgtgccgttccagttgtatcgtgatcatggtcctgggagttgttgcatccggggggccctttttaggtcaggcgtcgtgttcaatgtttttggggtcaggctggcatttcatcccgggggtgcccctgattgcgagccggcaaccaaaaagccaaaaaaactaaacccgtgtgggaaaatggaggaggcaggggtccaaattacgttttccccccccctgttgcttttataatttttcatcatcatcattttccttccggtcggggattaatcgaaaagttttttgttttgtttt

SEQ ID NO: 4829 - DNA, 969 bp, Zea mays
  misc_feature (178)..(178): n is a, c, g, or t
  Peptide Sequence Number=SeqID_12531
  Probeset Number=SeqID_19232
aaaggtaaggctagttcttggtggcccttggcagaggacttattccctccctcgacatgggaaagggtttggcattacggttaatgaggggtacaaatacgggtcatttcgggtcggcagtcgggggtcagtgaggccatgttatcgccaaaggcgggtagccccttattcttctggncgggatatccgatggggaccggttgaatgggtgtggggagcggaatccctccagcaatgttcgcgtgtttggggtgtaccttcggcaaggatagaaaactgcgatttggaatcggtctgctttctcggcaactaatgagggctgctttgattcattggtattgcattgaggttataagtgggaaatgaagttgactggcaataagagggtgggataggtgaaaatgttttgatgccatggtatgggtagctaggtacacatctagtctaaaggattttcttaaaactggaaaaagctaaaacttgtttttaggctcagctagtgcttttggcaaaccaaaggcctcatccaaacagctgcatgtctagaggtagagtagtagactcctcacaccgggtaagtctaactgagtattagtattctcagccttgcttgtggcataattttttgcaggtgctccttaggttgatttgttgatggtgtgacttggccttcgtccctgccaccgggatagacggtcgagtgggttatttctttctcaggagaggaccaggaggagtagcgtggctaggattcgccatgttactcggttttctccgttagttatttccgctgcaataaatttatgtttatcattttgaaactccgataatgtaatcactaatgatacttattaaattagtggtattatggttaaaaaaaaaaaaaaaaaactcgagggggggcccggtacccaattcggggtgagggggggggatgggaggcaggagaagagtttgggtggtgatgta

SEQ ID NO: 4830 - DNA, 1013 bp, Zea mays
  misc_feature (1)..(6): n is a, c, g, or t
  Probeset Number=SeqID_19233
nnnnnntcgggcaggaacagtagacccaggtggattcacgcctcgcccgagggcctcctcaagcaacgggcgcaccttcgactcgcccgaggcccagcttgggcaggcttcatggagaagcaaccttggccagatcgcctcgccaaccgaccgtatcgcaggagcattcaatgcaaggatcgcctgacaggaaaacagcatcgcctgccctgctccgactgttgtgccacctgccagggtgaggctgacaacagccgagtccagcctcaggcgccataggaagctccgcctcgcccgaccctgggggttggcccccgcctcggcctcggaagacggtctccgcctcgcccgaccccaggtctcggactcagcctcgacctcggaagacggtctctgcctcgcccgaccccagggctcggactcaacctcgacctcggaagacggtctctgcctcgcccgaccccaaggctcggactcaacctcgacctcggaggagtcaccacctcgcccggccttgggctcggaccgaccacgagggctcgagcgctcctccaacggccacgacatcacatgaacagggcaccaaaacctctccggctgccacgacggcatgtacttagggcactagctcctctctgctagacacgttagcacactgctacatctcctattgtacacctgggccctctccttacgcctataaaaggaaggcccagggcactcgtacgggagggttgggcgcgcggggaggacgggacggcgcgtgcgggcctctcgctccgtcccacgtggacgcttgtaaccccctactgcaagcgcacccgacctgggcgcaggacaaacacgaaggccgtgggtttcccctttacgcctgtctccttttttcccttcgtgctccgtctcgcgccgacccatctgggctggggcacgcggcgacaatttactcgtcggtccagggacccccccccggggtcgaaacgccgacagttggcgcgccaggtaggggcctgctg

SEQ ID NO: 4831 - DNA, 855 bp, Zea mays
  misc_feature (827)..(829): n is a, c, g, or t
  Peptide Sequence Number=SeqID_12532
  Probeset Number=SeqID_19234
cttggggggggcaagagaaaggtatttttctcgccttgggggcccgagggggttctcagatgccacggccctctttttgttaatgggggaagaatgtgtagaggtttttggggttaaaactttttgttgggcctttccctccacaaatattcaaagtctttccattccttcacccattcaaattccccccattccatcacacaggcaaattccccccacccctcttttgtaactgtggaaggccactttcccccctttccacgctttcccacctttccattctttggcacccaacgccatcccacccccttttggggggatattattattttccccccccaagaactcgggttgttggggctcccccctccccctttgttgttccgggccccccccccttggggggaagccccccaattcttttctttggcccgggccccccgggaacccctttcattcctgctcctttccccccaatcccgggaacatgggtttttgggggaacccccccccccttaatatggggctttcttggaggggggggaacttttgggggggcttttggtccagtcagttttcccagtacctttccggggtttgttccccccatgaccttttttcgggcaatttgaagggccctatagtttttagaaatatttaggggggatcctcccttttttttaaggtggttgtttcaaaaaattttttgtttttaaaaaagatttagtggttccttaaaaaaaaaaaaaacccaaaaaaaaaaaaaaaaaaaaaaaaaaaaaaaaaaaaaaaaaaaaaaaaaaaaaaaagaaaaaaaaaaaaaaaannnctcgagggggggcccgtacccaattg

SEQ ID NO: 4832 - DNA, 6847 bp, Zea mays
  misc_feature (1)..(1): n is a, c, g, or t
  misc_feature (6453)..(6847): n is a, c, g, or t
  Probeset Number=SeqID_19235
ncagtcgacagagccgaagtgaccgcagtcacttcgccgctccactgaccggcctgacaagaggacagcaccgcctgcgccgctccgactgctgtgccactcgacagagtgaggctgacagcagccaagtccggcctcgggcgccatagaaagctctgcctcgcccgaccccagggctcggactcggcctcggccccggaagacgacgaactccgcctcgcccgaccccagggctcggactcggcctcgaccccggaagacgacgaactccgcctcgcccgaccccagggctcggactcggcctcggccccggaagacgacgaactccgcctcgcccgaccccagggctcggactcggcctcggccccgaaagacgacgaactccgcctcgcacgacccaggggctcggactcgacctagacctcggaagacagactcaacctcgacctcggaggagctcgacagccccgacagctgtccttccgccaggctccagcgctcctccgacggccacgacatctcatgaacagggtgccaaaacctctccggctgccacgacggcatgtacttagggcgctagctcctctctgctagacacgttagcacactgctacacctcccattgtacacctgggccctctccttacgcctataaaaggaaggcccaggggactcgtacggaaggttggtcgcgcgggggaacggggcggcgcgcataagcctctctcgctctctcccacgcggaagcttgtaaccccctactgcaagcgcacccgacctgggcgcgggacaaacacgaaggccgcgggtttccccttttacgcctgtctccctctggtttccccccttcgcgctacgtctcgcgccgacccatctgggctggggcacgcagcgacaatttactcgtcggtccagggaccccccggggtcgaaacgccgacagttggcgcgccagggtaggggcctgctgcgtgttgacgaatagcttcctgtcaagctccagatgggtagtctccagcaacctctccagcccgggacgatgctccgtttcgggagtcttgagttcatgtccctcgacggcagctacgacatgatactccttcctccgccgcgcgacaacgacaatggcgaccgtcagcccgcccgccggtggcggaatcgacgacgtcttccccgcgttgcggaagagcaacatccgggtctgtcccgtcaccttccccgccgacggaggaggaggcggggcgggcatggccaagcaggaggcggcacctcgtcggctgtcgagcgagtcgacggtgccggcgccccaacgggggacacgtcgggcgttgacctcgcgtctgagacgaatacgagcgttgtttcaccgcaacacaccaaccccaagcagacagacgacgccagcatgctcgcgaaggacttgttgggcgttaacctcgtacctgagatgatggtgcagtccgtccctgacgcgactttgtcaccatccgtcggtcaagaggtaccgtccgtttcccatcctgtgccttttagattcagcttcgacccaccgagtgatcccgcttcggtggacgctttcataaaggcatatccaaaccttccggggctcggtgaccccagtgccatgcgggacttcatgaccgcatgtgactactgcctctccgattgctccgatgatggccacagccttgacgatgaggactgtggcccaagtcgcgaatgtttccacgtcgatctagggggtctcgacgaaggcaatcgccttggtatgccggaggacggcgatccccctaggcctgcgcctcgcgttgacatccttcgggagctagttgtggtcccagtccctgcggggggtcaggacacacagctcaagcaaatccgcgagatgcaggccaggctcgacgaggaagcaggaccacttgtgcagctccggcaaaatatcgggcaggagtgggcagtccgagcaccacccggagaagcgcgtcatctggcccaggacgtccaacaccgcatcgccgacgatgccagggcaaggctgcctccagcttccagtggggtcggccagaacctggctgcagcagcaatactactccgagcgatgccgaaaccatccaccactgaggggcggcgtatccagggagagctcaagaatctcctggaagatgccgcggtccgacgggccgaaagctctgcctcccgaaggcagggataccccctggagcatcgcgccgcgacttcccgattcatgcgggaagcattggtccacaccgggcgcacgcggaacacagcgcctgcggccctgggtcgcctcggcaacgagcaccaccgccgcgaccgtcgagcccacctcgacgagaaggtgcgccgaggctaccaccccaggcgtgggggacgctacgacagcggggaggatcggagcccctcgcctgaaccacccggtccgcaagctttcagccgggccatacgatgggcgtcgttcccgacccggttccgaaccccgactaccatcaccaagtactcgggggagacaaggccggaactgtggcttgcggactaccggctggcctgccagttgggtggaacggacgatgacaacctcatcatctgcaaccttcacctattcctctccgacgccgcccgagcctggctagagcatctgcctcctgcgcagatctccaattgggacgacctggtcaaagccttcgccggcaacttccatggcacatacgtgcgccctgggaactcctaggatctccgaagctgccgccagctgccgggagagtccctgcgggactacatccgacgattttcgaagcagcgcatcgagatgcccaacatcaccgactcggatgtcatcggcgcgttcctcgccggcaccacttgccgtgacctggtgagcaagctgggtcgcaagactcccaccagggcgagcgagctgatggacatcgccaccaagttcgcctctggtcaggaggcgcacaggaaccctcggaagcctcccagaggcgccaacctgttcgacaagatgctcaaggagtcgttcccctatcatcagggtcccgtcaagcacacccttgaggagtgcgttatgctttggcgctacttccacaaggtcgggcccccgatggaaggtggcagagcccacaacaacgacaagaaggaggatcacaaggcagaggaattccccgaggtccacgactgcttcatgatctacggtgggcaagtggcgaacgcctcggctcggcaccgcaagcaagagcgtcgggaggtctgctcggtgaaggtggcagcgccagtctacttagactggtccgacaagcccatcaccttcgaccaaggcgaccaccccgaccgcgtgccgagcccagggaagtacccactcgttgtcgaccccgtcatcggcaacgtcaggcttaccaaggtcctcatggacggaggcagcagcctcaacatcatctacgtcgagaccctcgggctcctgcagatcgatctgtcctcgatccgggccggcacagcgccctttcacgggatcatccccgggaaacgcgtccaaccccttgggcaactcgatctacccgtctgcttcgggactccctacaacttccgaaaggaaaccctcacgttcgaggtggtcgggttccgaggaacctaccacgcagtgctagggagaccatgctacgccaagttcatggtcgtccccaactacacctacctcaagctcaagatgtcgggccccaacgaggtcatcaccgtcggctccacgtaccgacacgcgtacaaatgcgacgtggagtgtgtggagtacgccgaggccctcgccgaatccgaggccctcatcgtcgacctggagagcctctccaaggaggtgccagacgcgaagcgccacgccggcaacttcgagccagctgaggcggaagcagtgctcgtcgactttctctgcgcgaacgccaaggtttttgcgtggagtccctcggacatgcctggcataccgagggatgtcaccgagcactctctggatatccgagctggagcccgacccgtgaagcagcctctgcgccgattcgatgaagaaaagcgccgagccataggcgaggagatccacaagctgatggctgcagggttcatcaaagaggtattccatcccgaatggctagccaaccctgtgcttgtgagaaagaaaggcgggaaatggcggatgtgtgtagactacactggtctaaacaaagtatgtctgaaagttccctaccctctgcctcgcatcgatcaaatagtggattctactgctgggtgcgaaaccctgtcgttcctcgatgcctactcagggtatcaccaaatcaggatgaaagagtccgaccagctcgcgacttctttcatcacaccttttggcatgtactgctacattactatgccattcggtttgaggaatgcaggtgcgacataccaaaggtgcatgaaccacgtgttcagagagcacattggtcgaacggtcgaggcttacgtcgatgacatcgtagtcaagacgaggaaagcctccgacctcctctccgaccttgaaacgacattcaagtgtctcaaggcgaatgacgtaaaactcaatctcgagaagtgtgtcttcggagtcccccgaggcatgctcccggggttcatcgtctccgagcggggcatcgaggccaacccggagaaaatcgcggccatcaccaacatggggcccatcaaggacttgaaaggagtacagagggtcatgggatgccttgcggctctgagccgtttcatctcgcgcctcggcgaaagaggcctacctctgtaccacctcttaaggaagaccgagcgcttcacttggacccccgaggccaaggaagccctcgggaacctaaaggaactcctcacaagcgcgcccaccttggtgccccccgctgccggagaagccctcttgatctacgtcgccgctaccactcaggtggttagcgccgatcgtggttgagagacgagaagaggggcacgcattgcccgtctagaggccggtctacttcatcagtgaagtactgtccgagaccaaaatccactacccgcaaattcagaagctactgtacgcggtaattctgacgcggcgaaagttgcgacactacttcgagtctcatccggtgactgtggtgtcatccttccccctaggagagatcatccagtgccgagaggcctcgggtaggattgcaaagtgggcggtggagatcatgggcgagacaatctcgttcgctcctcagaaggccatcaagtcccaagtcttggcggactttatggctgaatgggtcgacacccagcttccagcagctccgatccaaccggaactctggaccatgtttttctatgggtcgctgatgaaaacaggagcgggcgcaggcttgctcttcatctcaccgctcgggaagcacctccgctacgtgctgcgcctccatttcccggcgtccaagaacgtggccgagtacgaggctctggttaacgggatgcgcattgccatcaagctagggatggaagcctactgcgatgaggttcggcgcctggaggacaagttctacgggctcgagctcaaccacatcgcccgacgatacaacgagactgcggacgagctggctaagatagcctcagggcggacaacggttcctccggacgtcttctcccgagacctacatcaaccctccgtcaagaccgacgacacgcccgagcctgagaaggcctcggcccagcccgaggcaccctcggcccccgagggtgaggcactgcgcgtcgaggaagagtggaatggggtcacgcctaatcgaaactggcagaccccgtacctgcaatatctccaccgaggagagctacccctcgatagagccgaagctcggcgactggcgcggcgcgccaagtcgttcgtcttggtgggtgacggaaaggagctctaccactgcagcccctcaggcatcctccagcgatgcatatccatcaccgaaggtcaggaactattgcaagaaatacactcgggggcttgcggtcatcacgcaacgcctcgagcccttgttggaaatgccttccgacaggaaggcacccgggggctacacgcacctgctggtcgccatcgacaaattctccaagtggatcaaggtcagacccctaaacaacatcaggtccgaacaggcggtggcgttcttcaccaacttcatccatcgctttggggtccggaactccatcatcaccgacaacggcacctagttcactggcagaaagttcctggacttctacgaggaccaccacatccgggtggactgggccgccgtagctcaccccatgacgaatgcgcaggaactcccctcggtggtctggagtctgagaacgacgccaagccgagccacgggcttcacgccgttctttctagtctatggggccgaggctatcttgcccacagacttagaatacggnnnnnnnnnnnnnnnnnnnnnnnnnnnnnnnnnnnnnnnnnnnnnnnnnnnnnnnnnnnnnnnnnnnnnnnnnnnnnnnnnnnnnnnnnnnnnnnnnnnnnnnnnnnnnnnnnnnnnnnnnnnnnnnnnnnnnnnnnnnnnnnnnnnnnnnnnnnnnnnnnnnnnnnnnnnnnnnnnnnnnnnnnnnnnnnnnnnnnnnnnnnnnnnnnnnnnnnnnnnnnnnnnnnnnnnnnnnnnnnnnnnnnnnnnnnnnnnnnnnnnnnnnnnnnnnnnnnnnnnnnnnnnnnnnnnnnnnnnnnnnnnnnnnnnnnnnnnnnnnnnnnnnnnnnnnnnnnnnnnnnnnnnnnnnnnnnnnnnnnnnnnnnnnnnnnnnnnnnnnnnnnnnnnnnnnnnnn

SEQ ID NO: 4833 - DNA, 531 bp, Zea mays
  Peptide Sequence Number=SeqID_12533
  Probeset Number=SeqID_19236
tcgacctgcagtaacctccctctgttttcaaaataattgaaattctaggattgtcaggtcaaactttaaaaagtttgaccaagtctgtgaaaaaaggggctaatatctaaaatacattccgtacgcaatttaatggcgcaaattgggtgttgctgatgttgatatgttattgtgtaagcttggtcaaaattaataaagtttgacctagaacaaaactagaacttccattattctgaaacggagggaacaattttattctgataccgttctattcagtcatttctagccttggagtgcatcatgacatgatcatacaaaaggcagcaattccaactcaaaagaagaagaagaagcaaagtctaatcttgtttgttcaaattttgaggaatattcgaactctgttcccaggaaaggaaatactgcactttattctcgactttatttgaggtaaaaaaaattatcttctcgaatttgataccgccaaagcaatctgataccgccaatccaaacacgcgacccataaagcgtggg

SEQ ID NO: 4834 - DNA, 769 bp, Zea mays
  misc_feature (719)..(719): n is a, c, g, or t
  misc_feature (769)..(769): n is a, c, g, or t
  Probeset Number=SeqID_19237
gtcttcttccccagccggcgttcttccttcctggcgttttcctcctcctctctgattcgcgcaggagcaagggagctcccatggctacctccctggcgccctctccacccagcgcgaatcagagaggaggaggaaaaccctctacagctccagggagccgccgctcgcctctacagctccctccggcgtcggctctccaacaggcttccctgccttcctctctttcgagcccccctggttttcgtctgtaagcttgccggcagccatcttccccaagtgctggcgcatgggagctatgtcccctctgtccagaaaatgcagagctcgagcacacctctctactcccatccatggtgccccaaatctccagccggagctccgaaggccgcctccctggcgtacctcgccagcagcagggatcctttccctctcccatggcgcgcaggccgcgagctcccccacgcgcgttcccttccccaggcgctggtgagctcgtcgtcgcccatggcgcccccttctccacggcgtcggtagcagggagcactagctcatacttcatcgcgccctctgcttcatcccctctccagcacctcctccccacagatcgcagctcctctgctcctccctctcccctctgctcgggcgccgagctccctacgccgggtcccctctccagcgaccgccatgggcgagctcagtagcgcgacgcccctgctatnctccccccacacgatgccctttctactcatcaatggagatctcgccgacn

SEQ ID NO: 4835 - DNA, 316 bp, Zea mays
  Peptide Sequence Number=SeqID_12534
  Probeset Number=SeqID_19238
cgcagtacattaaaaccaagaccagcttgtctgactgtctcatcgatcgtcaatgcaagtctgtccatgcgcacgggtctgaacaccgtagccacgagcgcgagccccacggtagccgcagccgccggctcgccagcagggcaagccgtgttcaatcaaagctcaaccaggcacccgcgacatctgatccagctaagcagcgagccagcacgacagaagggcgtggcaagaatcaggagagagacagcaggggggctagccagccgagctcgtgcgacgaagaacggccggaatcggcaggaacatggcggcgccg

SEQ ID NO: 4836 - DNA, 1186 bp, Zea mays
  misc_feature (1)..(1): n is a, c, g, or t
  misc_feature (7)..(7): n is a, c, g, or t
  misc_feature (97)..(97): n is a, c, g, or t
  misc_feature (163)..(163): n is a, c, g, or t
  misc_feature (1001)..(1001): n is a, c, g, or t
  misc_feature (1023)..(1023): n is a, c, g, or t
  Probeset Number=SeqID_19239
naaacanttatttagggcgccgcccagtggcgggagaagactttcttgtgttttaaatatcaggggagacttgttattcccaggcgtctttcaagtngctgtcttttgactctcaaactttaagggtcgggatctttgcattttggctcatgacaccctaggnccccctttgtaaaagtaaaaatacactttttttttccacccatttgtattgtccaggggtttaatgaggtcaattctcgtaaacccagaagaactgaacatctttttccgggagttcaagaaatcatcttttcttggcagtagtgagcataactgttgtgatgcaggtgataattattgagttcctcgggaaatttacatcaaccagttgagactcaactggaagctttggcttgtttctgtagttattgcttttctaagttggcccttggcttttgttggaaaattcattccagttccgaggactgaattgaaggatctcattgtgtaaaggtgttggcctaaacgtggcgagagtgcagcacaacagactcaggatgacagaatggaagtatcagtgtgaagctgttcttgagcaacttctcgaaattatcagatgttagtgttgctgcacatagatggtgctggctaattttgggtgctgatttttctaaccatcctaccttgttgcctggctatgaattctatggctgtagtcagcaatcggggaggtaaacctctgctgactcgtgatctagaatctgaacactgtaaacaaaatatgtttattgtagcctaacgaaggtccaggacctccagtggtttattgcacaagttgtgcagtcggtcccagaaccattgtggggaaggcgctataaacagttttctctctggcaggattgaagtggagctcttttttccctaaatcattttttattttagatgcaaccaaaaacattgtgtccacccctctaaaagtaattggctgattttcgtaaaaaaaaaaaaaaaaagaaggnggtaccctcccgtatttttccnccgctcgtccaattttttttcaacctgcacccccgaggggggccccgaccccacttcccccaaaaggggtcttataacgccgccctggcgccattatttacacaagtggcagggaacaccccggggttcccaaattaaaggcttgtgagaacactcccctttc

SEQ ID NO: 4837 - DNA, 882 bp, Zea mays
  misc_feature (1)..(1): n is a, c, g, or t
  Peptide Sequence Number=SeqID_12535
  Probeset Number=SeqID_19240
ntatgccagcctcgattaggtttgttcaggccctatttcgagtgtttgtgaagtcgactgatcaaggttagagagaactttactgcggggtccggtcattggctgttatctggaccgggcaagggttacgtggggggcctttccgaggaaagaagggaaagttcgccgagacccttatttatttctctggtgggggaaccgccaaggttcattggttggagggacgtatgaaccttcttccagggaagcagtttccagggagaaagttgcgggctctacgagggaggcgcaaccaaggaacaaggacttctggctgggtgattgagccccaaatttttctaggcaggttccccaatcgtcgccaaagcggatcaaggtcccgccctgtcgcgttatttcttcacggaccgcaagtgggtccagattcatgaaactaaggctggtccgggtcttagcggtgcaattcgatgcagagacacttgaagaagcattggcttctaaccccgcagagttgaaattcgataagcctgagaaatggacagctccatgccccaaatacgagcctggatggtgggaggccttcttacctccaatgtccagcaacggcacggcttagagatgaactccaggccgcgtggtgtaagatttcttccatgtaagtgatgattgtaagttttggtttatgctattgtgtatgtagtccgtgagtttatgagagtagagttagctacattagttgcagagattgctctacttttcgataataccaaataagtgatgatgttttaaagtcatggttatgttatggttgttagtattatatttcttcaaggatattcattcctgattcatgtatgttttcattcaaaacaaaaaaaaaaa

SEQ ID NO: 4838 - DNA, 518 bp, Zea mays
  misc_feature (11)..(11): n is a, c, g, or t
  misc_feature (39)..(39): n is a, c, g, or t
  misc_feature (60)..(60): n is a, c, g, or t
  misc_feature (69)..(69): n is a, c, g, or t
  misc_feature (84)..(84): n is a, c, g, or t
  misc_feature (86)..(86): n is a, c, g, or t
  misc_feature (113)..(114): n is a, c, g, or t
  misc_feature (119)..(119): n is a, c, g, or t
  misc_feature (130)..(130): n is a, c, g, or t
  misc_feature (138)..(138): n is a, c, g, or t
  misc_feature (142)..(142): n is a, c, g, or t
  misc_feature (186)..(186): n is a, c, g, or t
  misc_feature (193)..(193): n is a, c, g, or t
  misc_feature (203)..(203): n is a, c, g, or t
  misc_feature (233)..(233): n is a, c, g, or t
  misc_feature (249)..(249): n is a, c, g, or t
  misc_feature (288)..(288): n is a, c, g, or t
  misc_feature (290)..(290): n is a, c, g, or t
  misc_feature (292)..(292): n is a, c, g, or t
  misc_feature (295)..(295): n is a, c, g, or t
  misc_feature (300)..(300): n is a, c, g, or t
  misc_feature (313)..(313): n is a, c, g, or t
  misc_feature (323)..(323): n is a, c, g, or t
  misc_feature (329)..(329): n is a, c, g, or t
  misc_feature (332)..(333): n is a, c, g, or t
  misc_feature (341)..(342): n is a, c, g, or t
  misc_feature (345)..(348): n is a, c, g, or t
  misc_feature (350)..(351): n is a, c, g, or t
  misc_feature (355)..(355): n is a, c, g, or t
  misc_feature (358)..(358): n is a, c, g, or t
  misc_feature (361)..(362): n is a, c, g, or t
  misc_feature (364)..(364): n is a, c, g, or t
  misc_feature (377)..(377): n is a, c, g, or t
  misc_feature (379)..(379): n is a, c, g, or t
  misc_feature (387)..(387): n is a, c, g, or t
  misc_feature (389)..(390): n is a, c, g, or t
  misc_feature (397)..(397): n is a, c, g, or t
  misc_feature (400)..(400): n is a, c, g, or t
  misc_feature (402)..(403): n is a, c, g, or t
  misc_feature (406)..(406): n is a, c, g, or t
  misc_feature (408)..(408): n is a, c, g, or t
  misc_feature (410)..(410): n is a, c, g, or t
  misc_feature (412)..(413): n is a, c, g, or t
  misc_feature (415)..(415): n is a, c, g, or t
  misc_feature (419)..(420): n is a, c, g, or t
  misc_feature (423)..(423): n is a, c, g, or t
  misc_feature (429)..(429): n is a, c, g, or t
  misc_feature (431)..(431): n is a, c, g, or t
  misc_feature (435)..(438): n is a, c, g, or t
  misc_feature (443)..(443): n is a, c, g, or t
  misc_feature (445)..(445): n is a, c, g, or t
  misc_feature (449)..(449): n is a, c, g, or t
  misc_feature (453)..(453): n is a, c, g, or t
  misc_feature (455)..(458): n is a, c, g, or t
  misc_feature (460)..(460): n is a, c, g, or t
  misc_feature (464)..(466): n is a, c, g, or t
  misc_feature (469)..(470): n is a, c, g, or t
  misc_feature (472)..(472): n is a, c, g, or t
  misc_feature (480)..(480): n is a, c, g, or t
  misc_feature (482)..(482): n is a, c, g, or t
  misc_feature (484)..(486): n is a, c, g, or t
  misc_feature (488)..(489): n is a, c, g, or t
  misc_feature (492)..(492): n is a, c, g, or t
  misc_feature (494)..(494): n is a, c, g, or t
  misc_feature (502)..(502): n is a, c, g, or t
  misc_feature (511)..(512): n is a, c, g, or t
  misc_feature (518)..(518): n is a, c, g, or t
  Peptide Sequence Number=SeqID_12536
  Probeset Number=SeqID_19241
aagccactagntctccgcagtccgctctcgcctctcggncttctccttgtgccgccgaanaccctcacnggagtcggaactctngntttctcagtatagctctcatgcagctnnctgcngtcgcctgccntcaggggntgtnttccgtcgatgctcatcggatatttatagccttccgcttcttcncccatanttttgtatcnatgatagcgttcagtatgtgagaacccagngtcttcagtacctatnagggtccaagaagcaatcgcagcaagcaacatacttttntnanccncgccncccccccaatcgncagccctatntttggngtnntctttgcnnttnnnncnnaaanaanacnncnggcgggggggggngnttgctttncnnttaattnagntnnttncncntnngnttannctncctttncncccnnnnccctncncgtncccntnnnntngtannnttnnanagtatatncntnnntnntcncncccatttntcccctttnntttttn

SEQ ID NO: 4839 - DNA, 481 bp, Zea mays
  misc_feature (11)..(11): n is a, c, g, or t
  misc_feature (15)..(15): n is a, c, g, or t
  misc_feature (19)..(19): n is a, c, g, or t
  misc_feature (25)..(25): n is a, c, g, or t
  misc_feature (28)..(28): n is a, c, g, or t
  misc_feature (45)..(45): n is a, c, g, or t
  misc_feature (51)..(51): n is a, c, g, or t
  misc_feature (58)..(58): n is a, c, g, or t
  misc_feature (67)..(67): n is a, c, g, or t
  misc_feature (70)..(70): n is a, c, g, or t
  misc_feature (78)..(78): n is a, c, g, or t
  misc_feature (81)..(81): n is a, c, g, or t
  misc_feature (103)..(103): n is a, c, g, or t
  misc_feature (115)..(115): n is a, c, g, or t
  misc_feature (126)..(126): n is a, c, g, or t
  misc_feature (131)..(131): n is a, c, g, or t
  misc_feature (143)..(143): n is a, c, g, or t
  misc_feature (190)..(190): n is a, c, g, or t
  misc_feature (211)..(211): n is a, c, g, or t
  misc_feature (260)..(260): n is a, c, g, or t
  misc_feature (310)..(310): n is a, c, g, or t
  misc_feature (345)..(345): n is a, c, g, or t
  misc_feature (359)..(359): n is a, c, g, or t
  misc_feature (372)..(376): n is a, c, g, or t
  misc_feature (378)..(379): n is a, c, g, or t
  misc_feature (385)..(390): n is a, c, g, or t
  misc_feature (392)..(395): n is a, c, g, or t
  misc_feature (397)..(401): n is a, c, g, or t
  misc_feature (403)..(408): n is a, c, g, or t
  misc_feature (411)..(440): n is a, c, g, or t
  misc_feature (442)..(461): n is a, c, g, or t
  misc_feature (463)..(481): n is a, c, g, or t
  Probeset Number=SeqID_19242
aagaatattancaantccnccgtcnacngctctacaccggcgatnggcganaaacgangaggcgagnganacgagtcntgngaacgcaggccattctttgatncccccgatctcnactccggggangttcnccaaccccatgnccgccgccggagagggccccagcacgctcctccgcttcctctacttngtgggagccggagtaatctgnaccaagggcatcaacacctatcgcggactacgagcagcaagaaggagtncaccgccgccctcgccgccgccgaaataaggggttggttgctggccgcgncggccgagcccgctcctgcaaccgccgccggaagncctgattgttggangagggctggcttnnnnngnntaaggnnnnnngnnnngnnnnncnnnnnnggnnnnnnnnnnnnnnnnnnnnnnnnnnnnnngnnnnnnnnnnnnnnnnnnnngnnnnnnnnnnnnnnnnnnn

SEQ ID NO: 4840 - DNA, 502 bp, Zea mays
  Peptide Sequence Number=SeqID_12537
  Probeset Number=SeqID_19243
attgttcctacaggggtctaaatgtgaaatttcttcataaaaagggctaagatgaaaaattcgggattgacgacagccactccaagccatcttgcacattaatcagtactctgaaccctacgtaattacatacccccattccaaattataagacgtttggcttatttagatacatagcctttatgcacttaggtatatatcactgttcatgtacatggccgtttagcccgtgtacaaaccgtgtaaacgctacacaatggcttaccgtgttcgtttaatcagccatttgcctcgtttaatccgtttaatcaccatttagtctgtatggctgtttgccctgaataaatagacaaacggtacatgatcatttaaacgtttaggctaacattggtctatattatcatagtaaaaacaacatatatagaaaagccaaagcgtcttataatatggaacggagggagtattttatttaagttgttgcggtatatttttccaaaagaat

SEQ ID NO: 4841 - DNA, 1132 bp, Zea mays
  misc_feature (933)..(933): n is a, c, g, or t
  misc_feature (1115)..(1115): n is a, c, g, or t
  misc_feature (1132)..(1132): n is a, c, g, or t
  Probeset Number=SeqID_19244
gaccctcgggctcgccgggggatggcacgcactagtaaagcagacccagagcatcactcgctacaccaagaaactgaggaaatgagacaaaacacattttacccaagaccagttgcaccaacagctgcacagattcattgtttgcaatttcttatatgtgaacttgtatctggtggtaatctgagaaaagttggaggactatttgggaatagtggctctggcatacctgtggaagatcttaaacaactagagacatttttctacaagcttagttttttcttgcatattttggattatacagcgactattggtactctaactgatcttggatttctttggttcagagaattttaccttgaatcttctcgtgtcattcagtttccaattgaatgctcgctcccgtggatgctggtgggccatgtcattgaatcagaagatgctggtcttctcgaaagcattttgattccatttgacctgtacaatgactctgctcaacatgcactaacttctctcaagcagagatttctttatgatgaaattgaagctgaggccgatctttgcttcgatcttcttgctcagaagcttaatgagatcatctttacatattataagagctgtgcagcaagtactcttcttgatagttcatttacatatgcatgcgatgatggtgacaagtattttgtcaaacctttgcgattcgacgcgattttcaagttaaggagagtaatggttttagggaggacaattgatctaagaagcagtgtaacaacgcagagtatgaacaaaatattcagggaaaatattgactttctacttgagcgctttgaaaatggagatctttgtgcggtgaacaccgtttctgcattcgagacattgccacaaagagtcacctaaccaacttccaggcaatgtgcagaatgtactcttgtatgnggggttatatgttatgttgccccccccccgtatattatgtaacacccatcaaccgtggatcctggacctgaacaggagaatgtgtttgcttgctatatgtgaaaattaggtgggtatgttgaagttgaccctgagttcgcaaaaaaataaaaaaaaaaaaaaaaaaaaaaaaccccgtactntcgttgttaccactgcn

SEQ ID NO: 4842 - DNA, 1006 bp, Zea mays
  misc_feature (1)..(23): n is a, c, g, or t
  Peptide Sequence Number=SeqID_12538
  Probeset Number=SeqID_19245
nnnnnnnnnnnnnnnnnnnnnnnggtgccaattgcgtggtttttgccgaggaagttgtttactggttaatcttcagctaggatggtgggcgcgcctccgcaaggaccacaatgcctgttctggctacgcgctgatgaacaatgaaaatgaaccactgttacctgcaacagcatcagcagcagcatgtgcaacccaaaaggagccgtattccccagtagaaattttgtactggacagaggcacggttccaaaaggttcggccctaaaaattgctctgcaatgtcagtggtccagcgtagatgatgatgatcgcttctaacatagtctataaaaaatgcatactggagatttggtactagataacaagaggaccttgagtaccgagttttttccggtgaaagattgatgggcgatgccacagcctgaagacgaagaggatgtaaagaaaaaaactcgccaactaagggcttgttcggttattcctaaaaaaaaaaaaaaaaaaaaaaaaaaaaaaaaaaaaaaaaaaacaaataataaaaaaaaaaacacaattatcaaaacctctatacaatccatacaaatatacaaaacacataataaaggggtgcgccccctcccgaggcccaaacttttatcttctctgtgcatccccacttctcttcgcctcttatcccgcgcacctcgcccatgtttttgctctctcttttcacatcgttcgcatttcgttcacactcatgctctcttcccgtttactttcccttccttttccccccccgttctcctctccattcccacccccctcaccgttcccgcccctttccctcctccaaaacacttcgtccaattcgttccccaccttttcgcgcacttctctggggcgttttcgtccccgtcttagttctctcccttccccccattactttaccttctcttttcctcgtgtttctttgcgacacctattcttccttttttcggttttttttaactgccccccgtctcttttgttg

SEQ ID NO: 4843 - DNA, 800 bp, Zea mays
  misc_feature (1)..(199): n is a, c, g, or t
  misc_feature (774)..(774): n is a, c, g, or t
  misc_feature (800)..(800): n is a, c, g, or t
  Probeset Number=SeqID_19246
nnnnnnnnnnnnnnnnnnnnnnnnnnnnnnnnnnnnnnnnnnnnnnnnnnnnnnnnnnnnnnnnnnnnnnnnnnnnnnnnnnnnnnnnnnnnnnnnnnnnnnnnnnnnnnnnnnnnnnnnnnnnnnnnnnnnnnnnnnnnnnnnnnnnnnnnnnnnnnnnnnnnnnnnnnnnnnnnnnnnnnnnnnnnnnnnnnnnnnncaacaaatgaaattttaatatatctgtgtgcagatatctttatgttttagtgtttctgtttctgttcctgtttctaagctcaccgctgtttctttgtctttgtagatcccagtaacttatgctgggggtgtgtcaacaatggatgacctagagaggataaagaaggcaggcaaaagtcgagtagatgtaactgttgggagtgctctagatatatttggaggagatttaccctacaaagatgttgtcctttggcacaagaagcaaagtatggttggccaagtgtcaaggaacatgtggtagcgatcagtattgccagaatttattgtgtatcgctcgctaaaagcatatttattttcattacaaaacttcattttttgtgttggcctaataaaggatgactttcaaggtgttatcagcgatcgtggcgctgtagtgtaaatggtcttccattcttatcgtagtcctctattttaaattttactcaacaaatattgtcaaaaaaaatttgtgtcattgccgtgtttcttattttacgcgatccatttaagacagtataagaaatgagattgtatttnaattttcaaaaaacagtccaatcgcn

SEQ ID NO: 4844 - DNA, 900 bp, Zea mays
  misc_feature (896)..(900): n is a, c, g, or t
  Peptide Sequence Number=SeqID_12539
  Probeset Number=SeqID_19247
cctcgaggccggccgggaactgccccctctccctggctcctgtgctccccatttccagttttccacccgacgagaggcaaaagcctcgcgccccacgccggtccggcggcgacccccgccgtttcccgcagcgaccaagacgcgggctgtggtcgcctccgccccgtgcctacccggccgcgggcgtagcagcctcctggaccgcagcgccctcccccctcctttctcccgagcgacttctgatccagccgcgtcgcaacaactggtcgttcgagtctgatctccgccaccgcggcggaacgaggcgtctccggtccccgaggcgattcggtgaattcgaagctcgtacgacgggatcctgttgagttttgacaatgcggggctacgggtacgagaccaatggtaaccaccaggaagtggaagatgagtacggagatgagtactatgatcaagatgagtatgatgaggaaggttcgggtgctggggatgagtattttgaggaggaagagcctactgagggacaaaaggagatcctagaattgagagaacgattaaaagggcagattattcgaaagccaaagactgctgcttcctgcacagctggcggatcgtctgtctttactaataccttcaagcgagtgggctaatttggcttctttcttttgggcatggaggttagagtgcagagtgagtacgggagatataaggtaatagggtattgtgtatggcggagagctagggatactgggttcgggaagatgtggatgaaaagaacttttggttaagttgggagatgaaggcagggagggttagtggtagaggagggtgggggagtgaagttgtggggggtggaagggttcaagaggatagcggtgtcgggagaaataagaatggtnnnnn

SEQ ID NO: 4845 - DNA, 682 bp, Zea mays
  Peptide Sequence Number=SeqID_12540
  Probeset Number=SeqID_19248
attttgttcactaacatttccgccggcaactgaactctgttctccttagatatgcttgtttggtggctgaagaagctgaggcagccgaccagctgtcaaaggcactaacatttcccagattgtccaagttctataattcattaggaagaaagaaaacctgcatcttccagctgtatttgctgctcgtattgcagcacaatcaaaccgtaatctgagacgtgtgatactgttttttcagacttgcaaagtgcaacagtaatctgagacgatgaggactggaacttgggtggtttgggtatattcactcccttaaccacccgcactacgagcacaagatacgccttggatcaaaagctatttttcatctggaagctttcgtggccaagttcatgagcatttgcaaggagttcctggtggctacatttggctgagcaaaacgtcgagctacacaattagggttgtcccccccgaagccaagagaggatgccaggggctatcgcattgtatcggtataggtttgtactaatctcggcaacgactagcatctgcttgcacgtagacgttcgtgacgacatgatcagacgtcattacgattggttaagaaacagcctgagtgggacaggctcggaagttagaaataacagctgtgaagacgtagtcgttgatggcggcacgatcagaa

SEQ ID NO: 4846 - DNA, 724 bp, Zea mays
  misc_feature (601)..(724): n is a, c, g, or t
  Peptide Sequence Number=SeqID_12541
  Probeset Number=SeqID_19249
cttctatttaaagattcaaacaccaggctgttcctttaatacatcatgatgcatccctgaagttggtgtcattcacacactgcaccccattactcttatcaaactcatttctcattacccaaattgtaacaaccggcttctattctatataatttatgcccaacagaactttgtataaccatctttttaaaaaacgtgctgatccttgttcatgggcaataaggctcaaagttgccattggagctgctaggggcttgtcatttttacatgatgccgaaaaccaagtcatatatcgtgatttcaaggcatcaaacattcttctcgatcaggaattcaacgcaaaactttcagattttggcttggcaaaagctggtccaactggggataaaacccatgtatccacacaagtcatgggtactcatggatatgcagctccagagtacattgcaacaggttagatatttttccctcgcgtgcgtactgatgaaatattggggtagtgttgtgcattactctggtttgtgtcttcagcttttaaagggagatgtcaataatacttcctagtcctagtactgcaacaactaaggatacctgatcattnnnnnnnnnnnnnnnnnnnnnnnnnnnnnnnnnnnnnnnnnnnnnnnnnnnnnnnnnnnnnnnnnnnnnnnnnnnnnnnnnnnnnnnnnnnnnnnnnnnnnnnnnnnnnnnnnnnnnnnnnnnn

SEQ ID NO: 4847 - DNA, 602 bp, Zea mays
  misc_feature (601)..(602): n is a, c, g, or t
  Peptide Sequence Number=SeqID_12542
  Probeset Number=SeqID_19250
atcagatgcttaccttgcacaaagaatgttgaggaggcacacttgtttcaagcattcttttagatctttcagttcagaatttattttatacgtgaataacataccactcatgttcctgatgacaatacaaaccttttttttctgttttttccagagggtccggagcatggcctgagccacttttggcttactgattcatgcccccttactgtcaaggcggtgaagggcagacggccatttgaaattctaagtctggccggacctattgcttctgctctccagatttaggcaaatctggtctgctcgatccttcgggatattgtgactattcagttagttcttctttcctttgttgctgttgaggaatttggtgttttcctttgtacagctattgagtgtctcgcaatgtatttactagaaaaccataaaatggcagatcttcactgcagggtctgcttggcagaaagcattcgtagtcgtagtattagctgttaataatttgactgagcaagtcaagcgttgatctgtgttctagtaaaatttaaaaaaaagaaaaaaaaaactaaaagaaaaaaaaaagacagaaatataaaaaataaann

SEQ ID NO: 4848 - DNA, 1154 bp, Zea mays
  misc_feature (1)..(553): n is a, c, g, or t
  misc_feature (1154)..(1154): n is a, c, g, or t
  Peptide Sequence Number=SeqID_12543
  Probeset Number=SeqID_19251
nnnnnnnnnnnnnnnnnnnnnnnnnnnnnnnnnnnnnnnnnnnnnnnnnnnnnnnnnnnnnnnnnnnnnnnnnnnnnnnnnnnnnnnnnnnnnnnnnnnnnnnnnnnnnnnnnnnnnnnnnnnnnnnnnnnnnnnnnnnnnnnnnnnnnnnnnnnnnnnnnnnnnnnnnnnnnnnnnnnnnnnnnnnnnnnnnnnnnnnnnnnnnnnnnnnnnnnnnnnnnnnnnnnnnnnnnnnnnnnnnnnnnnnnnnnnnnnnnnnnnnnnnnnnnnnnnnnnnnnnnnnnnnnnnnnnnnnnnnnnnnnnnnnnnnnnnnnnnnnnnnnnnnnnnnnnnnnnnnnnnnnnnnnnnnnnnnnnnnnnnnnnnnnnnnnnnnnnnnnnnnnnnnnnnnnnnnnnnnnnnnnnnnnnnnnnnnnnnnnnnnnnnnnnnnnnnnnnnnnnnnnnnnnnnnnnnnnnnnnnnnnnnnnnnnnnnnnnnnnnnnnnnnnnnnnnnnnnnnnnnnnnnnnnnnnnnnnnnnnnnnnnnnnnnnnnnnnnnnnnnnnnnnnnnnnnntgattttttttcttacaataagttttggcatttaggtcctggaatctgaatgcacaaatgtaaaaaccttatagaaaagggcacaagcacacatgcatcttgctgatcttgatttggcggaggcagacatcaagaaagctctagataaactacagatccagacatgttaatcatatgtactactgaagttggcttaatgaaatcttttgagaataacttgcctatttaacttgtgtcctttttgatggtggcgttgtttgttagctacaaaatcatcaatcaaagattgtaattatatcaaaaaaaaaaaaaaaaaaaaaaaaaaaaaaaaaaaaaaaaaaaaaaaaaaaaaaaaaaaaaaaaaaaaaaaaaaaaaaaaaaaaaaaaaaaaaaaaaaaaacccttaaggaaaaataaagaaaaaaaaaaataaaacctggggccccgttggagcataaccccacatagggccaaatttttccaatattccaactccctttaaagttgccgtggcctacttttaaaggggcccaatctgccaaaaccgtggcgtaacaaaatttatgggccgaggattaaaaccccttttcttgggaaaacn

SEQ ID NO: 4849 - DNA, 910 bp, Zea mays
  misc_feature (1)..(24): n is a, c, g, or t
  misc_feature (862)..(910): n is a, c, g, or t
  Probeset Number=SeqID_19252
nnnnnnnnnnnnnnnnnnnnnnnncgacctggtgtacggcggcggcagcatcgggctcatgggccccgtctcccaggccgtctacgacggcggccggcacgtcatcggggtcattcccaagacgctcatgacaccagagataagcggcgagacggtcggggagggtcgggcggtggccgacatgcaccagaggaaggcggagatggcgcggcagtccgacgcattcatcgccctgcctggagggtatggcacgctggaggagctgctggaggtcatcacgtgggcgcagctgggcatccaccacaagccggtcgggctgctgaacgtggacggctactacaactcgctgctgaccttcatcgacaaggccgtggaggagggcttcatcaaccccagcgcccgccgcatcatcgtcctcgcgcccaccgcgcaggagctcatggacaagctcgaggagtacgagccttaccacgacagggtggcgtccacgctcaactgggagatgggcaacctgcagcaggggtactgacgagtgacgacaccactgcgcatgcaagagctagcccgccagagagctaaggcagcgcagcgcgcggcgcctgaatctgatgaagcacagccggggactgggggcattcgattggtggattattaagcaacgagcgagcttaactagatagccgtcgtcagctagctacattggtattttccttttctttttattaactcgcgacgcaggtctcggtttggagtgccggacgaaggggaaaaaaaagggtttggttggcgcgcgtagaaggagtatgtcgtagctgctagctagcttgttctgtatatgatgcctgtgttagtttgcttccannnnnnnnnnnnnnnnnnnnnnnnnnnnnnnnnnnnnnnnnnnnnnnnn

SEQ ID NO: 4850 - DNA, 804 bp, Zea mays
  Peptide Sequence Number=SeqID_12544
  Probeset Number=SeqID_19253
attcggctcgaggtgggggtgggaagggtgaagtgcatgtgctgattcatactggtgattggggggcaggcacgtcctcttttcaacgacagaaggaagctccccaagatggccgacccaaggctggaagggcggtaccccatgcgcgggctgtaccaagccctggcggtggcttccatgtgcactcagtcggaggccgcttcgcggccactgatcgcggacgtcgtgaccgctctgtcctacctggcgtcccagccgtatgaccccagcacagctttcgcttcaaggaggcttggtggaagcaagcctggcgagaacggcggcaggcgtggtttccaggaacgacgagaccggaacctcaaggtcgccggggaaggaccgggaggactcgcccagggacctcccggctatcctcctgaacaaggacctcgaacccgagcgcatggtggcggaggcccatatgtgggccctcatggagcgcatggtgccagaggccaatatattgatcggccgggagcgcatggtggccgaggccaacatttggggcaagaattggccctgccaccggcgccctgaaaatgggcaaggcagcctggtctccccccctagtaggaaccgctagggggctggggcaacccctccccacatttcttcccaggttgtcgggtgtttcctttcaggcctatttttggtttcgcgggggcttcgggcagggccatgggcagggccagggaaggttggatggtccttttagggcagcgtcgtgctggatagtaaatgcatttggtttttcttgtcaatatc

SEQ ID NO: 4851 - DNA, 1595 bp, Zea mays
  misc_feature (1)..(82): n is a, c, g, or t
  misc_feature (736)..(736): n is a, c, g, or t
  misc_feature (740)..(740): n is a, c, g, or t
  misc_feature (743)..(743): n is a, c, g, or t
  misc_feature (1387)..(1595): n is a, c, g, or t
  Peptide Sequence Number=SeqID_12545
  Probeset Number=SeqID_19254
nnnnnnnnnnnnnnnnnnnnnnnnnnnnnnnnnnnnnnnnnnnnnnnnnnnnnnnnnnnnnnnnnnnnnnnnnnnnnnnnnncaccatcccctctctaccttcttatctcttctcctcgtgcaccagcaacaaaggtggcaggcacagagagagctagctttggccaggcgtccacagcagccagcacaagatgtcgacggtggtcatgggggtggatcttgagtgcgacaagtgctacaagaagatcaggaaggtcctctgcaaggtccaagacaaggtgagcatcaggaccatctcctacgacgagaagaacaacacggtgacggtgtccggacccttcgacgccgaggaggtcgccgacaggctcacctccgacgccggcaaggtcatcaccgacatacacgtcgtcgggggcttcggcttcggcttgggcgggggcggaggcggagggaaacaacagaagcacggcgccgtcgcccccggcaaggcgcccaagcaagggaaggccagcggcaacgggcacggccagggcgggcacggaggcggaggccatggcgggcacggcggcggcggaggtaacgggcacggccatgggcaggccggcgggcacggaggcggaggccatggcgggcacggcggcggaggcaagccgggtaagaataagcacgtcaagttcgacgacatggacatggacatggacgacgacttcgacgacctggacatggacgagccggncggncgncacgcgcacgcgcacgggcacgggcacgggcacgggcacgggcacgggcacggcgacggcaagccgaagatcgtcaggacgacaaacacccccatcgcggcgcggctggaggcgccccgcacgggcccggcgatgtcgatggccgcggcggcgcccgtgaggatgccgatgccgatgccggcgatggcgccaatgccgcagcagcagggcatggggggcgcgccgtccatctggccgcccgcccccgagtggggctacagcgcgcagccatacggcagctacagcggcccgcctgccggcgggtactacggcggcgggggcggccccgccgggcactggccctggcgcggcccctacggcgacggctacggccggaacccgcacggccagcagtactacgaggacgaagagcccagcgctgcgcgcagcgtcatgtgatgccaccggctcgtctccgctacgcgacatctcgtgtactcgcgctctccgtgtccacgacctcgacccactgctgtaagattattcctagggctcgtgcatgcttgcacattacgctgtatttttattttcgccagccctattttcactgtttttttatggcgtttggttcgctccatgtgttgtcagagtatcttgtttgtttnnnnnnnnnnnnnnnnnnnnnnnnnnnnnnnnnnnnnnnnnnnnnnnnnnnnnnnnnnnnnnnnnnnnnnnnnnnnnnnnnnnnnnnnnnnnnnnnnnnnnnnnnnnnnnnnnnnnnnnnnnnnnnnnnnnnnnnnnnnnnnnnnnnnnnnnnnnnnnnnnnnnnnnnnnnnnnnnnnnnnnnnnnnnnnnnnnnnnnnnnnnnnnnnn

SEQ ID NO: 4852 - DNA, 852 bp, Zea mays
  misc_feature (1)..(41): n is a, c, g, or t
  misc_feature (642)..(852): n is a, c, g, or t
  Peptide Sequence Number=SeqID_12546
  Probeset Number=SeqID_19255
nnnnnnnnnnnnnnnnnnnnnnnnnnnnnnnnnnnnnnnnngccactcctccctattcggaggggctcatagggtgccaggccgggggcggctaccttagcggcaggcagcgctggcgggtcgcctgacctccgcctacgagccccctccccttttcgatggcaccaccaggttgcacgtggcctatctttgcccgttcgcgcagcgcgcttggattgctagaaactacatgggtcttgcaggacaagattaagatagtcgccatcgatctcgctgacaggccagcgtggtacaaggagaaggtttatccagaaaacaaggtgccttctctggagcacgacaaccaggtgaaaggtgagagcttggatctggctcaagtacattgacagcaacttcgaaggcccatcgttgctccccgaggatcctgcaaagcagcagttcgctgaggagctgctcgcatacactgacgcattcaacaaagcattttactcatgttctagtcgccccggggaagatgtgtctgaggaagctgtcgctgctttggataaaatagaagacgccctcgggaaattcaacgagggtccattctcccttggtcagttcagtctggtatgtcactggacactaggaatcctcctctcnnnnnnnnnnnnnnnnnnnnnnnnnnnnnnnnnnnnnnnnnnnnnnnnnnnnnnnnnnnnnnnnnnnnnnnnnnnnnnnnnnnnnnnnnnnnnnnnnnnnnnnnnnnnnnnnnnnnnnnnnnnnnnnnnnnnnnnnnnnnnnnnnnnnnnnnnnnnnnnnnnnnnnnnnnnnnnnnnnnnnnnnnnnnnnnnnnnnnnnnnnnnnnnnnnn

SEQ ID NO: 4853 - DNA, 1640 bp, Zea mays
  Peptide Sequence Number=SeqID_12547
  Probeset Number=SeqID_19256
gggtacctcgaggccggccgggccgggacaccaaacacccctcggtctaagctcgcctctgcctcacagccgccttccgatcgagctaccagtgcgtagctcaaaactcaaaacgagaagcaagaactcagtagcaatatatggcgaagtcttgcaccttactgttcggcacagtactggtcgtgctcttgcttctagtgagccccattgcttgctcccgcaagctcgccaagccaacaaacaagcacaggccgagacacaagccggcggcagtcagagcccgcagcaaccacactgccaccccctcggtgtccgacgcctacggctccggcggctggttgtccgccggcgcgacgtactacggcgcacccgatggagacggcagtgacggcggcgcgtgcggctaccagaccgccgtcggacagcgtcccttctcgtcgatgatcgccgccggtagcccgtcgctgttcaaggagggcaagggatgcggcgcttgctacgaggttaaatgcgacagcaacgctgcatgctccggcaagccggcgaccgtggtcatcaccgacgagtgccccggtggcgtctgcctcgccgaggcggcccacttcgacatgagcggcacctccatgggcgccatggcgaagcccggcatggccgacaggcttcgcgcctctggtatcctaaaggtccagtacaagagggtcccgtgcaagtacagcggcgtgaacatcgcattccgggtggaccagggctccaacccgttctacttcgaggtgctggtcgagttcgaggacggcgacggcgacctcagcgccgtcgacctcatggaggccgggtgcggcacatggaccccgatggtgcagaactggggcgcgctgtggcgctacaactccaactccggcaaggcgctgagcgcgcccttctcgctccggctcacctccgactccggcaaggtcctcgtcgccagcaatgtcatcccggccagctggaaggccggagggacgtaccgctccttggtgaattattacccttaaattacagctagctgggagcgtgatcgagggtgtgcttcggccttcgggaggcggcgttgcatgcatcctggcttttgcgagaggcggtgccagaagatgaggaggaggttgaggaatggaattcttccctctccctccacggtctctgcagtcccctagtgatgtctgaacgtgctgttgatttctctgtaattttgtttttttctttttttttctttgtcgtcccgtagttgcgagaggcgcgacgtgactgatgtcgcatgccaatgtatcaagctgtgtgtgtgtgtgtgtgtctttgtaccacgcaatcctttcatataaatgaattgcggctatgttcatcattgcggtgtgcaaaattatagcataaaactgttgctaaggattgaaaatgggggtgctttttatgatatctaaatttacttatgcgtgcattcaacgtgttagtttttttttggtgtcacctaaatatgaattacttggatttggttttacatattgttgtatgtggaatcttttgctttgtctattttatttttttttaaatatatactcattttttcccctttgtttttttggtattagttttcatttttttttattttt

SEQ ID NO: 4854 - DNA, 553 bp, Zea mays
  misc_feature (187)..(187): n is a, c, g, or t
  misc_feature (549)..(549): n is a, c, g, or t
  Peptide Sequence Number=SeqID_12548
  Probeset Number=SeqID_19257
agtgagtctgcatgagaggcttgatttctttgaatcaaactgggcgttctttgctggatttggtgctccatgcgtccttccaattgtcgtcttctctcctcttataagctatgggtttctggctatactttatccgttgtttgtcttgactgccgcaggcactcaagctgagctagtaattgatgcnctgagacctgcgcggcgagggtaacgacaaataatacctgtgttttttgtcgcacagcaactggttctaaagatgtttttactgtttcaggtggctttgggagacaatggagggttcacctgggcctttctttgggggtgggggggccctgggggcaacctttctaaaagaccaccgtgtgaatatgtggacggactatgcctatgaaaaggggcggatgtcctgtaagcgctgtggaagttggaaaggcggggttaaccccatgtaggccgtatttaccccgtattagtcccccgtgttggtggaaaacccaaaataaagtaaaaaaaaaaaaaaagaagaaaaaaaaaaaaaaaaaaaantatt

SEQ ID NO: 4855 - DNA, 371 bp, Zea mays
  Peptide Sequence Number=SeqID_12549
  Probeset Number=SeqID_19258
tgacgctgggcccgaagctgtacgagaccgtgaagggcaagctgtcgctgggggcgaggatcctgcgggcgggcggcgtggggaaggtgttccggcgctggttctcctcccccgtcggcgggggcggcgagcggctgctcagggcgtcgcagtgctacctgtcgaccacggccggcccgatcgccggcatgctgttcgtgtccaccgagaagggtgcgttccggaacgaccgctcgcttgggcttgccctgaccttttccgcccgcggggggaggggcagcggcacgaagacggtgctgcgggtgccgtacaaagggttcatccccctgcgcaggtcgccgggggccaggccgggccaaaacaggaaccgg

SEQ ID NO: 4856 - DNA, 391 bp, Zea mays
  Peptide Sequence Number=SeqID_12550
  Probeset Number=SeqID_19259
caagatgcaacagcgcgagggggggggagcccttttcttgagggtcattcgggagtacataaatagacctgaggttgtccaaagaaaacatgtatttctcgcttacataaagctagtctacttaatacgttacacccgaatctatacgaggaccgaaaagaaatttccaaagatacaagcttttgaaaagagtccacgacccaagaagatgatgtggttgcagtgatcacccagcgagcacgggatcctgggtggttcagggctaccccctacaagggttgatcatttaagctaattcttgttcgtcgggaaaggcctggttgcaaaattccctcatgttagagcctcatgaaacgtgcttgcttcaagctacagccgtttgcttaccacc

SEQ ID NO: 4857 - DNA, 640 bp, Zea mays
  misc_feature (601)..(640): n is a, c, g, or t
  Probeset Number=SeqID_19260
gtttgtcacctgtggcgaaggatgtggacttgagatgctcttgcaagtacacgctttgtggctggaatagtggacttctttaagatattttttaagaagcagaagcagctctcacggcgctggggtgcccatggaggacaagaactggccgcctttcttcccaatcatccaccatgatattgccaacgagataccagcaaacgctcagaagttgcagtatcttgcgtttgcgagctggcttggtattgtgctttgcctcttttggaattttattgctgtcatagtctgttggatcagagggggagattctaaactatttttcctggctaccatctatggtatgcttggcatccctttgtcctacttgatgtggtatagacctctgtaccgagcaatgaggtatatgcctattggttgatgcttcgtgccataaatattgattaatatacactatgtcataatgctaacattatgtatttcatttcctctcaactgaaaatgtgtaacatttttagtaggtgatagaacagtatcgatactttggcgtctggtcctactgaagtaaagtaggatgcatgttttgcaagatgtgtttagcttnnnnnnnnnnnnnnnnnnnnnnnnnnnnnnnnnnnnnnnn

SEQ ID NO: 4858 - DNA, 524 bp, Zea mays
  Peptide Sequence Number=SeqID_12551
  Probeset Number=SeqID_19261
taagctcggaattcggctcgaggagtgggtcatcattttttctctccatggtggtggtgctctttgggggggtttctttatattacggggggtaacatatgcaccaactaccctactgtggttatacaatcttgtcgtcattagcccgatcatgtgtcctaccgtcgatgccatctgtttccgatgataggtctggtattctttttcatgatcttgacattccattctgcgcggtgatatggatggatgatgggactagatatgcacttgaattctcaactgctcgagacagatactatgtgtatctctgttctcgtggtggcattcatgctacaggaaggcacatcaaactattttaaaggtcttatgctcatcttatgctacctcatagttgctgcaagcttttttgtccatgtcgaccctgatgcaagtaagtatcttgtttattggtttcttagatgcacgagagcaaactagaccaaaattgatgggttaatggaaatgcaggatttaaccatttggtt

SEQ ID NO: 4859 - DNA, 1822 bp, Zea mays
  misc_feature (1)..(50): n is a, c, g, or t
  misc_feature (1620)..(1822): n is a, c, g, or t
  Peptide Sequence Number=SeqID_12552
  Probeset Number=SeqID_19262
nnnnnnnnnnnnnnnnnnnnnnnnnnnnnnnnnnnnnnnnnnnnnnnnnnccaactcccaagcccctaccggcaaccctagcgaggcgatggggaaggcggaggcgaggtcaagggggcgcggcggcggcggcggcggcggaggcgccagcggcaatccggggaagatcttcgtcggagggctcccgcgggacaccacggatgctacatttgtgaggcattttggacagtatggagaaatagttgattcggtgataatgaaggataggcacacatctcagccacggggttttggcttcattacatactctgaccctgctgttgttgataaagtgatagaggacaatcatgttatcaatggaaagcaagttgaaattaagagaaccataccaaaaggttcggtgcaatctagctctaaggatttcaagactaaaaagatatttgttggtgggcttccgtcaacactaacagaagacgaattcaagagtttctttgcaagatatgggactgtggtggaccaccagattatgtttgatcatgaaaccaaacgttcccgaggctttggatttatagtttttgcttctgagcaagttgtagatgatttgttagcaaatggaaatatggttgaccttgctggttcaaaggtggagatcaagaaagcagaaccaaagaaatcctccaatgcaccgccaccaccagtgcatgttagaaatgctaggtcagcatatgatagcggctctagagaccacccttcagctgacaactatggtggaatggccagtgcttatggaaactacaggggtggtggatttggtccttataggagcgatacaggatttggtgctaggctcagcagctatggtggggtaggtgattttggtggtgcatatggtcgttactatgcaggattaggagggggatatggagccgcgtcttcgtttggttatcctggtcgctttgggttatatggaggaggttttggtggatcttatgctggtgctgacttaagtggctatagacgcggtggaggtgatgagagcttcggcgcccctggtggtaatcctgggtttggtggtgatgctgaagagagctttggtggccctagtagttctggctttagtggcaccgcctatggtggggcatatgatcctacgctaggtggttatggatctgctagcacacctgacatgaataggggaagcttcactggaggatatggacgatatcacccatatggataacaagaagagcccttgaaggcttaacacttgcatgcacgtttgctgcccgtcattggagaacacccaccatttctggacaatatccagctgcctgaagcttcaagaacaacttaatgtcatgtgtacatgttttctcgttcccgtgagctttaacttatatatcctatagcatgtagtgtgatccagagtagacgttgtatcgaaggttattgtgtttggcataatatagaattctggtatactttgtagtagtttttaagcttctatgtaagcatactccatctgggagcagattagctgtgtgaacgctaggagggccagtctctacccattgcacttagcattgtacctgatcaagttattcactcttttggtttacnnnnnnnnnnnnnnnnnnnnnnnnnnnnnnnnnnnnnnnnnnnnnnnnnnnnnnnnnnnnnnnnnnnnnnnnnnnnnnnnnnnnnnnnnnnnnnnnnnnnnnnnnnnnnnnnnnnnnnnnnnnnnnnnnnnnnnnnnnnnnnnnnnnnnnnnnnnnnnnnnnnnnnnnnnnnnnnnnnnnnnnnnnnnnnnnnnnnnnnnnnn

SEQ ID NO: 4860 - DNA, 235 bp, Zea mays
  Peptide Sequence Number=SeqID_12553
  Probeset Number=SeqID_19263
atgccccgcagcggcatttcggggaccctcaggtcgccccagatcgacgtggtcatcgacacggggaaccccttcctgaaccgcaccgtcgacggcttcctcaagatcggcgccgtcggcgcctgcaaggtggcggccgaggagaccttcgactgcctccacaggggtgcgcgggcgaggcctgaatatctcgcatccactctggatatgtgtgcagggggatcaatagagtcga

SEQ ID NO: 4861 - DNA, 4059 bp, Zea mays
  misc_feature (1)..(3): n is a, c, g, or t
  Peptide Sequence Number=SeqID_12554
  Probeset Number=SeqID_19264
nnnattcggcacgaggggcagatgtgctgaagtgtcttggtgacaataagaagcacatgcgagaatgcacattgactgctctagattcatggattgctgcagcccaacttgacaaaatggttccatatattatagtgtctttgggtgatcagaaaacaggttcagaagggcgaaaagatctctttgattggttgtctaagcacgtttctaaaatgagtgatccatctgaggctttgcctttgttgaagccatctgcatcttctttgatggataaatcttctgaagtccgcaaagctgctgaatcctttatgaatgaaattctcaggatctgtggccaagaagtggttggaaggaacttgaaagatttgccatcacctactttggctattgtatcagaaaggctgaaactgtctactgtacatgaaggattttctgaatctgttaagatggtgacaacaagcatgagtttgccatcaaaagctggtttgaagaacaataaacatggtcttaatgatcgtggttctaatgtgggcaaacctgtgtcccaaagaggacttcccgccagggcatctgttagtatggtttccacccaagaccctgcacaatcccaagcattatttaacataaaggactcaaacaaggaagagcgggagagacgtgttttggtaagaaaattcaagttcgaagaaccacgtcgtgaacagatagatgaactaaagattgatttgtttaagcatttccgagaagatgtaagcctgcgattatggaactcagactttaagaggcaaatcgatggtattgaattgctacaaaaggcacttccttcaagttggaaagaagtgattgaacttcttgacatattattaaggtggtttgtcttacgcttttgtgaatctaacacaacatgtttgttgaaggttcttgactttcttcctgagctttttgatattttaaaagaccagtcatacatgttgacagaagctgaagctgcaatttttcttccttgcctcatagagaagtctggtcataacattgaaaaagtcagggaaaaaatgggggatctgataaagcaaatggtcaacatttattctcttcccaaattacttccctatattcttgaggggctccgctcaaagaataaccggacaaggatagaatgtgttgatattattggatacttcattgaccatcatgggactgaggttggtgggttgatgaaaaacttgccatttgttgcagcactgacagcagagcgtgatggtgagattaggaaagctgcccttaatacgcttgcaacagcctacaagagccgagagagagagctcatagtccccccccgcaaactctcagatgcccaaagaagcatgctcgatgataggtttaaatggaaggcaagagaaatggataaaaggcgagaaggaaggcctggtgatgcacgagcagctctgaggcgttcagttagggagaatgggtctgatatagcagaacaaagcggagaagtagtgtcccgtccagtggctggatcaatgatctcaagggacttcggatatgcagatgctcatatggataggcacatggtacctaggcagattccaagtacaactggtcctgtggactggcgcgaagctctcgagatagttgcattaggtttgcctgagcagtccgttgaaggtatgaaagttatatgccatgagctaacacaggcagctgaccctgaaagcacattgcttgaagatcttattaaggaagctgacagattagtgtcatgcttggctgttatggttccgaaaaccttcaattttagcttatctggggcttcttcaaggtcttgcaaatatgtcttaaacacactcatgcagacatttcagatcaaacgtcttgctcatgctgtgaaggagggtacccttgacaaccttattacggagttacttctttggcttttagatgaaagggttcctcttatggatgatggcagccaattactcaaagcactaaatgttttgatgcttaaaatcttggataatgctgagagaacatcctcgtttgttgtgctgattaatttgctgaggcctttggacccttcaagatggccatcgcctacaccaatggagtctcttgctgtaaaaaatcagaagttttcagacttagttgtcaaatgtttaattaagttgacaaaggttcttcagagtacaatatatgaagttgaccttgatcgaattcttcagagcatccatatttatttacaagaactgggaatggaagaaatacggagaagggctggtgctgatgataagccattaagaatggtcaaaaccgtcttgcatgaacttgtgaagcttcggggaacggcaataaagggtcacctttcgatggttcctatagatgctgaacctcagccaataattctagcatacattgatcttaatctccagacccttgctgctgctagaatgatgattcaatggttcctatagatgctgaacctcagccaataattctagcatacattgatctcaatctccagacccttgcagccgctagaatgttgacgccatcggggcctatgggtcaaactcactggggtgatgctgcatcgaacaatccaaatccatctactcactcagctgacgcgcaattgaagcaagagcttgctgctattttcaagaaaattggtgacaagcaaacatgtaccattggcctctatgaactgtatcggataactcagctctacccaaaggttgatatatttgctcagcttcagaatgctagtgaagcgtttagaacctatatcagagatggcctagctcaggtggagaagaatgcagcagctggaagaatgccttccagtcttccattatccacgccgcccccaatagcagcaatacccaatccaaaatttgcaccatcccctgttcacacaaaatcaatcggtaaaacagattataacgaagataatgccagtggtgagacacaacccttcagaggtcaaggtgccatcaccgaccaacaaactgatagataccatacctcaggcacgttggatgctcttagggaaaggatgaaaagcattcaagcggcagctataggtcattttgacggtgctcaggctcggccgttggcaagtatgaacggaagtaatatggtgcatgggggaactcgattggacggtgaaccccaacaacgaagtaatataccacccatggatgagcgagctctatctgggctgcaagcacgaatggagagactaaagagtgggtctatggaattacaatagatacgataacaattctgagaaataccaactattgtagttctttgtaaatttgaggcatagtgatggtgttctttgtagataggtatttgaatgtcggaagaactatatggcacggggtcaacatttcgtaacccatgtgtcaagccattcttgcagagcctttggatgcagttttagataagaggtagccaaatgttttccttgttgctactccaagggctaattagtgttgacacattttgccgtactgtattggttttcctgtggtgtacagcaatagaatttttcattctaaattaactggaaatgttacttgtgaaatatatggtttttgtaaggcggaaaaaaaaaaaaagaggtagccaacggaagttgtttttgagaccaaaacacggggtcctgacgagcgtagttcttatttcggtaaagttgtggttcaaagaggacttccgcagagagcatctgtaactattgtttctaattgagatggttctcaatcagagggaaaaaataaaaaaaaaaaaaaaaaaaaaaaaaaaaaaaaaaaaaaaaaaaaaaaaaaaaaaaaacgggcggcctctaaaaaagatccatttttaataacgcggcctaccaaatttatatctcctatattaatacaacctaaatacattaaacaacccttttttaaacaacctcataattggaaaaaccctgtccttttccaacataattatattacaaaaaatcccttttccaactttaatttataattaaaaaacccccccatatatcaaattttccaa

SEQ ID NO: 4862 - DNA, 354 bp, Zea mays
  Peptide Sequence Number=SeqID_12555
  Probeset Number=SeqID_19265
cgggttcgtcccacgcgttcgtgcgaatgtcttcctgggagagtgcgcgtgctacatgctgacgccttgaacttggttcaaggtggactcactgctggcagcaccggtttttgaaactagctgcgcagcgaccctccaggcatgcgatacgctgcacgataggttaaagctagtcttggacaggatgcagcagcgatcagaaaacgtctcgtgggataccttggtttcgcaggcctacgaagacgatgtcgatatgtccgcgagtgcgtactgggtacctggccaagcttctaacaagtaccttaactacggagctggcataagccaggcggaggacgatcttctcacgggagc

SEQ ID NO: 4863 - DNA, 951 bp, Zea mays
  misc_feature (951)..(951): n is a, c, g, or t
  Peptide Sequence Number=SeqID_12556
  Probeset Number=SeqID_19266
cactgagagagaagaatcatgtctctggtgtttctacctgcgtggtgtctccccttcaaggtgtgccctcttccctgtggttctccctgattctcacagcgaaaacagtaggggaagccctaaacaaaccagttcttgaggcatttggcaatgcaaaaactatcaggaacaattcaagtcgttttggaattttttgttgagattcaagtttgatgcaaatgggaagatatcaggagctgctataagggcctatcttgttgaaagatcccgtgtctgtcaaatatctgatccagaaagaaactaccactgcttttgcatgctctgttctgcaccggtctgcagggcagggagccggaggaggaggaggggagctggcgagccgggcgaaggcggcggcgcgcgcgtggccgtgctgtgacagctgcggcgggtgcaccagatcggagccgccgcggtgccagtgcctggacgcggcgccccgcgggtgccacccggcctgcagggactgcgtcaagtccagcctcagcgccgacccgccggtgtaccagtgcatggaccgcgtccccaacttctgccagcgccgctgcaccgccgccgccgccgccgcggcgcactgaccgaccgcgcggggcagccgagccagccgacgactggtttctgcttgcagcttggtattattgacccagcaacctttttgcccacccacccacccgctcgcccgcccgccggcgaatcatggcgtctggagcctttgaagccagccgtggattaggatttttgtttgtttgtgtttgtgtagactgtaactgtaaagacacccccccactctgtaatctggtgagcgagcaaccaatccgagcttacgttgtccgtctgtggtgtggtgtccttcttcttcttcttgtgttctgttttctttcgttcagttacacactttggtaggtagttggn

SEQ ID NO: 4864 - DNA, 569 bp, Zea mays
  misc_feature (20)..(20): n is a, c, g, or t
  misc_feature (38)..(38): n is a, c, g, or t
  misc_feature (64)..(66): n is a, c, g, or t
  misc_feature (70)..(70): n is a, c, g, or t
  Peptide Sequence Number=SeqID_12557
  Probeset Number=SeqID_19267
ccccccccccaaaaaaaaanacacaaaacaaaaaacanaccccccaggaaaaaaaaaaaaatgnnngcgngaaacccccccccattgcttcaaatcaaaaaccattcaaaccgtcttcaccggactggtggaaaggctatcaaacttacgaggcatggccaggatttgggtacatttcacttgtgatgggcttacccatgaatattgagttgctttgtagtgttgaaagacagctaattcgatggctggccccccctacccacgaatcaccagttcattcatatggcatgtgaggtaccttgatgtttctttgactgttaaaagcattgtctggtacagttcataaattggatccctatgtatggtaaataaaaaaactgaatgcactttgattccctgttacactgggttgatgctgaaatcctccccaaagctaaagtgtacgttccaccaactgcaacagcgtccaatgaacgtggtggcaaatttcaacacactggtggtgctaccaaatgatccatctgaagttactcttaacaagatgcaatcaccgcttgttttcctttcgc

SEQ ID NO: 4865 - DNA, 920 bp, Zea mays
  Probeset Number=SeqID_19268
cgcgcccggtccctcgcgccccgcccccctccctccccctccaatcctgtccccaaatctctctcttctctcttgcggcgaggcgaggcggtgaagacgagcgagcggcgaggatgttgtgggtagacaagtaccggccgaaaaccctagacaaggtcaccgtccacgaccaggtcgcgcagaacctcagaaagttcgtgtcggagcaggattgcccgcacctgctgttctatgggccgtcggggtccgggaagaaaaccctaatcctcgcgctcatcaagcagatgtttggcgccggcgcggagaaggttaagctggagaataagacatggaaaattgatactggaacaaggacacttgagatagaattggcgatgttgtcaagtgctcaccatgtagagatgaaccccagtgatgctggctttcaggacaggtatgttgtccaggagatcattaaagagatggccaagaacaggccaattgatgccaagggaaggagaccatttgaagccctcgtgttaaatgaagttgacaagctctcaacgacaagcccagcattccctccgtcaggactatggagaagtatagctcatcatgcagactgatcctttgctggagcggctcctcaaaagtgacagaggctgtcagatcccgtaatcccccaatgtgcgagttaacgcacccagtgaagatcagatggcccacgttatagaattcattggcaagaaagaaaacctgattctttcaactggatttgctgctcggaacgctgcacaatcaaaccgtaatctgacacatgcgatactgatccctgagacttgcaaagatcaacaatacccatttacctcaaactccgccggcgcctactcttgattgcgagcactgcgcgtctgaaattagccacggatatactgacagaa

SEQ ID NO: 4866 - DNA, 1289 bp, Zea mays
  misc_feature (1)..(5): n is a, c, g, or t
  misc_feature (1289)..(1289): n is a, c, g, or t
  Peptide Sequence Number=SeqID_12558
  Probeset Number=SeqID_19269
nnnnnacagacaccgattccgactcctcgcggttactctctctctctaatttccccgtccaaccccaagttcaatctactccatgggagacgatcgatttggttcccttctctctctctttcggggtgctcgccagaatggggatcgcatttctgctagcgcgcgctgttgctgttgtggggaatgattttgctctttccttgttgcaggtgcagcgaggcaagcacatgggattctcaagtgttaagcaggcatgctgaatgtctggagctggaggagttgactgcaatatcagtcaatcccagtctgcttccagctttgaatcagttgcttctcgaggcgtatgccattctacgtcccaagccgcttgactatgaccagcgcaacaccttggttgatgtcttcaggaagatggtgaatcaaagatttgcctagatgtaaaccaggattcctacagctcatcgtaaacaggagagtaggcctcatatgcagcagcagcaacagcaaccagaacgctattctgtaacagctggtggacttgcacgtgggacctattctccagtttgtagcaacagtgggtctccggttgtggaaccatttggatcattcacgatggatttatttactcctcacagtgacctggacctctctatcaattttagtgctaatactgatgagcaatatactcgcaagcaaatgatctctattatcaagaaattttccaaggttctattttcttatcagaggagtggaattttctgtggggttttacctattgtaagtgctagggtgcctatactgaaggttattgatcgtggcacaggggtcgaatgtgatatttcggttgaaaacaaagatggcatgacaaggtcaatgatcattaaatttgtttcctcacttgatgaaaggtttcagatactaagttacttggttaagttctgggctaaggtacatgatctgaataccccaagacacctaactatgagctccatgtcaattatttcactagttgctttccatttgcagtgcagacccggcatcctccaatattgcctgcgttctctgacttgttaaaagatgggttagattgcgaaagcattgagaggaatgctttacggtttagggattttgggagtagaaataaagaatctgtcgctgaactgtttgtatcattgataagtaaactattgtcagcagagcgtctcatgggagcatgggctgtgcgcaacaattttgaagcgtcatggatctcaaagacctggaagaaaggagtaggcaatttaagtgtn

SEQ ID NO: 4867 - DNA, 820 bp, Zea mays
  misc_feature (1)..(1): n is a, c, g, or t
  misc_feature (746)..(746): n is a, c, g, or t
  Peptide Sequence Number=SeqID_12559
  Probeset Number=SeqID_19270
nattgggaccctcgaggccggccgggtccatctctattctcaactcacagtctcacactcatcaaccggccgccttctcgctcgagcacttccctttaatttctgagcgcatcgtgctgttgagacttgagagcggcatatatatggcggctcagggaagaatgggcggcgctcgtggcagcagcggcgccgtcgtgcttgcgctggtcctcctctgcgtgctccttcacggcgagttcgccgagtcggcggtgtacacggtcggcgaccgcggcgggtggagcttcaacaccgccaactggcccaagggcaagcgcttccgcgccggcgacgtgctcgtgttcaagtacgaccccaaggcacacaacgtggtgcccgtgagcgcggcggggtacagctcgtgcagcgcgccgaggggcgtcagggcgctcaccaccgggaatgaccgcgtcacgctcaagcgcggcgtcaactacttcatctgcagcttccccggccactgccaggccggcatgaaggtcgccgtcaccgccgcgtgagggcgtggtgaggccgtaccggaccgtgccgatcggcccggacgggctatatatctggggctgctgcttctattattttcttctccaaagtaaagcgcatcgtcgttcaattatagtcgtcgcgtacgtacgtacgtacgtgtgtcggtgtgggcgcctttagtgttgcggatttgcactatatacggagagcgagaaggacagatncagcaatgtattggcgtgtgtgttgatctatgcaacataataaaacctcattcgattgttgaggcgactttttt

SEQ ID NO: 4868 - DNA, 1004 bp, Zea mays
  misc_feature (1)..(212): n is a, c, g, or t
  misc_feature (1004)..(1004): n is a, c, g, or t
  Peptide Sequence Number=SeqID_12560
  Probeset Number=SeqID_19271
nnnnnnnnnnnnnnnnnnnnnnnnnnnnnnnnnnnnnnnnnnnnnnnnnnnnnnnnnnnnnnnnnnnnnnnnnnnnnnnnnnnnnnnnnnnnnnnnnnnnnnnnnnnnnnnnnnnnnnnnnnnnnnnnnnnnnnnnnnnnnnnnnnnnnnnnnnnnnnnnnnnnnnnnnnnnnnnnnnnnnnnnnnnnnnnnnnnnnnnnnnnnnnnnnnnncagagcagagcaccagcgtataactaattccttcctttcagttgatctcgccctgtgttctgttctgcaagcacacaccccagccagcatcagtggttgcctgctggctgttgatcatcatcatcatcactagtaaatgtagcagttgtgtgtctctgtataaatgtactgaagctcgtgtagcaccctggctcttggatgacagcccattattgttcttgttcttattaccagccagtctaaggaaaactgacccaatctggatctatgcaagttgaagatcactgacattcagagcttcagacaacctgaattacccatcaatggcccgagcctatgcagctggccgcgctgggggcaccatgacaggagtcctgagcgctgctaatgagaacgccgtggagttgttcattgacgagaagtatgagctacctggacatacttttttttgcatatcgacttttacctgctttgttctagataaatcgttgcatatttttcatgtcatcctttgatttggtttgccaaacattctgcaaattctaaggccagatacgctatgctaatttgctgcaatgaaaagaaaactttggaccaaccaaagccccatggacaatctactgtgctttgctttagaaaagcgagctggaacgagaatgtatgtccttaaagataatatattctcaagcaccttttgggcctacgttacggattagagcagctatataatcttgatttagactacctttttcctgatttaaatacaagttaaatacaccgaccgagggtccn

SEQ ID NO: 4869 - DNA, 1025 bp, Zea mays
  misc_feature (601)..(1025): n is a, c, g, or t
  Probeset Number=SeqID_19272
ccggccggtgccggaagactcatcagttcaattcaatccaatccaatccaatcccaccccgccccgccccgccccgcccaagaacttcaatcgtccaacaaaagcaggagtcgcatcccagatccccccgcattagagacaggcagggagggaaccgagatccatccatccgagtcgatggagtcaacggtggagcggataagctcgtcggtgcagtcctaggtgaagggccacgagctcgcagccatcatgttcaagtacgactcgacggcgcacaacgtggtggcggtgaacgcggccggctacaaaggctgctcggcgccgcggggcgccaaggtgtacacgtccggcaacgaccgcgtcacgctggcccgcggcaccaactacttcatctgcagcatcctcggccactgccagtccggcatgaagatcgccgtcaccgccgcctgaccgatcgcggccgccgccggcatgtcaacgaactggtcgtccgatgacgctcgccgccgacgatgaagaagaacaggaaggatatcggaagagcaggttcacacaaagagacgcagtcacgcaacaaacaacttcatgacaggatgatctnnnnnnnnnnnnnnnnnnnnnnnnnnnnnnnnnnnnnnnnnnnnnnnnnnnnnnnnnnnnnnnnnnnnnnnnnnnnnnnnnnnnnnnnnnnnnnnnnnnnnnnnnnnnnnnnnnnnnnnnnnnnnnnnnnnnnnnnnnnnnnnnnnnnnnnnnnnnnnnnnnnnnnnnnnnnnnnnnnnnnnnnnnnnnnnnnnnnnnnnnnnnnnnnnnnnnnnnnnnnnnnnnnnnnnnnnnnnnnnnnnnnnnnnnnnnnnnnnnnnnnnnnnnnnnnnnnnnnnnnnnnnnnnnnnnnnnnnnnnnnnnnnnnnnnnnnnnnnnnnnnnnnnnnnnnnnnnnnnnnnnnnnnnnnnnnnnnnnnnnnnnnnnnnnnnnnnnnnnnnnnnnnnnnnnnnnnnnnnnnnnnnnnnnnnnnnnnnnnnnnnnnn

SEQ ID NO: 4870 - DNA, 621 bp, Zea mays
  misc_feature (53)..(53): n is a, c, g, or t
  misc_feature (601)..(621): n is a, c, g, or t
  Peptide Sequence Number=SeqID_12561
  Probeset Number=SeqID_19273
cataaattcttctatctgtttaaacaccttccacaagactttaacagctcctnactatgcgcccggtgttatataaggggcgcgaaataatatctaaaacattttgtcttcaataaaacaaaaactagtacagttctctattagcgtgtcatttctcgcatgaccgacatatttccaggactcgggcttgagtatgacatgtcggggctgacacgggatacgatggatagtcataggctcatagcacttgctggacaccaaggctatgacaagcaaaatgctcttgttggagaattattccttaattacttctgtgaaggaaagtatattggtgacaagcatgattttgctggacgctgcaagaacaggtgggcatagaaggggccgaggaactgcttcaagaccctaccaaaggagtcgatgaggtatgtttgccagttacaaattctgctcctggagccatgtttctgtcatgacagggctcacagatcctttttgctaccaaaaggttcaggaagagctcaagaagaactcatcggacatctccggggtcccacattttgtggtatgaggatttattgatgatgatatttatcgtctnnnnnnnnnnnnnnnnnnnnn

SEQ ID NO: 4871 - DNA, 1258 bp, Zea mays
  misc_feature (1040)..(1258): n is a, c, g, or t
  Peptide Sequence Number=SeqID_12562
  Probeset Number=SeqID_19274
atctcatcccatcccgccggcgaaggctccccaccaccaccaaaccctagattacagtagatagatctcgttctccggcggcggcgaagatggtgtgcatccggcaggcgacgatcgacgacctgctggcgatgcaggcgtgcaacctgatgtgcctgccggagaactaccagatgaagtactacttctaccacatgctgtcgtggccgcagctgctgttcgtcgccgaggactacggcggccgcatcgtcggctacgtgctggccaagatggaggaggacccctcggagccctgccacggccacatcacctcgctcgccgtgctccgctcccaccgcaagctcggcctcgccaccaagctcatgtcggcggcccaggccgccatggaccaggtcttcggcgccgagtacgtctcgctccacgtccgccgctccaaccgcgccgccttcaacctctacacctccaccctcggctaccagatccacgacatcgaggccaagtactacgccgacggcgaggacgcctacgacatgcgcaagatgctgcgccagcccgtgcccaagaagcaccaccaccaccaccacgccggcggcggctgctgctcccacgacgctcctgctgccgcggcggccggctcgtccccagcgtccgcagttaacggagaagtagaccgactcataatttgaaagccatttcaaaaacaaggagctgctgaacctcctggatgagccgagtcatattttttttgtgcacctaactagcttttgaaccttgcagactcgtatcttcagagaggaatcacccagtcaattggactcatctttcccccccctgggtatacaatatttccgttgtagcgagcggtctttccgtagtagaacggagaaagacctgtgcagtgagtatttgtgtacttggccgatggctcgaatcgtctgaccgaatcagcgagaatggcaaccaaatatgcttcgtacttgatacccgtgttgccttgagacatgtgcgagttctcacagttcatttgattggtgatcatnnnnnnnnnnnnnnnnnnnnnnnnnnnnnnnnnnnnnnnnnnnnnnnnnnnnnnnnnnnnnnnnnnnnnnnnnnnnnnnnnnnnnnnnnnnnnnnnnnnnnnnnnnnnnnnnnnnnnnnnnnnnnnnnnnnnnnnnnnnnnnnnnnnnnnnnnnnnnnnnnnnnnnnnnnnnnnnnnnnnnnnnnnnnnnnnnnnnnnnnnnnnnnnnnnnnnnnnnnn

SEQ ID NO: 4872 - DNA, 367 bp, Zea mays
  Peptide Sequence Number=SeqID_12563
  Probeset Number=SeqID_19275
attcggctcgtggtgattctctgggatggtaatcactcataagcattgttaacttatggttccggtaaggtatatgttgtccatcagaagataacaatccttatgagtgattctctgggagggaatgcgaagaccttgatgtttgtgaatgtttcaccagcagaggctaacttggaggagacttacaactcgctcctgtatgcttcacgcgttcgatgcattgttaatgatacgagcaagcatgttgctccaaaagaaatcatgagattgaagaagttgatcgcctactggaaggagcaagcatgcaagcggagtgatgaggacgagctagaggaggtaaaggaagagaggatctcaaaagagagag

SEQ ID NO: 4873 - DNA, 530 bp, Zea mays
  Peptide Sequence Number=SeqID_12564
  Probeset Number=SeqID_19276
cccacgcgtgcgcacgcggcgttgctgtgattacagggcaccattaatctgctatacgggcatagtgatccctgtaccactgctgacgatgaggaacccaagcggcaagctacgacatactgtgagaaggagaggccatgaatcttctaatggagcaggcaggaggccagtccttcacaggcaaagaacgggctcttgatctggtcccaaccaagatccacgacaggtccccgatattcctcggaagctacgacgacgtggaggagatcaaagcgttgtacgccgagcaggcgaagtcgagctccccttcatccttagtgaggggggaaatcgacttttcctgccttaatttgctgctggtaaccggagccagactttccgtttccgtttcccttggtgtccccgtaagtgttaatgacattcagtgcactatgtatagcccctaagggactccgttaaagttacgtacgtacatacatacatgcatctaacccccgtacgtacatgcattcgtctgttaaggagaaata

SEQ ID NO: 4874 - DNA, 618 bp, Zea mays
  misc_feature (549)..(549): n is a, c, g, or t
  misc_feature (556)..(556): n is a, c, g, or t
  Peptide Sequence Number=SeqID_12565
  Probeset Number=SeqID_19277
acgtgatttttttgtgtgtccctttattgccggggcggtcacgttcgtacgtacagaaacaatagcgagtgatagatttggatggatccccgcacgcgcccgcagacgtcacctaatataatgaacaatgcgggggcggccggaatcaatgaatcatcagtaacggagtagaagtcatatcatgtcagggaagaaacgatacagcgggacacacacgcacgcatggggatagatcactgcgtgccgacgagctgcacgcctcggacggcgagcgcggcgagcgggccgatggcgagggagttgatgtaggtgcagggctcggtgtaggaggatgttgccgcgacttgtccacgatagcctgtccttctatgtcgggcctcgccgacagatggcgtccgagtgagcatcgttatggggttgggctttgtcgggcgctcatcctagtccccgaatgctgaggcccgctagttgacggtccgtgaccgggggtcagcaacgggggatggatgaactgcggatggtacgaccccgcgtccccgggattggtgnccgaagncccaaaaaagtaggaagctgtgccgcgggattggcgccacagcagagtagtcctatctgctg

SEQ ID NO: 4875 - DNA, 1506 bp, Zea mays
  misc_feature (1)..(4): n is a, c, g, or t
  misc_feature (1498)..(1506): n is a, c, g, or t
  Probeset Number=SeqID_19278
nnnntcacttgtgctctctgttcggaaagaagcccggccgggtcggaaggggagcagttctcgccttctcggggaggtcgccagcgggttgggcagaggctttgcagcttttgggtcagacgcagtgttctccaaggctcactaaatggagtctcacaatggcgaggctgatgatttgcctccaccaccccctttggctgctggtgttgaaccacttaaagctcgatgaaacaaagatgccattgaaacctaggagtctggtccagaggaatggctttggcagaaaggggcagcagataaagctgataacaaaccacttcaaagtttctctcatgaaggctgaagattttttctatcattactatgtcaatttgaagtatgaagatgatacaccggttgatcggaaagggtcgggaagaaaagtgatcgaaaaactgcagcaaacttatgctgctgaacttgcaaataaagattttgcatatgatggtgagaagagcctgtttacaattggtgcccttcctcaagttaaaatggaattcactgttgtgggatgaagacgtttcaactggaaagactcctgcaaatggcagtccaggcaatgatagtccctcctgggagtgacaagaaaaagggtcccgagggccttacaatacaaagacatataaggttgaactatcttttgcggcaaaaatccctatgagtgcaatctcacaggctttgaggggtcaggagtcagagcacactcaggaagcaattcgagtgattgacattattctgaggcagcactcagctaagcagggttgcctgttagtaaggcaatcgttcttccacaataatccttccaattttgttgacctgggtggtggtgtagtgggatgtagagggttccattctagttttcgtgcaacccagagtggactttcactcaatatcgatgtgtccaccacaatgatagtgaaacctggtcctgtcattgactttctgattgccaatcagaaagttaatgatccaagcatgattgattgggcaaaggccaagcgctcactgaagaacttaaggataaaaacaagtccggcgaaccaagaacagaagattgttggtctcagcgacaggccttgccgtgagcaattattcacactgaaacataaaaatggtgaatctgaagagatcactgtttttgattactttgtaaagaaccgtggcataaagctggaatattctggtgatcttccttgtatcaatgtgggaaaaccaaagcgtccaacttattttccagttgagttatgcagtcttcttcctttgcaacggtacactaaagcattgagcacacttcaaagatcatcactcgttgagaaatctaggcagaaaccacaagaaaggatgtctgttttgtctgatgtgctgcaaagaagcaactatgatgcagaacccatgctgaaggcttgtgggattacaattgctagaaatttcatagaagttgatggtagggtactgcagnnnnnnnnn

SEQ ID NO: 4876 - DNA, 535 bp, Zea mays
  Peptide Sequence Number=SeqID_12566
  Probeset Number=SeqID_19279
gccctggggttttttttttctttctttaaacaaattttagaaccaaaccccagttgtataggaatagcattccaagacgaacccaacggcccgaacatggataccggaccacttaaattaacaccggaaacaagttacagcaatagaccccggggcccggcttctaacaaacctaaacttcggtgaacaagcccaacaggacaggggatgcgttacaagaaacccaaaaaaacattggggggggcccctttccaagaaatcggggatacaaagtttttggggaacttggacaaaaacatgcctaaaatattccccacctttctaaaatggacccccttgggattcccttaaggcctcgaatccaaaggaagggaaaatttttttcgaggaccccttggaaaggccaaaagttttaaaaaactggcccgcaaaagccttaaggggggcaaggaaaacccttttgcccggaaaggaaaagagtacctttcaagccccaggaacccaagaaacaggcgagggggcttttaacccttgg

SEQ ID NO: 4877 - DNA, 967 bp, Zea mays
  misc_feature (715)..(967): n is a, c, g, or t
  Probeset Number=SeqID_19280
gaagataatgttttgctgtttcagcaaacatctgaagtatgagtcttattattaagaggtcttttctttaacttatggcgagtttagcatcggtcagttatcaaacagttaaagcgttttctgaaatcttgtttgaatatccgcagtcctttttttggtttggcatgccgaattattctgaaatgtttagtaaaaaaaaaaaaaaaaaaaaaaaaaaaaaaaaaaaaaaaaaaaaaaaaaaaaaaaaaaaaaaaaaaaaaaaaaaaaaaaaaaaaaaaaaaaaaaaaaaaaaacaaggccggcccccccccgcgttcccccctttccctttccatttttccccttccccccttgcctttagtgcttggcccattttctgttttccttgtggggataaaaaaaaaaaaaaaaaaaaaaaaaaaaaaaaaaaaaaaaaaaaaaaaaaaaaaaaaaaaaaaaaaaaaaaaaaaaaaaaaaaaaaaaaaaaaaaaaaaaaaaaaaaaaaaaaaaaaaaaaaaaaaaaaaaaaaaaaaaaaaaaaaaaaaaaaaaaaaaaaaaaaaaaaaaaaaaaaaaaaaaaaaaaaaaaaaaaaaaaaaaaaaaaaaaaaaaaaaaaaaaaaaaaaaaaaaaaaaaaaaaaaaaaaaaaaaaaaaaaaaaaaaaaaaaaaaaaaaaaaaaaaaaaaaaaaaaaaaaaaaaaaaaaaaaaaaaaaaannnnnnnnnnnnnnnnnnnnnnnnnnnnnnnnnnnnnnnnnnnnnnnnnnnnnnnnnnnnnnnnnnnnnnnnnnnnnnnnnnnnnnnnnnnnnnnnnnnnnnnnnnnnnnnnnnnnnnnnnnnnnnnnnnnnnnnnnnnnnnnnnnnnnnnnnnnnnnnnnnnnnnnnnnnnnnnnnnnnnnnnnnnnnnnnnnnnnnnnnnnnnnnnnnnnnnnnnnnnnnnnnnnnnnnnnnnnnnnnnnnnnnnnnnnnn

SEQ ID NO: 4878 - DNA, 1589 bp, Zea mays
  misc_feature (1)..(37): n is a, c, g, or t
  Peptide Sequence Number=SeqID_12567
  Probeset Number=SeqID_19281
nnnnnnnnnnnnnnnnnnnnnnnnnnnnnnnnnnnnnggcaaaattgttgactggacggatgaggaattagagcaaacttcagaggctgttggatatggtgctgtgaagtatgttctggaatgtcttgttttagaaagatggcacctcttgatttgactaagcaataactaagtacgctgatctaaaaaataacaggctcactaattacacatttagttttgaacaaatgctgagcgataagggaaatactgctgtgtaccttcagtatgcacatgctcgtatttgttccattattcggaaatccaacaagaacgtggaagagctgaagatgagtggagccatttctctcgaccatccggatgagcgcgtgttgggtctgtatcttatccgatttgcagaggttgttgaagaggcatgcacgaatctacttccaaatgttgtgtgtgaatacttgtacaatctatctgaaatgttcacaaaattctataccaactgccaggtggttgggtcgccggaggagacgagccggttgttgctttgccaggcgactgctgttgtcatgcgacagtgcttcaacctgctcgggatcacgccagtatacaagctgtgattggctgcatgttcgattcatacattcaacatgtagaaaccccaattcatcatggttgcagttttggtcttgtaacctagttgaggcagttaacataatctactgtcctgtttgaaaacagaaggaactcaaaaggttgtatcaaaatgtgcttgcagagtttctgttactgttaggctagttttgcaaaaaaaaaaaaaaaaaagacgacgcctcccgatttttatttttccaagggctagtttgggaacaccattttttcaagggatttccattttcccactaatttctcttacgccccgtttggatcactggaattaaattccattctaatatagtaatttaggcataaaaaaaaaaaaaaaaaaaaaaaaaaaaaaaaaaaaaaaaaaaaaaaaaaaaaaaaaaaaaaaaaaaaaaaaaaaaagaaaaaaacccccaaaaaaaatgcatacaacaaaataaaattcaatatattggcaccctaaattaaaaccactgaacttttttttgcggggcccctccttaaaaaaccctgtttttacccatccccgttgggaaggaggaatttcttttttgggcccccgtaattatattgggggggcgcttttttaaaacccctttggggaaaaaaacacagggcccccccaaaaaataaatactctccaaaaaaaccccccttttttacggcggggggtggaaagagaaaaaggggcagcgccactagccccccttaaacagaggcggtaccccctgggtggtatagggtaccccccccttttttccccataaaaaacgccacggggggggggggggttccccaaaggggaggcttttttttattggccccccttaaaccgcataaccggggcttgttttcaagatttcctttttagggctttggggttttttccccgcaaatttatttttagaggccgctttttaagtgtttaatttaggacccctggccacccccca

SEQ ID NO: 4879 - DNA, 1016 bp, Zea mays
  misc_feature (1)..(29): n is a, c, g, or t
  misc_feature (972)..(1016): n is a, c, g, or t
  Peptide Sequence Number=SeqID_12568
  Probeset Number=SeqID_19282
nnnnnnnnnnnnnnnnnnnnnnnnnnnnngtcagtgccagcgccagcggagaaaagaaacagagttcgaccggccccgccccgccccgcccggccgcccccaccgcagcgcccgcgaagccgccaaacaccaccacctatccgccagaagcctcttcctccctcgctctcccccatcggcgcgctgccaatggccgcgtggtgaagcgcacccgacggaagaagcacgcaccaacacccaagccccctgtgccctcgccgtcgccgcccgcgcaagattgagatcccggattcagacaggtgctaccattcgatttgatttggcgcggagcactttcctatggccgcctccatcgcggcctcgtccttctttccagggtcaccggcgccggccgctcctaagaacggccttggggagcgcccagagagcctggacgtccgcggcgttgcggcgaagccgggagcctcgtctagtgccgtgagggcgagcaagacgcgcgcccacgctgcggtccccaagatgaacggtgggggcaagtccgcggtggcggatggggagcacgaaaccgtaccttcttcggtgccgaagactttctacaaccagcttcccgactggagcatgctccttgcggccatcaccaccatcttcttggccgcagagaagcagtggacgatgcttgactggaagcctaggaggcctgacatgctcactgacacgtttgggtttggccggatcatacatgatgggctcatgttcaggcagaacttctccattaggtcctatgagattggggcagataggacggcatctatagagacgctgatgaaccatttgcaggaaacggcactcaatcatgtgaagaccgctgggctgctaggtgatggatttggctccacacagagatgagtaaacgaaacttgttctgggtggttagccaaatgcaggccatcatcgagcgtattcatgctgggnnnnnnnnnnnnnnnnnnnnnnnnnnnnnnnnnnnnnnnnnnnnn

SEQ ID NO: 4880 - DNA, 879 bp, Zea mays
  misc_feature (754)..(879): n is a, c, g, or t
  Peptide Sequence Number=SeqID_12569
  Probeset Number=SeqID_19283
gccggccgggtccgggcgaggggccttttaaccccagcccggccctgcgagcgagaccaccccacccattcactcgcctgcgctccctcgccgccccagttaccaggacgctgatgacgacccgggcgaccctgtctctttgtctccccggcgtggccgcatccctcttcacgatcctctgctggaacggcgggaccacaacaaacctattccatatgaccttggcgactacagctgcaattggaagaaggatgacgtatgctatcgtttaccttgctcaaatgaaaccattgatcaaccccatgctgagcggtgagtgatctctcctctgcattaaaaagaatgaaagctaggcctgatgtaccattattcagtctgtgaacttcctattcatttgcgcccacctgatgaaataaataaactgccatgtgaaattttttttcaagtaattaatactcatataccatattacattttctgtcatactatagtctataatacaagtaaccaatcccattaaaggttgctgactgctttctagagaaaaaaatccatttttccctagcagtattaagcatgggatgtgctctaggattggcttatccacatactaagttggaccacaattaatcaaaactacatcattgtgctcgataggaaattttgtgctttcctttttacatatagatcatgtctataggtctcagaaaacttcatcaaatgtactcttgtttcacctacatggaaacatggnnnnnnnnnnnnnnnnnnnnnnnnnnnnnnnnnnnnnnnnnnnnnnnnnnnnnnnnnnnnnnnnnnnnnnnnnnnnnnnnnnnnnnnnnnnnnnnnnnnnnnnnnnnnnnnnnnnnnnnnnnnnnn

SEQ ID NO: 4881 - DNA, 625 bp, Zea mays
  misc_feature (601)..(625): n is a, c, g, or t
  Peptide Sequence Number=SeqID_12570
  Probeset Number=SeqID_19284
tgactaccaggcctttctaatggcatcaagttcatacaacagaacttggtagaattgtccctcactgacgccatccctgtagaatatgatcctctttggtttctgtccagttgccctcccattcccatgtactgtgggatgagaacaactttacggctgatgggttgcaaactctcaccaacaacttgtgttacacgtatgctaggtgcactcgctcagtatcgattgttcctcctgcatattatgctcacctggcagctttccgagttcgtttttacatggagccggatacctctgccagtggtgtttatggcgagtggtgttacgacaaaccgtgccccaggaggggcacgcaaccccagggctggtgttggaaatgtttccgtgaggcctttaccggccttcaaggaaaacgtgaagcgtgtcatgttctattgctaaaattgacgctgtgagcaagcaattatcgggctttacttaagacttttgagtatttttccaagtacctgccctgttttggtgatggtggccccctgttatgcccccctgaagttaataatcagagctgtgaattggagctcccttttataaatctggtatnnnnnnnnnnnnnnnnnnnnnnnnn

SEQ ID NO: 4882 - DNA, 1359 bp, Zea mays
  misc_feature (1)..(40): n is a, c, g, or t
  misc_feature (1334)..(1359): n is a, c, g, or t
  Peptide Sequence Number=SeqID_12571
  Probeset Number=SeqID_19285
nnnnnnnnnnnnnnnnnnnnnnnnnnnnnnnnnnnnnnnnaactaaaatttactaccattgtcgttgaaccaattagcagtaccatcacatactagaagttcaaaattgggactctcttcttgttgagtaacagaattgcaaattcagctaaaataacttcgagttctctctctatttcatactagagcagcagcggagaaactgcaaccttaaactttcggcatgccatcacaacgcgatgctctattccagcaatgcaaatttgggcggacttggtcccctctgagaccaaaggagagaagcatccaccccacccagcaagaatttcacctccagctgctcgggaagaaggtatgaatgctatagccagtcttccagttatctaagtagatcaccttcctaacatccaccaccagaccaccacgggacctcgtggattccttttggttttcctgtgccgagtgccaaaatcgaggggggggcttgtttttgattggctcggtctcccgctgtctcgtgatctgatttgctgtaaccattccggctctgatctgttgtagtaatcatcaggaaaggaaagggttgaaccatgagcgccgtggctgtttcgtcgtcgctgaacccggacgcgccgctcttcatcccggcggcgctgctgcaggtggaggacttctcgccgcagtggtgggacctcatcaccaccactgcctggttccgcgaccactggtcccgcgagcgcgcccacctggacgagatggccgagcagatcgacgcggccggcctccttcccgacgacgaagacctcttctacgacgaccagcccgagcagggccccgccgccgccgcccttaagacaggtactgatgtctctctctctctctcttactctcccctcgattttagatttgcctgaaggacgaatcgtagtgagctcacgttggtgtgtttttctccgccagatccggtgctcaaggcgctgaacatgacctccccgaagggcggcggcgacgccccgcgggggttccgggagaaacccaggaacgccgagaagccgaccaagtacgccggcagccccaagagcagcgccccccgcgtgatccaccagcctcgctaggttcgctgggggaactcatcaggaaggctgctgcccctcttgcagccttgctcctggctgccgcctctgtcgtggtctgctctttcaagtcgaagtaacggtggttcgagttagtgaatagtgtggctcaactgtagaagttccttttgtatagcaagcaagtaaaaaaaatgaccaaaaaatataacaaaatgcagctgttagtttactgctgctctnnnnnnnnnnnnnnnnnnnnnnnnnn

SEQ ID NO: 4883 - DNA, 637 bp, Zea mays
  misc_feature (1)..(36): n is a, c, g, or t
  misc_feature (637)..(637): n is a, c, g, or t
  Peptide Sequence Number=SeqID_12572
  Probeset Number=SeqID_19286
nnnnnnnnnnnnnnnnnnnnnnnnnnnnnnnnnnnngaaagggctccggtgtatagagagggcctcgcgctccgctcctccctgcacctcatccccttcccctgctccccctcacacgacgtgcggcggtgcgaggaccggccctggcaccagcgcccccggtgcctggagcagtgcagggaggaggagcgggagaagcggcaagagcggagcaggcacgaggccgacgatcgtagcggcgagggctcgtcggaggatgagcgcgagcgcgagcaggagaaggaggagaagcagaaggaccggcggctgtacgtgttcgaccggcgcagcttccgtcgcgtggtccggagcgagcaggggtccctgagggtgctccggccgttcgacaaggtgtccaggctcttccgcggcatccgggactaccgcgtggcggtcctggaggcgaacccgcgctcgttcgtggtgcccatccacaccgatgcgcatttggagataaaatcccagctgcataagtttttttaaggtaacactaaacctaacttacttttattttgtccttacaggtctacatgctgctaagtttcttttgttttttaaccagacttaattcaaccgcttatttttttaaaatagacan

SEQ ID NO: 4884 - DNA, 586 bp, Zea mays
  Peptide Sequence Number=SeqID_12573
  Probeset Number=SeqID_19287
cccacgcagtccgcccacgcgtccgcccacgcgtccgggaaccataatcgcgttctaaagactgggagggaagctcctccgccatgcccctgtcctctactcaaatccggcggcggcggacagggcaaccgccactgctgctgggatccgtgcgtcagcggtaactaccggcgagcagcgaacctggagataactccctgcagcaaggagatggacggactcgcccaaactgctcgtaggtcggatgctagcggccacggatccgccatgcggcggggtcaaccatgtcgtcgactccatagccgaagagcccgttgctgaggatcttggtgagcagcaggttgaagtagctgagcaggagctcattgaaggagaagagcaggtggttcaggaggagccacaaggcgaggagtatgatctgatctaggtggcgtttctcagttgacattggcgccgacgatccttagttcgttttatattcattattttagtttgtagtaagtcttctgctatgtaataaatactttgatgttattgtgacatttatctctatacactctgttattataaaaaaaaaaaaaaaaaa

SEQ ID NO: 4885 - DNA, 1189 bp, Zea mays
  misc_feature (1)..(14): n is a, c, g, or t
  misc_feature (1104)..(1104): n is a, c, g, or t
  misc_feature (1189)..(1189): n is a, c, g, or t
  Probeset Number=SeqID_19288
nnnnnnnnnnnnnnggccgggccgggaagctgtgatgaaaagacctgcactggtgggtccagtgcgatcttctgatcttgtgatgtgtctcgctactctgagcttgaaaagaaagaaggcaagagttctcggcttctcgcgagtcgcgagtcgcgacagagaaagaggtcgagaaagaggcggagttgcggagaatatgcagagcagcatccatgaagagggagatcagcgagggcccacgacaccattcgcttcggagatcaacgccgggcgtcaaagccgacctcgccccgccgcgacccgctccagtctaccatccaatcggagaccaagttctgggcggacaagaagaagttcgggacagatgccatatacggatccgccctcaacatccgcaaggatctcgatgcccaaatcctctccaggttccaaaggccccctggtgctttgccgtcatctctgcttggatacgaggcactcgacaggttccctggatgattttggatttgaagattatcttaacatgcctcatgattctgacagtttccgtcaacctgacatgcaccatggaatggagcgttcgcccttggtttgtccaaggggacctatctgtcctagcttcaattgaggcagtaatgtaattctgctgcaagttcacctctcagtccagtacttcagtcaatagaccatattaagatggtgaaatatgaaaactggtagcttgcatctgttcaatgttatgttttaatcaacgctgaatttaatatttgtcaagtttgaactttgacacctactttttctggtttccttgccactgcgaggccatggaagcgaccaaatttatatatgtttgatgcgggttgtccatggttgccaaaaaaaaaaaaaaaaaaaagcaacacgttcgcggccaggatccacaggatgctcaagctcggcctcaacatcgacgaggacgctgctgccgacgaggacgccgacatgcccgcgcttgacgagggcgccgccgaggagagcaagatggaggaggtcgactgaggtgtccttctttcctatatatgcaagttctcagcgatgagggacgacggtcaatggcgatgcctngtttgtgtgtgtctggcgtgtgggtccaaaggggacactgttggtacaggtcacaagtagtgtcctagtagtaccttgattgccn

SEQ ID NO: 4886 - DNA, 1249 bp, Zea mays
  misc_feature (1)..(146): n is a, c, g, or t
  misc_feature (1249)..(1249): n is a, c, g, or t
  Peptide Sequence Number=SeqID_12574
  Probeset Number=SeqID_19289
nnnnnnnnnnnnnnnnnnnnnnnnnnnnnnnnnnnnnnnnnnnnnnnnnnnnnnnnnnnnnnnnnnnnnnnnnnnnnnnnnnnnnnnnnnnnnnnnnnnnnnnnnnnnnnnnnnnnnnnnnnnnnnnnnnnnnnnnnnnnnnnnnncttcgcgccgctccgccccgtcctcgccaacctgcaggaggtgttcctcggcaccaagctcgccgtgctattccggccggaatttccgctacaccacccgcctccggctccaccaccacagagacgcagcagacatcgcatcggaaatcaggagatggatcgtctgcccgagtcgacccggagcatgaggaagtacgcgtcggaggccggcgggcttcgcgcggcgcggcagggcccccacgggcggtcgctgacggcgcgcacggcgcacagcatgtccacgacggcgctgcgcaccaagtccaagtcggccgcgtcgctgctgcgcagggtgcccttcgcgccgctccgccccgtcctcgccaacctgcaggaggtgttcctcggcaccaagctcgccatcgccgcccagtgcgcgcacttcggccaggtaatcgatccatccctcagaccctctgtacggccttgctcctcgcatttattcctatcctgcacggcgtggggtctctctgtagcctgtgcggatcacatgcgatccattcgtgttcaaataaaacccggtcgaaatttgaattggaactgccagcctcgctcactcactgtcactggcatggcaggtgtgggtgtttacgctcagcctactcggcctcatccccctcgccgagcgtgtcagcttcctcaccgagtaagcccctctctctctctctctctctcttcagctttttttaattaatttgccttatcttcttcaatcatgagtgtttttatgttctctttgtcgttcgttcctgcaggcagatcgcgatatacaccggccccaccggtaagtcacggacgtcgtcagttcaagctgtgttttttttccaagcctaacgctagcttctgctgctgttctgctgctgcatggcgcgtgtgcagtgggcggcggcggcacgtgaggtcatctgcagtctgcttcttggctacgtgcagtatgactgcgtgagagcatcgagcatagattccatgatgatagagtatcatagtatgcagacatacaagtactgtcagtattgtggaattgcagtttgtatgatatggtagtgttacaactttagattgtn

SEQ ID NO: 4887 - DNA, 827 bp, Zea mays
  misc_feature (1)..(59): n is a, c, g, or t
  misc_feature (767)..(827): n is a, c, g, or t
  Peptide Sequence Number=SeqID_12575
  Probeset Number=SeqID_19290
nnnnnnnnnnnnnnnnnnnnnnnnnnnnnnnnnnnnnnnnnnnnnnnnnnnnnnnnnnncgagccgcccaagatcccgatccccactgcgctggttgccggagctctagccggattcgcctcaaccttgtgcacctaccccatggagctgatcaagaccagggtcaccatcgagaaggacgcgtacggcaacgtcgcgcacgcgttcgtgaagatcctacgcgacgagggcccgtcggagctgtaccgtgggctgacacccagcctgatcggcgtggggccgtacgcggactgtaacttctacgcctacgagacgctgaagcggttctaccgttgtgcgaccgggcgagttcactgcgcggacgtgggccccgaggcgacgctgctgataaaaccccgggggggcgcaattacagctcgggcacgttcccgctagatgtggcccgcaagcaaatgcaagtgggccctgtcggctggaggttcgtataccagaacgtccttcacggtatatagtgcatccccatgaaggagggcaccaaccgcctgtaccgaggtctcggccctagctacatcaagctcatgcccgccgccgtcatcatcttcatgtgctacgaggcttgcaagaagatccttttttacaatgaggttgatttttattatttctttttaattttattgtggggggggttggtttatttttttctttttattcatattatttttttacatatttatatttattatattatatatataattttatttttnnnnnnnnnnnnnnnnnnnnnnnnnnnnnnnnnnnnnnnnnnnnnnnnnnnnnnnnnnnnn

SEQ ID NO: 4888 - DNA, 865 bp, Zea mays
  misc_feature (865)..(865): n is a, c, g, or t
  Peptide Sequence Number=SeqID_12576
  Probeset Number=SeqID_19291
tcgccggcgaccttcgctccggccttgatgtgggtgcccagttcctcgctgggcagcgccgagcgtaccccgaaaaggtcgcgctctcgccggtcaagtctggaggacgagctgctcagaatgcgtcgtcagcattgagagaagtcatgggctcctacacaaatgcaatcggccgtcgtctacgtctcgaccaacgaacgccatagcgcagctgatcgagagagagaacagaagggaggagagagggcctcgccggcgaccttcgctccggccttgatgtgggtgcccagttcctcgctgggcagtgccgagcgtacaccgagaaggtcgcgctctcgccggtcaagtctggaggacgagctgctcagaatgcgtcgtcagcattgagagaagtcatgggctcctacacaaatgcaatccgccgtcgtctacgtctcgaccaacgcgtgaggttacgagccacctgaagaacaagttggtagctggaatctcaagtcccaggtcaagaacaggtaccgcaggatgaggcgcttggaggatgctgcgatgtgttcgtgagaggtctaggtcgtcgtctcccagtcaactttgggttgctggaccgttgtctccatataatgtaataatttatttactttgtacagaactccgattatatagtaaagatgtgacattcgatccaaaaaaaaaaaaaaaaatttgcggactaggaacaatgccctgccgtgcgccgcatcggccacttcgatgtgtgcgaacccctgtcttcggccggcgtcgcgctgcctaggcgcatgccccagccattaccacgaagacgcctgccctcacttttgcctgcatgccgccatgcatgtactcaatn

SEQ ID NO: 4889 - DNA, 1126 bp, Zea mays
  misc_feature (1)..(1): n is a, c, g, or t
  misc_feature (1099)..(1126): n is a, c, g, or t
  Probeset Number=SeqID_19292
naaaaaaactgggctatatatttgaggagttgaaattatatcaggaagtgaaaaaaaattaagtacaatgcacaatcgacaagacaacccaacgatcatctattcatcttcttagcattatcccacatcacagttcacagagttcaagcaaacaccttcagctactagataccagacactgaacaaaactactctcgtagtccacacctcaaaccagctaacattacaattgtatatatgaacccaacctccacacaccaacccaggaggacatacatagccgagcagatggaaacaaagaacacgcaaccacgccaggatccaagcgcaaacgtagcgcacgtccagagccactctatgcgcatagcaccttattgatacagcacggcaccatgagctttcaacatgctagaatacaacctatgccacgtagtagataggggggaacaatgcacatagtggcacctacaatatatcacagcagaggtaaacccgcaactcatccccgttcccctcttgatttcgtcttctctcctccctgcctctaccttattataggtgaagagatgcttgtcaaggagcaaatcaagtgtgagggtccacccggttcacgcttctaaggtaggagggtggctggtcgtccctgtagcgggttgccctctcatatgcgtcggatgatgttttccttctagatcggcccccagcgccggcaaccggcgatatgggcggggtagttccaatgtgtagaggccggtggcgtgcttgctccgctcctcgtcgtgggcgttcatgtcgcggttgcagcttgatcatcgtcgtgctcgtcgccttcgccggcgtatcctaggtcgttggcgccgcggagggcgagcgcgctgcctctcctcgtcggagaggcgctcgctgatgcgggcgttctggtcgcccgcgtgcttcttcagcacgcgcctcagcaggctgtccgccgccggccgccgccgacgcgtggtgcgagggcctggagcagcgccccggcaaggagcgctagggtcacgccgcggggtcccatggtcgcgcatcagtagccgagggcgagcagcacaagagaaaggtagcaccnnnnnnnnnnnnnnnnnnnnnnnnnnnn

SEQ ID NO: 4890 - DNA, 3905 bp, Zea mays
  misc_feature (1)..(50): n is a, c, g, or t
  misc_feature (3883)..(3905): n is a, c, g, or t
  Peptide Sequence Number=SeqID_12577
  Probeset Number=SeqID_19293
nnnnnnnnnnnnnnnnnnnnnnnnnnnnnnnnnnnnnnnnnnnnnnnnnncacccctgccgtcgccgccgccctacgcttggtgcctaggtcttcatcggatcgttcaccgagcacaagcatcacccagcagggtttcttgccctatctgtttaagactgggatcgtgaggcttctcccccgccggaccaacgtgcctgttgccggcgtcgcccctcccccaccagtgaaactcgcggtctctccaccgcacgcacctcgtgtagttgtggccgcgtgcaccccctgtagccccggcgttaggtcctactgctccatccggaaaagatccataagaaacgtcaccatcacacagatgaggtgtgctctctgagggctctcaaagacgtttctaagaagtctcggtggcatcgcagtgatcacaagaaatcgaggaaccaggcacacggcgccgttgcaaatagggaaaatcggcacaagcgatctgacaaggacccaggtactagtaaagcaaatggagtacaggagagtgaagagtgggaagtaggagaggcaggggaggtctactagcgtttcggttttctatcgagattgtgagcatatgccgggggataacgttggcatgccagcgcaaatgccacattttccacaacctgggcagcacatgcctcactcaaatcaagttccacctgtatcacaaggggttcccatggtatatcagccagctagaccaatgtcatcagcacctatgcaacaacagcaacaaactgcgtatgctgggggccatttgctcaccatgggtgctcctatgcaacccctgacctatacatatcaaccaacatcgatccctcctgtagtgcaaccctggagtacaggcccaggacagagtgtaactcatgtgcctcctctagtgcagtctgggcaccagcaggtgtcagctccaacgactttgcctcctgtcaacttgtctgaacctagctcttcagattggcaggagcacactgcagccgagggaaaaaagtactactataataagaagacaaggcaatcaagttgggagaaaccagttgagttgatgacacctttggagagggctgatgcctcaactgaatggaaagaatttactacaccagaaggacggaagtactatttcaacaaagtgaccaagcaatcaaaatggactattcctgacgagttaaaggttgcacgtgaattggcagagaacacatcaaatcaacaacctgatcgagaatcaggaatagctactagtgctcttgtcagatctgctgcctttgaaccttctactgcacctgctaatcagtcgtcatctgctgttggtataattgcttccagcacacatgatggatcatcaaactctgttctttctggtgctcccctgccgcacaatgtggagaatacttccagttctattgttggcatgcaaaatggtggttcgagtactgctgttgttcctgttgcagcaagcacagaagttccattagttgcaacagatgcagggtccagcagaaacaacgatgaaaattcatctctgaccactggggctgacgcagaggatggtacatccgctgaagatttggtggaggccaaaaagaccatgccagttgcagggaagattaatgtcactccagtggaggagaaaacaagtgaagaagaacctgtagtctatgccactaagatggaagcaaaaaatgcgttcaagtccctgcttgagtcggtaaatgtggagtctgattggacatgggatcagactatgagagtcatcataaatgacaaaagatatggtgctttgaaaactcttggagagagaaagcaagctttcaatgagtacttgaaccagcgcaaaaagtttgaagccgaagaaaaacgtatcaaacagaggaaagcacgtgatgatttccttgcaatgttggaagaaagcaaggagcttacatcatcaacaagatggagcaaagcaatacttatgtttgaagatgatgaaagattcaaagcagttgagcgtccaagggagcgtgaagatttatttgagaactatcttgtggaactgcataagaaggaaaaagccaaggctgctgaagaacacaaaagatatgtagcagaatacagagcttttctagaatcatgtgacttcatcaaggcaagcactcagtggagaaaagttcaggaacgcctggaggacgatgaacgttattcccgacttgagaagtttgatcggttggatatttttcaagagtacattcgacacctagagaaagaagaggaagagcagaagcgggtacaaaaggatcaagtgagaagacaagagaggaaaaaccgtgatgggtttcgtaaaatgctggaagaacatgttgctgatggcacacttaatgcaagaactcggtggcgtgattactgtgcacagataaaagattcacagtcctacttggctgtagcatcaaacacatctggctctacaccgaaagagttatttgatgacgtgatcgaggaacttggcaaacagtatcaagaagacaagacccaaattaaagaagtggtgaaatctggaaagattcctatgacaacttcatggacattagaggaattccaaactgctactctggaggatgatgctcttaaaggaatatcaaccatcaacatcaagcttgtatatgacgatcagcttgaaaggctcaaggaaaaagagcaaaaggaggctaagaagcgccagcgcttgggtgaaaatttttcagatcttttgtattccatcaaggaaatatcagcttcttcaacatgggatgattctaaacagcttttcgaggatagccaagagttcagggccttggacagtgagacttatgctagagagctttttgaagagtgcgttgtccacctgaaagaaaggttaaaagagaaagaacgtttgagggaggaagaaaaggcaaaaagagagaaagagcgtgaggagaaagagaagaagaaagagaaagagaaagaaaggaaggagaaagaacgcaaagaaaaagaaagagaccaccgggaggagagagaaaaggagaaagggaaggatcgatcaaggagagatgaaatggagtttgatggtgctgatttgaacacccatggtcctgaaagaaagaataaaagagaagaaacatttgagggaggaagaaaaggcaaaaagagaggaagagcgtgaggagaaagagaagaagaaagagaaagagaagaaaaggaaggggcatgaacgcaatgataaaaagagagacaggaagcaggcacatggctcagattcagatagtgaaaaccggcacaaaagacataaaaaggaccgagatagtagtagaagaaatggagcacatgagctggaagatggtgaacttggagaggatggggagatctattagtctttctgtttgctaccgagattgtcagtaattacttccccttgtcatgttctccattgctcttatttttcttacttttgaaggcttttaagcagtgatcgcaagaaatctaggaagcatgctcatgtagctcattcagatagtgaaaaccggcacaaaagacataaaaaggaccgagatagtagtagaagaaatggagcacatgagctggaagatggtgaacttggagaggatggggagatctattagtctttctgtttgctaccgagattgtcagtaattacttccccttgtcatgttctccattgctcttatttttcttacttttgactttttattagtgctttggcgtaacaatcactagtgttatagttatttagttccatacattctgaaatatttccttaaatatctacatttcttcaataccaattgtcgtttctttaaaaaaaaaaaaaaaaaaaaaaaaaaaaaaaaaaaaaaaannnnnnnnnnnnnnnnnnnnnnn

SEQ ID NO: 4891 - DNA, 784 bp, Zea mays
  Peptide Sequence Number=SeqID_12578
  Probeset Number=SeqID_19294
cccacgcgtccgagcaaggctcgggtgagcaagctgaaccaatcttgatggtcagcacgctacaacacgttgagcttgaacacaatacatcatgtagatatgaaaggatttgtcgtttgtcattagagatacaaatgagctggaccgaaaggctcgagagggcaagaccgttgtcctcggctggaccggcggcatgagcgtccaggcccagtagcacctccccgataggcgcagccgcggaggccaaactcgcagggaccatctgtggcagcaggggtacagcgagatggggaagatgggcggtctgagcaccacggacgagtccggcgtggagcgcgccggcagggagggcgccaacatcgacgagtccaagttcaccaagtagtcctatcgacatgtgcgtgcgcgtacgcagcgttcgtagctgtctgcgtagtgtaccttggccgctagctagtgctactctctactttggagtagctgactgattataatgtagctagcagcatgcatgtaggcgatcatacgtacgtacgtacatgcacgtacgtgtgtgcgttatcatgtatgcttccagaagggtatcctagcttaatcagtcacgtcgtcaagtcgtcaatatggcaggttcgcgtcagggctttgtagtttgatagcctgtttcacgactcctcaataatcaagtagtgtaatgaaagtttggcggttcacaaaaaaaaaaaaagaacctacggtaaaagaaccacgccgtgctggctctccaaggagccgccgatgcctaact

SEQ ID NO: 4892 - DNA, 902 bp, Zea mays
  misc_feature (1)..(2): n is a, c, g, or t
  misc_feature (902)..(902): n is a, c, g, or t
  Peptide Sequence Number=SeqID_12579
  Probeset Number=SeqID_19295
nnggaagctagctcattattataagctaaataaagtatatcggcgtcgctgtgtgtgttgcgagtcgggcagtcagttagttgcgtgccatggctggcatgctctgagtctgagatgatgatgatgcctgatggcggcgtcgtgtcctgtagtcctcccctgccccctcgggcgcttctggcggcgagcagtgtgttgtgttgtgttgtgtgggtgcggggggggagcaggctattcatttgccctgctgtgttgtgtcaccatccatctataataatcttatatctaaaaaaaaaaaaaaaaaaaaaaaaaaaaaaaaaaaaaaaaaaaaaaaaaaaaaaaaaaatcacgccgcccgccctttttcggccgttgccgagagctcgttccgacccaccgccgatggcgacggcaatgggcgcgatggccgccacctgcatggcctagatcccggccgccgttacgttccccggtgatctcggagtaggacgaccccgagcggttgtaccagggtggacaaacggtgggagaatgatgggtgctaccccgatcgcccggaggccgttcctgttacctggaatcattctgggagactcggggtggcgacaaccgctcctacctacacagaaatgccacaatgctcacaacaacatcctgtgtccaccgtcagccgatggatatcaatgcccaactatgcaatcctacatggcacatgaggccatacaagcaagcatcttacagtcattagcattaaccctccaacaaccatatgctctattgcaacagccatccttagtgcatctgtatcttcaaagaatcgcggcacaacaactacaacaacagttgctaccaacaatcaatcaaggtgttgcagcgaaccttgctggttaccttcagcaacn

SEQ ID NO: 4893 - DNA, 1127 bp, Zea mays
  misc_feature (1)..(483): n is a, c, g, or t
  misc_feature (716)..(716): n is a, c, g, or t
  Peptide Sequence Number=SeqID_12580
  Probeset Number=SeqID_19296
nnnnnnnnnnnnnnnnnnnnnnnnnnnnnnnnnnnnnnnnnnnnnnnnnnnnnnnnnnnnnnnnnnnnnnnnnnnnnnnnnnnnnnnnnnnnnnnnnnnnnnnnnnnnnnnnnnnnnnnnnnnnnnnnnnnnnnnnnnnnnnnnnnnnnnnnnnnnnnnnnnnnnnnnnnnnnnnnnnnnnnnnnnnnnnnnnnnnnnnnnnnnnnnnnnnnnnnnnnnnnnnnnnnnnnnnnnnnnnnnnnnnnnnnnnnnnnnnnnnnnnnnnnnnnnnnnnnnnnnnnnnnnnnnnnnnnnnnnnnnnnnnnnnnnnnnnnnnnnnnnnnnnnnnnnnnnnnnnnnnnnnnnnnnnnnnnnnnnnnnnnnnnnnnnnnnnnnnnnnnnnnnnnnnnnnnnnnnnnnnnnnnnnnnnnnnnnnnnnnnnnnnnnnnnnnnnnnnnnnnnnnnnnnnnnnnnnnnnnnnnnnnnnnnnnnnnnnnnnnnnnnacgccgattaattaaatgcctaatcatgtgtatatgtgtgtgcttatgcgtgtgatttttttgtggaggagaaacacctgaggcagttgggtggagaagaataaagaaagctctcgcgcatcacacacctagcgctcgacggaatgattgagttttaatcgtcgtcgtttcctttatttggtttagtatggtgcgctagttgatcacgtgatgcggaagtcaagctgagtcgnccgcgagatgctgttaagcgtgtgtttcttcgcaagggatgctgatgaatgaacttgaagatttgcatgatcggatcaagcgctaggatgtgagatgctcgccaagtggatgtcaattaacaacactaacatagtgtttatcgcaggattataagtttgttctgttgtggatgctgctaagtgccagtggtctcgaccttcttatataagtatatcccatctttagcttctttattgaggattgtcacttaagctagcatgtattttaaaacctgtaaatattttatacattttacattgtaattcttttgaatcactttcttttgtaatcactccgataattgtctaatgtaaacttattgtatctatgatatcatttttcttataaagcatttatttccgctgcaaaaa

SEQ ID NO: 4894 - DNA, 1275 bp, Zea mays
  misc_feature (1)..(176): n is a, c, g, or t
  Probeset Number=SeqID_19297
nnnnnnnnnnnnnnnnnnnnnnnnnnnnnnnnnnnnnnnnnnnnnnnnnnnnnnnnnnnnnnnnnnnnnnnnnnnnnnnnnnnnnnnnnnnnnnnnnnnnnnnnnnnnnnnnnnnnnnnnnnnnnnnnnnnnnnnnnnnnnnnnnnnnnnnnnnnnnnnnnnnnnnnnnnnnnnnnattattcgttgtcagtagtcgcagctgacggacgactgaaccaccgacagacaacatggccgcctccgcctccaccgtctccgggcctcggccgggcggcctccctgggccaggccggcccggcggttctcgcaccagcttcacgcggggcagcccgggtgctcgggcgagggaacccccctgatgagcaggaacctggagaggaatggcaggatcacctgcatgacggtttccccggcgactggctgcggaggccacctgagcgtcatcggcttcgggctcatcggctggatggggccgtccagcgtcccggccatcaacggcaacagcctcacggggctcttcttctccagcatcggccaggagctggcccacttccccacggcccccgcccgtcacctcccagcctctggcctggtggctagtgcacgtggcacctgggcctgttcatcgtgctcacccttcggccagatcggattcaagggcaggaccgaggactacttcgagaaagtgaagcgggttaagatcctatccatcatccctggtgctgcgctgccattgcggttgcgtgcgtgctcgccgcaatcgaacctttgctgtataggggttcccgattttcgtcgaatgtaatgtatgatgctactttttgcgcttcaatataaaaatctatggcccgccccgggccccaaaaaaaaaaaaaaaaaaaaaaaaaaaaaaaaaaaaaaaaaaaaaaaaaaaaaaaaaaaaaaaaaaaaaaaaaaaaaaaaaaaaaaaaaaaaaaaaaaaaaaaaaaaaaaaaaaaaaaaaaaaaaaaaaaaaaaaaaaaaaaaaaaaaaaaaaaaaaggccccaatgcaaatttaacctttataaaaaaaggaaaacccccggggggggcccagtccccaacaccttttataataagggggacccccgggggggggccggtaaccaatttgccctaaagggacggggaaaaacggggggtaaccggccacatttttccaccgatggggggggaaaaccccggggggccccgaatttaaaaggccagcaccaatcccccttacccccggggggggaaaaagaaagaaggccgg

SEQ ID NO: 4895 - DNA, 3661 bp, Zea mays
  misc_feature (3661)..(3661): n is a, c, g, or t
  Peptide Sequence Number=SeqID_12581
  Probeset Number=SeqID_19298
attgggaccctcgaggccggccgggccctttctcttgcccctgcccctctcccctatttctctatttctttccccctctcgcctcgccgcgcctgcgccaggtcgtcgacgccatggtcgtcgagatgcacgccggcctcgcgtccgacggcggcagcaagctcaagatgctgctcaccttcgtcgacgcgctccccgccggaaatgaagaaggcacatattattccatagatctcggaggaacaaactttagagtgttaagagttgaagttggtgctgggtctgtggtcacccgtcggaaggttgaacttcccatccctgaggaattgaccaagggtacaattgaggagttattcaactttgttgccatgactctaaaggagtttgtagaaacagaagatgggaaagatgaacaacgagcgcttggtttcacattttctttcccagttagacaaacatcagtatcttcggggtcattgattaggtggaataaagggtttttgattgaagatgcggttgggaaagatgtggctcaatgcttaaatgaagctcttgctaggaatggactaaatgtgcgagttactgcactggtgaatgacaccgtggggacattagctctaggacattatcacgatgaggatacagtggctgctgtgatcattggtgctggcaccaatgcttgctatattgaacgcactgatgcaattattaaatgtcagggtcttcttacaaactctggtggcatggtagtaaacatggaatggggcaatttctggtcatcacatttgccaagaactccttatgacatctcccttgatgatgagacgcaaaatcgcaatgatcaggggtttgaaaaaatgatatctgggatttatcttgggtaaattgcaaggctggtgctgcatcgaatggctctagaatcagatgtttttggtgacgctgctgataatctatgtacccccttcacattgagcacaccacttctcgctgcaattcgcaaggacgattcaccagatctgagcgaagtcaggaagatactgcaagaacatctgaagataccggacactcctctgaaaactcgaaggctggttgtcaaagtgtgcgacatcgtcacccggagagctgcccgcctagccgccgctggtattgtcgggatactgaaaaagctcggccgtgatgggagcggtgttgcttcaagcgggagaacgggagggcagatgaggcggacggtggttgccatcgagggtgggctgtacgagggctacccggtgttcagggagtacctagacgaagccctggtggagatcttgggggaggaggtggcgcggacggtggcgctgagggtgacagtggatgggtctggggccggcgctgccctccttgccgccgtacattcgtcgaatagacagcaaggttccatatagggagaagggaagatggtgatacagccccctctgtgcaaatgtaaaaaggaacattatttgatatctatattcatatatataaaatctggtcttgtgcagagaaatacctgttctcctatctcaagcttttatcactcctctgccttgctttgggtacctcgaggccggccggggcgccagcagactctttttaatagccgacctccaccaaggcggacaggaaacccactgttgcagcgcgagtgtagcaggctgcacacacaaggaaggggacaaccacaagcgcctaagatcccgtcctccgcgtcgagatctttgccgaggcggtgaccgtcgagggatcgccatggcgttgagggcgtcccccgtgtcgcatggcaccgcggcagcgccgctgccgcctttcgcgcggaggaggatggcccgtggggtggtggtggccatggcgtccaccatcaacagggtcaaaactgtcaaagaaccctatacccctccacgagaggtacatcgccaaattacccattcactaccacctcaaaagcgggagattttcgattcacttcaaccttgggccaaggataacctactgaacctactgaagccagttgaaaagtcatggcagccacaggacttcctaccagagccttcttctgatgggttttatgatgaagttaaagaactgagggagcgggcaaatgaaatacctgatgaatactttgtttgcttagttggtgatatggttactgaggaagccttacctacataccaaacaatgcttaacactcttgatggagtccgggatgaaactggtgcaagtccaaccacgtgggcggtttggacaagggcatggacagctgaagagaacagacatggtgacctccttaacaagtacatgtaccttactggacgggttgacatgaaacaaattgagaagaccatacaatatctgattggttccggaatggatcctggaactgagaacaacccctacttgggtttcctctacacatcattccaagaaagggcaacatttgtgtcgcatgggaatactgcaaggcatgccaaggagtatggtgatctcaagctggcccagatatgtggcacgatagcagccgatgagaagcgccacgaaacagcctacaccaagatagtcgagaagctcttcgagatggaccctgattacacagtgcttgcgtttgctgacatgatgaggaagaagatcacgatgccagcccatctcatgtacgacggtaaggacgacaacctgttcgagcacttcagcgcggtggcgcagaggctgggcgtctacaccgccaaagactacgccgacatcctcgagttcctggtccagaggtggaaagtcgcggagctcacagggctgtctggagaagggagaagggcgcaggactttgtctgtaccttggcgccgaggatcaggcggctggatgatagagctcaagcgagggcgaagcaagcaccggttattcctttcagttgggtttatgaccgcaaggtgcagctttaatcaagaacgctaggcaatgtgggcatttactacgtatatcattttcagtcctggggttctctataagaaacagtctctaggttatctagcagggtagaattcaactactcgtggatctcactcggtgcaaagtagtgcaaagtacgctatctgttgttaccgtgcaagctgcagagtttggattactatgtgggcctggtggtggagaggaattctgtggggtgcctgcagccagttatgagtggcagctccatcgcaactgagttgttgtattgaatatgttacaggacctatagtaaccgaaagtaataatatggagtttgtatatcgacaagcttgctttggtgattgatgagaatctgaagtaataatatggagtttgcatatcgacaaaaaaaaaaaaaaaaaaaaaaaaaaaaaaagggtcatcctcctccgcgcgaaaggcggcgcgccgcggtgccatgcgacacgggggacgccctcaacgccatggcgatccctcgacagtcaccgcctcggcaaagatctcgacgcggaggacgggatcttaggcgcttgtggttgtccccttccttgtgtctgcagcctgcagcctgtactaggtttacctttttttttcagtgtggaagggaaatatgattctttgtaagtccgagttgctgatgaactgatcttgtgaccacaatggcaaaatgtcatgagtcatgan

SEQ ID NO: 4896 - DNA, 838 bp, Zea mays
  misc_feature (1)..(52): n is a, c, g, or t
  misc_feature (707)..(838): n is a, c, g, or t
  Peptide Sequence Number=SeqID_12582
  Probeset Number=SeqID_19299
nnnnnnnnnnnnnnnnnnnnnnnnnnnnnnnnnnnnnnnnnnnnnnnnnnnngcacgccgccgcttcgtctcacctagagtcgcccgagcacaccgccgcctcctcctctcgcctgagcacgtcgtcacctcctcttgcttggagtcgctcgagcacgccgcctcctcctcttgcctaaagtccctcgagcatgccgacgcctcatctcgcctgaacacgccgacgcctcatcaggtgaggggtgagccacctctgcccgcatcttcatgccccttcgacttttggtttgtcatcgctgagtttcccctagatctagggaagaaagggcggatctcatgtgtgtgggcgtcctactcgagggtggaagaatcctgggcacatgtagggcggatcgcacctatttctcgcacaggcccctctaaccgagcagcaagccaagcaagaacacctgccactcccccctctcggcatgcaattgctggctcgatgacacgctagtggcctctctcaaatcctaaccttacttgcctccttggttctttcttgtgcttcatgtagctcttgcaacatccaactctaaactgggaggcacacaatccactcatcaacctcagtaggagcaccacgaagtggtacaggtggagtagttcaacctcagcaagagctagctgcaggtgttggtgttcctactctcatcgacacagannnnnnnnnnnnnnnnnnnnnnnnnnnnnnnnnnnnnnnnnnnnnnnnnnnnnnnnnnnnnnnnnnnnnnnnnnnnnnnnnnnnnnnnnnnnnnnnnnnnnnnnnnnnnnnnnnnnnnnnnnnnnnnnnnnn

SEQ ID NO: 4897 - DNA, 786 bp, Zea mays
  misc_feature (786)..(786): n is a, c, g, or t
  Probeset Number=SeqID_19300
tggaaagcatcgccggctcgccgccaaactcgctgccacgtcggtccgagccaaatccagcacctctctcccctcccccttcctcccgtcccccgtcgaccgtcgcatcgcaccctatcctccccagtccccaccagtccaccaccctctccccgcctcccgctgcgaccaccgcacccgcgaacttggcgggccgctcggcgctgcacaccaagccggggatggccgccgcgcttgcgagctcgccgcttgttcacctaactacctcccgcctccgcctccccaggccccaggcctccgcttccagttcgggtccagtctgctcgatcggcgtgtgcttgggatggaggctcaaggtcgggtggagagccctgaggcggcgcgaccggcttcgatgcttctccaccgacgggggcggcggggaggagggggaaaagcgtggcgaggaggaggcatcggcaacggcggcggcatccccggcctcggttccagcggagacacaggtgggcgctggggaggagctggcgtccgagcggagtcggtcaggggagcttttcttcctcgtcctcgtcgtccgggactcctggtgtatcaagtgagccaccgctgttgagttttagtgttgataatatcgatacagttaaaactgttggaacttctaggcccagaaaaggttgatccaggtgatgtcacagcaatttaaggaaaaactttttggttatacgacatttttggttgacagagagaagaaccttttggtgatcttggtggagggagttcttttcn

SEQ ID NO: 4898 - DNA, 1472 bp, Zea mays
  misc_feature (1)..(762): n is a, c, g, or t
  misc_feature (1431)..(1472): n is a, c, g, or t
  Peptide Sequence Number=SeqID_12583
  Probeset Number=SeqID_19301
nnnnnnnnnnnnnnnnnnnnnnnnnnnnnnnnnnnnnnnnnnnnnnnnnnnnnnnnnnnnnnnnnnnnnnnnnnnnnnnnnnnnnnnnnnnnnnnnnnnnnnnnnnnnnnnnnnnnnnnnnnnnnnnnnnnnnnnnnnnnnnnnnnnnnnnnnnnnnnnnnnnnnnnnnnnnnnnnnnnnnnnnnnnnnnnnnnnnnnnnnnnnnnnnnnnnnnnnnnnnnnnnnnnnnnnnnnnnnnnnnnnnnnnnnnnnnnnnnnnnnnnnnnnnnnnnnnnnnnnnnnnnnnnnnnnnnnnnnnnnnnnnnnnnnnnnnnnnnnnnnnnnnnnnnnnnnnnnnnnnnnnnnnnnnnnnnnnnnnnnnnnnnnnnnnnnnnnnnnnnnnnnnnnnnnnnnnnnnnnnnnnnnnnnnnnnnnnnnnnnnnnnnnnnnnnnnnnnnnnnnnnnnnnnnnnnnnnnnnnnnnnnnnnnnnnnnnnnnnnnnnnnnnnnnnnnnnnnnnnnnnnnnnnnnnnnnnnnnnnnnnnnnnnnnnnnnnnnnnnnnnnnnnnnnnnnnnnnnnnnnnnnnnnnnnnnnnnnnnnnnnnnnnnnnnnnnnnnnnnnnnnnnnnnnnnnnnnnnnnnnnnnnnnnnnnnnnnnnnnnnnnnnnnnnnnnnnnnnnnnnnnnnnnnnnnnnnnnnnnnnnnnnnnnnnnnnnnnnnnnnnnnnnnnnnnnnnnnnnnnnnnnnnnnnnnnnnnnnnnnnnnnnnnnnnnnnnnnnnnnnngccgtgctcctactgcttcctatgcgcgtagccgtgtctactcctttcctcgccgtagtccctgcgcgcgtcgagctttcgtgtcgagctgttgaacatgtcctcccttgcttgtgactttgtcgtcgctagaacccctcactagattcgtgtcatcgccagctcgctccaaaaatgatctcgtcgtcgttccgtgagtcatcaagaaatctcgaaaattgggtgaagacgaagctagcagcattgtatttcccaagtgctcgacacaagagctgaaccagaatccttgccgtgttcacggatagcgcgtcagatttagaatggtacgttaattaatcacgtgatacggaagacgatccaagtcaaccccaagtgcggccggactactccgcctgaagatactgatggacgaacccgcctaatcaagtgctaggacaaggatgatcgtcaagtggacgtcacctaacaacactaacctagtgttactcaggttttaattttgtgctgctgttgatggtgttaagtgccggtgggctcggccttcttataagtctaagtacttcttctatacttcttattgaggatggtcacttgagctagcatatatttcaaacttatacttttgtaatcactccgataaaataatgaaaaatttttgtaacctataannnnnnnnnnnnnnnnnnnnnnnnnnnnnnnnnnnnnnnnnn

SEQ ID NO: 4899 - DNA, 1230 bp, Zea mays
  misc_feature (1)..(218): n is a, c, g, or t
  misc_feature (291)..(291): n is a, c, g, or t
  misc_feature (1108)..(1230): n is a, c, g, or t
  Probeset Number=SeqID_19302
nnnnnnnnnnnnnnnnnnnnnnnnnnnnnnnnnnnnnnnnnnnnnnnnnnnnnnnnnnnnnnnnnnnnnnnnnnnnnnnnnnnnnnnnnnnnnnnnnnnnnnnnnnnnnnnnnnnnnnnnnnnnnnnnnnnnnnnnnnnnnnnnnnnnnnnnnnnnnnnnnnnnnnnnnnnnnnnnnnnnnnnnnnnnnnnnnnnnnnnnnnnnnnnnnnnnnnnnnnatcccaaccatgctcccaataaaagtatccgtgcaggtagaggtcatccttcctcaggatcaacctgagctanggcataagtgcaaaggacaaactctatctgcctataagcagggctaagcatttttttgtaaatcatattttgatacttcaccagaagtatctatataggtatggatatcaaggtaggcaatgcatcaaagggtttccaagcaactcctataaacctaatgcacattcactagacttaagtgtgcgaaaagtatttaaaaacaaggaaggggttgcatgcaccggggcttgcctgggtaacactaggttagtgttgttagacgatgaccacttgacgatcatcctttgtcttcgcattgctccaattacccgtcttcagattaatccatcagcttcatcctgcggattagtccacccgttaggtcatcttggggtcgactcagctttatttgtccacatcacgtggtcaataaacatacctaaatgatttgcataatgcacatgaatgcatagcactgacttcattccacaactaaaattcctcgcataaaaatgccgatagcgcctaccggcaaagcactaaaattactaaacaaataaatctagcttaccagcatcaaacgggactcaatacttgcgagtatgctgataaatcctggctcgagcttgtcgttgaacatctgacgggggggggggggttcactttcttctccataccttccggggatttctctcaaaccagcgacgatcgacgaggattgcgaacatgacgagagggggaaaactatttatcacaataactttttttaccccgcaaacaggatttaaaacagccatatgaagtagtgttgagatcttccgcccccatgacctaaatnnnnnnnnnnnnnnnnnnnnnnnnnnnnnnnnnnnnnnnnnnnnnnnnnnnnnnnnnnnnnnnnnnnnnnnnnnnnnnnnnnnnnnnnnnnnnnnnnnnnnnnnnnnnnnnnnnnnnnnnnnn

SEQ ID NO: 4900 - DNA, 523 bp, Zea mays
  Peptide Sequence Number=SeqID_12584
  Probeset Number=SeqID_19303
cctgcaggtggaagcggaggaagcagcgacgcgcacgaggacgacctggtgatgccgggcttccggttccaccccacggaggaggagctcatcgagttctacctccggcggaaggtggagggcaagcgcttcaacgtcgagctcatcaccttcctcgacctctaccgctacgacccatgggagctcccagcaatggccgcgattggggagaaggagtggtacttctacgtgccgagggaccgcaagtaccgcaacggcgacaggcccaaccgggtgacggcgtcgggctactggaaggccacgggcgccgaccgcaccatcaaggcggacaacagccgccccatcgggctcaagaagacgctcgtcttctactccggcaaggcgcccaagggcgtccgcagcagctggatcatgaacgagtaccgccttccgcccgacgacaccgaccgctaccacaagaccgaaatatccttttgccgcgtgtacaagcgcaccggtatcgacaacggcggccacgggcatc

SEQ ID NO: 4901 - DNA, 744 bp, Zea mays
  Peptide Sequence Number=SeqID_12585
  Probeset Number=SeqID_19304
cttgcatgcctgcagattcgacgacctacccctgccggccgatagcataactcacacaacaaggctggtgcatgagatcattggcaagaatagcggaggagacggcctgctgcatgccgagagagcattcaggatcgcacagctggagctagcattcctcaacgactacttctacacaagataccccatcctgttctggcgtggcttcccgctcctctgtgcttggcaccccctgctcaccatcgctctcatcgcgtggcttgcaagggacatccacaagctctacgaacccagggaaggagagactgcccacgtcattaagggtgtcaatgttgacatcaccatcacatggatattcatgggcattatcgttctgaaggagctgtggaagatggtcacctacatcttgtcggactggaccaaggtgatgctgctgtgcgagtacacttcgcggaggagcatcggccggtggtgtatgtgtatcccattcccacaacgtatgtgcgagttcttggttcgggtcctgtgcacgccaagatgtacgatcgtgcaccgttggcacaacaaggttggccagtacgaattcctccagtcatttggttacgatccttggaacgttccctactatctaagcctgggcctgctgccgaaggagaccaaaggtgcaagagtaagcagcccaacggagctgccagcagctgtgaaggccgctgttctgaggtcgatctgctccctagacctgca

SEQ ID NO: 4902 - DNA, 1740 bp, Zea mays
  misc_feature (1)..(810): n is a, c, g, or t
  misc_feature (1411)..(1740): n is a, c, g, or t
  Peptide Sequence Number=SeqID_12586
  Probeset Number=SeqID_19305
nnnnnnnnnnnnnnnnnnnnnnnnnnnnnnnnnnnnnnnnnnnnnnnnnnnnnnnnnnnnnnnnnnnnnnnnnnnnnnnnnnnnnnnnnnnnnnnnnnnnnnnnnnnnnnnnnnnnnnnnnnnnnnnnnnnnnnnnnnnnnnnnnnnnnnnnnnnnnnnnnnnnnnnnnnnnnnnnnnnnnnnnnnnnnnnnnnnnnnnnnnnnnnnnnnnnnnnnnnnnnnnnnnnnnnnnnnnnnnnnnnnnnnnnnnnnnnnnnnnnnnnnnnnnnnnnnnnnnnnnnnnnnnnnnnnnnnnnnnnnnnnnnnnnnnnnnnnnnnnnnnnnnnnnnnnnnnnnnnnnnnnnnnnnnnnnnnnnnnnnnnnnnnnnnnnnnnnnnnnnnnnnnnnnnnnnnnnnnnnnnnnnnnnnnnnnnnnnnnnnnnnnnnnnnnnnnnnnnnnnnnnnnnnnnnnnnnnnnnnnnnnnnnnnnnnnnnnnnnnnnnnnnnnnnnnnnnnnnnnnnnnnnnnnnnnnnnnnnnnnnnnnnnnnnnnnnnnnnnnnnnnnnnnnnnnnnnnnnnnnnnnnnnnnnnnnnnnnnnnnnnnnnnnnnnnnnnnnnnnnnnnnnnnnnnnnnnnnnnnnnnnnnnnnnnnnnnnnnnnnnnnnnnnnnnnnnnnnnnnnnnnnnnnnnnnnnnnnnnnnnnnnnnnnnnnnnnnnnnnnnnnnnnnnnnnnnnnnnnnnnnnnnnnnnnnnnnnnnnnnnnnnnnnnnnnnnnnnnnnnnnnnnnnnnnnnnnnnnnnnnnnnnnnnnnnnnnnnnnnnnnnnnnnnnngcttattgtccaggaagatgcacaaagcgggtcagaggatcttgttgatgatcagagctaccatttcatgtcgctgatgcttaatctagtgaacacattcctttacatggtgaatacatatatcattgtgccgactgcagatgactatgcagtaagccttggggctgctgcaactgtctgtggtataattattggatcgatggcagtcgctcaagttttctcctcagtctacttcagcgcctggtcaaataagtcctacttcaaacctcttgtattcagtagcattgtgctgtctcttggaaacctgctgtatgcattggcatttgatctaaattcactgtcagttctcctaattggacgactgttatgcgggttaggatctgcaagagcagtgaaccgtcgctatatcagtgactgtgtgcctctcaagatgaggctacaagcctctgccgggttcgttagtgctagcgctcttggcatggcatgacaaactccgggacgttggcccgtgtagtctaaaatcccccgatacttgctaccggtttattcggcacggacctccttttgaatgtccctcttctcccatcccttgtgatttgcnnnnnnnnnnnnnnnnnnnnnnnnnnnnnnnnnnnnnnnnnnnnnnnnnnnnnnnnnnnnnnnnnnnnnnnnnnnnnnnnnnnnnnnnnnnnnnnnnnnnnnnnnnnnnnnnnnnnnnnnnnnnnnnnnnnnnnnnnnnnnnnnnnnnnnnnnnnnnnnnnnnnnnnnnnnnnnnnnnnnnnnnnnnnnnnnnnnnnnnnnnnnnnnnnnnnnnnnnnnnnnnnnnnnnnnnnnnnnnnnnnnnnnnnnnnnnnnnnnnnnnnnnnnnnnnnnnnnnnnnnnnnnnnnnnnnnnnnnnnnnnnnnnnnnnnnnnnnnnnnnnnnnnnnnn

SEQ ID NO: 4903 - DNA, 606 bp, Zea mays
  misc_feature (601)..(606): n is a, c, g, or t
  Peptide Sequence Number=SeqID_12587
  Probeset Number=SeqID_19306
gccggccgggtcgggaacaacggcatacgtgcggttcggcagcagagcaagaagagaaccagtgtgctagtgctacagctacggcctagctacctactacggcgcagctagcagcggcggacatgagcggcgggcgcgaggagagcaccagcagcaggtggccagagctgtccgccctgcgcgcgctggcgcgcgacgcggcggcccgggccgggagggagacggcggggtggcgcggaccggagcgagactgccaccaacactggccaggttacggagaagatcggcggcgccttctcctgcgactctgccatcggttcccagttcgacgcttccaaggacggtatcgccggacaggtcgagaaggctgtcgacggccccagcagacctgctactcagaagaagtaaacacctcacactcaccttcacactcaaacctttcacgacgatggatgcctttttcacgacacgaatcaaccagagatatgatgagcactgtatcataaaagccggaagcattgctcaatggcattgatcatagaagatcaacatgaatacaaatcaaaaacatttcaaactcaaaaaaaaaaaaaaaaaaggnnnnnn

SEQ ID NO: 4904 - DNA, 435 bp, Zea mays
  Peptide Sequence Number=SeqID_12588
  Probeset Number=SeqID_19307
tcactcgtcctcccacgcgtccggccatgcgtccgcccacgcgtccgcccacgcgtccgcccacgcgtccgctgatgtcttgagagaaaacactgaagcagttttcgcggcttgtgatgctgcccatggacgatgggctaagctactaggtgttcgtgctggattacatcccaggttaaggcttgcagaattcttgatcatctacagcataacagaagaatttatacctgctacagagaagattggaggcgagtgtgtttacaacattcggggagtcctacatcaacaatctaatcaattcctttattatcatcataatgttctgattacaaaaatcaacttagatctacatcaataaactttcgttgctatccatgtttctgaccaatttcaatcaatctatctttcactttcatacacttattcttctattaa

SEQ ID NO: 4905 - DNA, 616 bp, Zea mays
  misc_feature (601)..(616): n is a, c, g, or t
  Peptide Sequence Number=SeqID_12589
  Probeset Number=SeqID_19308
tcgagcggccgcccgggcaggtacataaacaccaagcacgcacataattaccaaagaaatgagtagctagcgtgcaataatgcaattctggtgttttgatgacaagacgaccaaatttctggtgaacaacaaatgcacttccatgttccaacatttgtttctcccttaagaactggaaattgtcttaatggtggcgctgccaattagctggtattgctgctagtcatcagtcatcaacctctgcatcatcagctctaccacggcaggggcatcgacggtgacagcaaccttcacggtgggcatgccactccaggctgtgatctctccgtacctcggccgcgaccacgcttcaatttgaaatacctcgccatcaaccctggacaaatctttatcttccacccatatatgagaacgtgtgacaatgtttaacattgaaccgaggacgttggtgacgaagtagtcccggccaagcctacaatcgtgggcggcgccccgacctaccgcacctcgatccgtagtgaccgtctgaaccatggacgacgcctgcgatcctcaggccgtctccccatggacaaagcttcgatctcagttggtggctttnnnnnnnnnnnnnnnn

SEQ ID NO: 4906 - DNA, 561 bp, Zea mays
  misc_feature (519)..(519): n is a, c, g, or t
  Peptide Sequence Number=SeqID_12590
  Probeset Number=SeqID_19309
ggaattcggcacgaggcctctcttctctttttcacgggagggatgacgatgccgctcgcgcgcgacgccgcatcactccctcgccactcgcgcgcccgggctccttcccgccacgctcacgacgatgccgtccccgacgtcctatcttctcctgaatccctccaaaccctcctccttccgccgactctcggccccgcgcctgagccggtttcatgtctcctgcgacacgccacggggcggcgggaggagtggcggcgggaggcgcgaggtcatccccgccggtgccagcaaggccaagaaacagatcgtattcttcgatgccgccccgccggtgtcccaggagggcgggggcgccgtggagaaggcggggagcgagaagcttacccaggtgggcagcggcaacgcagcgctggcgttgttgaggagggcaaccaagaggacgctctcggtgctgtccaacctcccgctcgccatctccgagatgttcgccattgctgccctcatggctctaggaacggngattgaccagggagaggcacccagctactacttcgagaagtt

SEQ ID NO: 4907 - DNA, 363 bp, Zea mays
  Peptide Sequence Number=SeqID_12591
  Probeset Number=SeqID_19310
cgaattccggctacgactcacgcgtacaggctaggttaaccttgattattggtctttacacggtacaagtgatcaagggacggggctacaaaacacgaagcagagagtgccagttcatgctgatggatcagcttcccggaataaaccgatgtaaaataaaataaactaggttaaccttgattggccaataatctctctgtttttatggcctagttgcaaacaaagtgacagaagcattcattccgtggtgaatcatgaagaatgagcgccgactgctttctttaccacctgcgagtgtatcctgctgcacattgtaacagacgtgcatttactgaactaagtttaatactatcaccgttcttg

SEQ ID NO: 4908 - DNA, 439 bp, Zea mays
  Probeset Number=SeqID_19311
ataggaagaaaggaaaattactttcccctgagtttgataactgggaagatgttgacacatttatagctgcactaaagaagatcgaatcatggatattttctcgaattgttgagacccggtggtggcagaccattcacaccacatatgcatcctgctgattataacgggtggtttgagaagtactcccaatccagaaaaaggctatggaaggattcctgctgtgggcaaccagcatacaagcaaccatatcaatggacatatggaagaaagcctttaaggaagcgtcagaactgctttgcctagtaagggcagctggtcatgagtgtggatgtttgcctatgttaaccaagtttgtcatgtagcagtgcatagctaggttggatgtcgcaatgttcaatgctatctagcgcgtatcagatgatgcaattctaacagatcc

SEQ ID NO: 4909 - DNA, 804 bp, Zea mays
  Peptide Sequence Number=SeqID_12592
  Probeset Number=SeqID_19312
ggtaccctcgggttcggccggggaggcaaaaaaggaggacaagactgcttgaactggaaagcgaccctagcaccagaccaccgtaccgacaccgactgcgtagtccccgccggaccgtgctacactccggtccatgtcttaacctcgtgccggagcagaagcacaaagcgaacgtgagcataggctgactggaccccaacaccaagttgacaaggacagccccaaggacagccccgtaccagatggaggaggactgaaggacggaaagcatgagaacggctccagcacgactgagccctggggcataggccgtgcttgaacgggggcacccgggcggggcaaccatctctagacctggcaacacggattttaaaggcgaaaagcttttctgctgtgctcccagcaaataacgtccactcaccaggtgtacaggaggtcagtgatcatccctctacccagctaccctattcacccccgccaccctcacagccccagcattcttctccatcacaatcttattcctctccctcgtctcaggcaacagcagattacccttcttctgattttcacaaaccatcccccaattattcaactcccggctacacaagcacagatttccctaccaatgaggtccacagaccaccttccaattattccccacctccttacacaaggacagatcgcccttccaatgacggctacaatcctcacagcaattggtaaccagatgtttcggcttacccttaagcatatcaacccccaccctacacatttgaccctcagcacaactcttaaaactactac

SEQ ID NO: 4910 - DNA, 438 bp, Zea mays
  Peptide Sequence Number=SeqID_12593
  Probeset Number=SeqID_19313
ctgactcgtgggttgccaggaagatgctatcttcacgacccacaatggttagctggggagatgttgacaaagttcctccatatgaatctatttgcaagcggctacgataagtaccccctacacaatggcctcgggttgactttgaaggatccttccgttgaaaactaaacaatcgcttgtatgaagtgccctagctcatgaactgcttttctttggggggcattcaatctagtgagcttaggatttcagcagctacgtgcaggcgtaactgttccatagttgattacgaagactggcgaccatttttttggccctcgtctccgactatggatagcatgagtattctgctggcctgaattcccggtgtaaacggcttctgaaattttgaatcattgataaactaatagtgtttggtttgaggaaaaaaaaaaaataaag

SEQ ID NO: 4911 - DNA, 1232 bp, Zea mays
  misc_feature (1)..(12): n is a, c, g, or t
  misc_feature (1193)..(1232): n is a, c, g, or t
  Peptide Sequence Number=SeqID_12594
  Probeset Number=SeqID_19314
nnnnnnnnnnnnttacataaaagacacatcatagcacaatgcttcgaataacaataaagagtaagtaataatatgaaagactagagtcatttacataatataatcaaagtacacagaatagaaacgtagccaacgtaaataaacccaccacaagcagctgactgggggaggtcgctagcctaatcctcgaactcgtcgaagtcctggaactcctggagaaccacctcgacgcctccttctttacctgagcatagattgcaccaaaggcaaccttcaccaaagagatgcttagggtctttaatctcgtggaactcgaagaactggatcacttggtcgccaacgcttgatctttgatccctcgaagctcagaaacggatcgcaatcttggcgtggaacgactgcgaccaacaaagctccatcgcgcgacggcaagcccgttggctgtgcgggcgaggcggcagcacaacaccctgaggcatgggcggacgcgtgggcggacgcgtgggcggacgcgtgggcggacgcgtggggcagagcaaccgcgccaggcttcttctccaggtccgcgtgtgagaaatcgcagcctctgttcatctcccaaatttcaaaccatctcctaccaacgtcgcgaagacctgggatccatggcgcccttgcagcagaccagccggtcttggcaccccaacccctgcggctcccctgccatccgtgtcccctgcgttctagggtggtcgtcccgcgttgttgccgtcgagattgcgatctgttcccgagcttcgaggaatcgacggacaagcttcagcgaccaagagatcgaactcttcgagttctacgaggctgaagattctgagcatctgtttggtgaaggttgcctttggtgcaatctatgctcaggtaaggaagaaggtgtcgaggtggatctccaggagttccaagaattcgacgagttcgaggattaggctagcgacctcccccagtcagctgcctgtggtgggttgtttacgttggctacgtttcggttctgtgtactttgatttatattatgtaaatggctctagtctgtaatattattacttactctttattgtaattcgaagcattgtgctatgatgagtcatttatgtaatcgcggtgtacgtgaatttcgtgatcctggcacatacatggttcgcattcggttacccttcaaaacnnnnnnnnnnnnnnnnnnnnnnnnnnnnnnnnnnnnnnnn

SEQ ID NO: 4912 - DNA, 953 bp, Zea mays
  Probeset Number=SeqID_19315
cttccttgattcatttgacctgaagagcacatccagctctggcccaccacccctccgcaagaggcaactgccgcaccctagctattctccccctccagatgatagttttgtagatagggcaactagttattcctgttacggccatgggggctttgtgacacacagcgacagtaaaggaaacagtaagatgccgatgtccatgtcgactatgctgcctggctcgcctaggcgagccccacagaaggtggttcctatgagattgtctgtgtggcatcggattgaggagaatccatcagtgcatacgtcgccttctccaagcaaggtgccaaaggaggtgcacatttcgccgagcaagaacaaaaactctgggtctgcttcaaaggaattggcaagcgtaatttcttcggattgcaaggcaaagagttctgattgtaagggtagtgatgatagtgcaggaatgaagaagaacgcagcaaagaaaactgagaaggtgctgtcgtcggttcttgtgaagccttcaccagaagacaaggaaagagaaagagctgttaataaggttagtaagaagcctaacaaggttggcaataatataccaggtttcacgagtgcaggtgtgagattggcagcctttcctgggcctggtgtgaagaaagtgaaaaagattgtcatcaagaagattgttaggaagattggtgccaaagataaacaaactagtagttcaaccgtcccagaaaaggacatcattgatgctaatgtaaatgcctctgaaaaagaagaagctaatgcaaatgtttttgagaaagaagaaggtgagatcacaacatcatcttttgagaaggatgctatttctgcacacaatttggtcagtactagtgatacagctggagttgttaacagtgtggaggtccaaaaggaacaaaatagtgatttggtaaatctgaagaaaacaatgc

SEQ ID NO: 4913 - DNA, 536 bp, Zea mays
  Peptide Sequence Number=SeqID_12595
  Probeset Number=SeqID_19316
tgcaggccacgttcgagcggtacaggcaggaccgtggcaaggccttcgacgaggtactggaggaacgccgcagcgaccagctcgcggcgatgctcaagacagcggtgtggtgcttgacgtcgccggagaagcacttcgcggaggtgatccggaggtccatcgtcgggctcggtacggatgaagaatccctgacgagggtgatcgtttcgcgcgccgagatcgacatgaagaaggtgaaggacgagtacaaggtcaggtaccgcacgacggttaccagcgacgtcaacggcgacacttccggatactacaattccatcttgctcactctagcgggctatctgattctggcggcccgctcactgggactcgatgccggcccgatgtccggttttgatccggctaaagttaacgccgcgttcttcagcgaaaataactggcaggtcaacttactgatcaacctcggctatggcgaagccagcaaactgcatccgcgcctgccgcgtctgagctttgacgaagccagcaaatttgcctga

SEQ ID NO: 4914 - DNA, 593 bp, Zea mays
  Peptide Sequence Number=SeqID_12596
  Probeset Number=SeqID_19317
cgacgcgctcgccacggtacctaatctcgatgcacctcatacctagcacttcaagatcgactggagggggccttgcacggtcggcagctgcttgtcgcgccactaccacatgttcttcacctgcccggcttacttcatcagcttccgcaccagctacggctacctgctctctggcaccgcacacggcctcaggctccagaccaccacgtactgcccgattgtggactacactctagcgagcgagaggtccatcaccgccgaaaccgcccgacctccacgtgctctgctacagccgcgccgtctatgtacgccacaccttgtcatgtcgcatactgcatagcggtaacaaatgaactgatacacaagttggaataaaaagaatatgaacaagtgtgaggtgatttactgagggttaaccagtggatcgctgtgattacatatatgtttgttggtttgcgtcgcgatctttgttcagttcaacgtacagtttgttcattactataaatgctgaaaaagttcatgtagttttagggggagacgctttttgtctttctttgtgccggatgtcgaagtggtgcttttatgttaggctt

SEQ ID NO: 4915 - DNA, 283 bp, Zea mays
  Probeset Number=SeqID_19318
acggggcatcaaggggtggactaaactgctggcggaccatgcgcccaacgctacgaacgaggcgaagatcgagaactacttcgggcgctaaatcggccgcgacaccagcatgagcatctacctgagcctgtacgaagttcggagggcaggcatggggactctcacagatgctgctggagaagacactggtcatttgcctggaaagttgcaccggacgatcagactaccggtaacagtaatggaagcaggttatgagccagatggcgagccttatggtatgaat

SEQ ID NO: 4916 - DNA, 452 bp, Zea mays
  Peptide Sequence Number=SeqID_12597
  Probeset Number=SeqID_19319
ccgacgcgtggggtctttgtctatgtagtgcaacccttatttttgtcttctaataccatcacaacgcatgtggagtaaaccaagcttttatacgcttcatgcttgcaaaactttacttcttattctaatgaactgctggtttgtgatgaagttttgtttagggttcagggtttggcattgtgtataaaggttgtgtttaattgctcaccccttattttgtccaccttcactggatgatatacaatagtatggtcctttcccaagaccctctagttcagaaccatgaaatgctcctgaatctccttatccaagacatcttttggtaactaccacactgcaggttgttggagcattgcctaatttggaacaaatggctcaaaagtttaccataaaccgctggagaatgaagataccttgcttgattcttctggtgagactagatcttcgcacat

SEQ ID NO: 4917 - DNA, 520 bp, Zea mays
  Probeset Number=SeqID_19320
ttgctactttttttttttctctcagaccagttggagaaagacgcgatccaacatatttcttcccttgtatgcctgccaattctgaacacgtaccaactcaacccttgttcatcgatcttgcagcactgcaggatgtacagggctaagagagctgcttcgctcagagcgaagcgccggcgccttggcaagtacgagctcggacgcaccatcggcgaagggacatttgccaaggtccgggtcgccaagaacatggacactggggatcatgtcgccatcaagatcctcgacaaggccaaggttcacaagaacaaactagccgagcagattaggagggaaatctgtacgatgaagctaatacagcatcccaatgttgttcgcctgtacgaggtgatgggaagtaaagcaaggatttacattgtgctggaattcgttatgggtggagagctccacgatatcattgtaagccatgggagactgaaggaggacgaggccacgcagatactttcagcaggggtaccga

SEQ ID NO: 4918 - DNA, 276 bp, Zea mays
  Peptide Sequence Number=SeqID_12598
  Probeset Number=SeqID_19321
ctgcatgttccacattggattgcataaatctcatcagtgtgaatttgcattttcatttgtggcaataaatgctctgacaaagtcttcttgttgcagaattgccttgaaggactggtccgaatactgagagatgtctccaacagttcatatgctcctgaatacgacatcggtggcatcacagatccattcttacatatccgagtgcttaaactcatgcgaatactgggtcaaggagatgcagattgcagcgagtatatcaatgatattcttgctcag

SEQ ID NO: 4919 - DNA, 933 bp, Zea mays
  misc_feature (1)..(332): n is a, c, g, or t
  misc_feature (933)..(933): n is a, c, g, or t
  Peptide Sequence Number=SeqID_12599
  Probeset Number=SeqID_19322
nnnnnnnnnnnnnnnnnnnnnnnnnnnnnnnnnnnnnnnnnnnnnnnnnnnnnnnnnnnnnnnnnnnnnnnnnnnnnnnnnnnnnnnnnnnnnnnnnnnnnnnnnnnnnnnnnnnnnnnnnnnnnnnnnnnnnnnnnnnnnnnnnnnnnnnnnnnnnnnnnnnnnnnnnnnnnnnnnnnnnnnnnnnnnnnnnnnnnnnnnnnnnnnnnnnnnnnnnnnnnnnnnnnnnnnnnnnnnnnnnnnnnnnnnnnnnnnnnnnnnnnnnnnnnnnnnnnnnnnnnnnnnnnnnnnnnnnnnnnnnnnnnnnnnnnnnnnnnnnnnnnnnnnnnnnntcatgaaaatcacaggcgctgctacacgagccacacaacgaggagactgattctatctaggcggcgtatgccaatagacttttattgcgacgaaggatgctactgtaaaagctatgctagtatcatagtaccatgataagtcgcatagaaggacacgcgtaatgtagatcagaatagctctcgatatatatgtgtgcacatcttatctcttcataaagcaaaggtatgcggtactaccgatcttcataatatttctagcctcaaagttacattgacttgcagactcaaacaagattgaaaagatcgataagtcctataggctcccagactcccttgcaacaaggactccagctccaatgagatgcgtcagctccacaacagaaggatccatcaaagccatcgaaggtgtcaaaggccataggattgttttctgcctccagccctgcaaagccacatacgtcaatcagaacttctcgcagcaggtgctgctccgcaatggtgagaaggtcacgttcgacgagcctaacccgtttgccactgaaggggaggaagctgcttccgttgcttaccgctaccgtcgctggaagcttgatgaggagan

SEQ ID NO: 4920 - DNA, 562 bp, Zea mays
  Peptide Sequence Number=SeqID_12600
  Probeset Number=SeqID_19323
cttgcatgcctgcagcatactgactgtccctcctctacctccttcggcccgctttcgctcctcatcagtaggaagctcgccgacctgggctacaagagaagcgccaagaagtgcaaggagaagttcgagaacgtgcacaagtactacaagcgcacaaaggaaggccgcaccggcaggcaggacggcaagagctaccgcttcttcgacgagctggaggccttgcacgcagccgcgccgcagccacagccgccgctacagaagcagcagcagcagttgccgccagcgagcaccaccgcaccaccgttgcacgccttcgccacgccagtatccgcgccgccgccgataagttcaatgccaccgccgacggggccgatgcagccagcgcccatatcgtcggcggcaccggcggtgcaggtccaggcaatcgtggagctgcccggggcccaccagcccctcaacctgctgcaaggcttcagcttctcttccatgtcggaatcggagtccgaggacgatgacatgacggcggagacaggcggaagccaggaccacctcggcaagcgga

SEQ ID NO: 4921 - DNA, 557 bp, Zea mays
  Peptide Sequence Number=SeqID_12601
  Probeset Number=SeqID_19324
ccatgttggggcccccttcaagggcgacaccttctccaagatcaactccatgccccgtgttggcagcgcccccaattgggccgcctggggcgaaaccatatagtagatctagccatgccatgtccattgggctgcctgcaacccgtttgccggtgcccctgcccgtggtctttatcattttaccaaccccgaggctttgcttttaaaccagaggctccatttgtgtgccgccttgttttactagaattccttttttttattttgccctttttcccttttcccccccagtttttatccttatcctggcattgtacaaataatttttccagtgcttgtagcttgtggacttgggttgtccaacatgtcatgaatacaaactgagtttgcttcaaaaaaaaaaaaaaaaaagggcggcccgcccttttttttttttttttttttttttttttttttttttttttttttttttttttttttttttttggaacgaacttatcatacagttccatttcatcactagtggaccaagcaaacaaggaagtccaacaagccccggg

SEQ ID NO: 4922 - DNA, 552 bp, Zea mays
  Peptide Sequence Number=SeqID_12602
  Probeset Number=SeqID_19325
agggaaagtggccccgcccgcaggtctcggttccgtaataccgggcccccccaacccttccggcagccaccagaggatctgatttctattccggtgtttgctgccatcaaatcaaaggtcacggttaacctgaccaaccatgcttctcctgagacccgatctacaccaggtcaaccttgggttagaggatgggacgacttaaggaagggcaaagatggacccaagtttgggaaatcagggataacctgctggaaatggggatgacggctttccatcctaaataatagctgcccgcccaccccaccccccaatatgcttgtttggtgatggtgtagaataaagtgaactgccaccggcatgtgtgaagttggttaaatcgtagaatcacctggtaactatggatggtactcctgatgtttgcctggcaattccagccttccaggtatcgtctatagaaaaaaaaacccggattaaaattcaaaacctttggaggataacaaacacagggggcggccgttttaaagaatccaagtttacttacgcgtgcttgca

SEQ ID NO: 4923 - DNA, 722 bp, Zea mays
  misc_feature (1)..(31): n is a, c, g, or t
  misc_feature (632)..(722): n is a, c, g, or t
  Peptide Sequence Number=SeqID_12603
  Probeset Number=SeqID_19326
nnnnnnnnnnnnnnnnnnnnnnnnnnnnnnngcgacgtgaccgctttcgaacgtcttcaggaactgtgcctactaatggaacttgggggcttacattggtttctaatgcaaccacccgctggaccccccaatgaggggtttgcaaaagaaaaatggggttgggtttgggggccgatggccgggtcccaactttttatggcccaatcttggtggggaaaccttaaggaaccccaaccgggaagcggggggttaccaaacccccgggggtttttggttaaccttcggaacctgccccaataacaccaccgaaatctatcagggggtgggtttcaccatggccacccaaacggtggcaggtacctttttctttgtctggccggcaggcttattgaccaactgggcgctcggcaaccacagccgtctgaagaagctgtttgacggcaaggatgggaggcccaagtcccctcgccggggggtgattctccctccgttcctgtgaagaggtggtggtggtcggcctattgtgattcgatgtctacagacagttgtactgtactaatcgtgcctgtttagcggttgaacttggattccgttgtccgaaatttctaatccgaaagatggatttcattgtnnnnnnnnnnnnnnnnnnnnnnnnnnnnnnnnnnnnnnnnnnnnnnnnnnnnnnnnnnnnnnnnnnnnnnnnnnnnnnnnnnnnnnnnnnn

SEQ ID NO: 4924 - DNA, 690 bp, Zea mays
  Peptide Sequence Number=SeqID_12604
  Probeset Number=SeqID_19327
ttggggcggccgccctatcttatcttttttacacttaaagaagaacaagcttgatgtcgcattaatcaccgaaaccacttaggatttaaatgctttcagttagtgtaacagatatttatcttgaagtgacaggagtagctttattcatagcgtaggatactactaaaaaaacggggcacgctaagaaaaaaaatcctttaatcggtgaatccagtttggggagctatcattcaaccccaataacttttctcttgccaaccttggaaaatggggacgcaaagaaacatgaccccttgctggtcagtcacctccatccacaactactcgagagagataccctttggggggtgaaactttgccccaagatttgctcaatttggcatgagcttcagcgtagcactcgaaaaaatgttgttcctgagtcctttggcatatattttgtagcagtagcgtctttgaaatgaaggaagtccctcaacacaagcactaagcattcagttaggcagaacttaaggaagatgagtcgtctcgtcttttctttcgagtggcacttgaaagtagctggttgtcaaaaactatgaagccaaagtgatgagtgttccaagagagttgttccaccccagggcgctacccaggctccagtctttaggggtacctggcccggggcggcacgcctcgaaggtggcgagt

SEQ ID NO: 4925 - DNA, 1066 bp, Zea mays
  misc_feature (913)..(913): n is a, c, g, or t
  misc_feature (929)..(929): n is a, c, g, or t
  Probeset Number=SeqID_19328
ctgggagatgctgcgctcactcaccctctggttccctgccggtgaggtactctccccactcatctctgctgggcttgatagctgccctaatctagaggagatctcaatcaaagtggagggtgattgccggacatgtgcacgccctggcccattctttggactaagtgatcttgcaggcttcccagtactgtccaagatgaaactggatctgagtgaggcagttggctatgctctcactgcaccagcaggtcagatggatctctctctgtgggagcggttctatttgcaaggcatagattcactgatgaccctgtacgagctggattactggcctccccaagacaaggaagtgaatcagcgtagcctgacactgcccgccgtgggactgctccagggctgcgttggactcaggaagctcttcgtccatggcaccacacacgagcatttcctgacctttttcttgaaggtgccgaatctgagggacatgcagttgcgggaggactactatcccgcgccagagagtgatatgatgaacacggaaatgcgagctgagtcttggctccggttcgagatgcagctgaacaacaggctaattgaggattgatggtgaagttggttgatgggagggactgagccaagtggagtcgatgcggggatggtgccgtgcgatcgatggtcacggaagttgcaaggatagctggtgtgctgctgttggggcagagtagaacacaatgcttccatccaacaaatatcggtgatccttttctagttttttaataaggatgcataataagtaagagaattgatgcagaatccagatattcgcaagagttgcgacggcaaactaggattcgagttcgagggatttttgcagggatgcttttttttctcttttttttgagctgagtccagntagaaaccggccggantagagtgggcattgatcttgcgaactgtaacgattgacgtgggttctgtaaagagaaataaaagaaatgtcatttagctgtttttcttaaaaaaaaaaaaaaaaaaactcgagagtcttctagacggccgcgggccc

SEQ ID NO: 4926 - DNA, 310 bp, Zea mays
  Peptide Sequence Number=SeqID_12605
  Probeset Number=SeqID_19329
cttttaagacaaattctagacctaaaagtagatccactacactagaaaccaaaggactacctggcagagtgatctaacactcactctaaaccagctggtaacctaacaactgatagagggacctgacaaacactgccagccttaatactatcagtgcgctgcctcccttttccacaaaaagaagcttatccagtccctgtggatctcttgccctatgtcatccttgcaagcggataacactagtcccttggcactggtctactgcgggtctctatgtattaaatctacccctaggccatcccttagacgt

SEQ ID NO: 4927 - DNA, 729 bp, Zea mays
  Probeset Number=SeqID_19330
gctcggtacccctgctgcgagctcccctccctctctctcgctgacaagccggccccactctgccagccacggcctctcacgtgctccctctcgctggcagtccggccccaccggtcagccgcttcgtcgtcttcctcgcgtacgacgcaccgccgtcccctccatcgccgtcccctccatcgctgtccccttgcccatcccctcgccgcataggagagttcggcaccggcccatcctcgccgcttgaccgcgtccttgcccggtaccgcccccgccgtgaggtctcgtacgtcgccgctgtgcggcattaatgccggcgctgtggcacctcaccggcgctcgccgagctccgccgctccccttccctcgggcgccggcctcagccaccaccctcctcccctcgcccgagctcaattcgcgaagcgtcgccgtcttctccctctctggtgagccctcccccccctcttctccctcccgacggcgatcctcgccgtggagctccgccacctccccgtaggcagccccctcccgacctcctctggccaaattaagcccacctctaggtccgccatcccctccccgtgctaagacacctgcgcattgtccggcggccgaatcctccccgcggacggccggttcgccccacccgtcaaccgttggcgctgtctccccctcccgctctctctgacgcgtgggccccgtggaaacgacgttgtccttgcgcgccat

SEQ ID NO: 4928 - DNA, 2739 bp, Zea mays
  Peptide Sequence Number=SeqID_12606
  Probeset Number=SeqID_19331
tgtctaaaacctccatcaagcaactggggaggtcgttggctagagctacgacctccacggtcgcagcactctgcttcctcctcagctgcgtctccgcgaccccttccacgctcgccgcgtcctccgccatcatccacgacatcatccgcggcctcgcggacaccacggcggcgcgcgtccgcacggacgccgaggccacggcgcgcgcgttcaccgacttcggcaccaacgcgaccgaagacgacgcggcccggccggcggccgtgttctaccccgtcgtgcgccgccgacatcgccgcgctgctgcgggcgtccagcgcgagcgcctcgccgttcccggtctccgcgaggggccgcgggcactcgacccggggccaggccacggcccccggcggcgtcgtcgtcgacatggcgtcgctagcagtagctgcagggcgcgacgagaccgccaccaccaacgcctcctccacctccgcctccgcaaggctcgccgtgtcggtggacgggcgctacatcgacgccggcggcgagcagctgtgggtggacgtgctgcacgccgccctggcgcacggcctcacgcctcgctcctggacggactacctccgcctcaccgtcggcggcacgctctccaacgcaggcatcagcggccaggccttccgccacggcccgcagatatccaacgtcctagagctcgacgtcgtcacaggaacaggtgacatggtgacgtgctccaaggagaaggacgccgacctcttcgacgccgtgctgggagggctggggcagttcggcatcataacgcgcgcgcggatcccgctggcgccggcgccggcgagggcgcgctggctgcggctcctctacaccggcgccgccgacctcacggccgaccaggagcggctcatcgccgacgacgagcgccgcggcggcgcgctggccgggctcatggactacgtcgagggctccgtcgtcaccgacctccagcagggcctcatcggcagctggcgctcgcagccgccgccgtcctcctcgtccttgtactcggagtcggcgaccgacgccgcgcgcatcgccgcgctagccgaggaggccggcggcgtcctctacttcctcgagggcgcggtgtactacggcggcgccagcgacacgaccgccgcagacgttgacaagcgcgtggacgtgatgctgcgtgagctgcggtacgcgcgggggttcgcgtacgtgcaggacgtgtcgtacgagcagttcctggaccgcgtgagcgccggcgagcgcaggctccgcggcgagggcctctgggacgtgccgcacccgtggctcaacctcttcctcccgcgctcccgcatcctcgacttcgccgcgggcgtcttccacggcgtgctgctccccacggccggcggcggcggcggcgggcccgggcgtcgtctaccccatgaaccggggcaagtgggacggcgcgacgtcggcggtgctcccctacgatgacggcgacggcgacgaggtgttctacacggtggggatcctgcggtcggccgtggcggacggcgacctgcgccgcatggaggagcagaacgccgaggtggcgcgcttctgcgaggccgccggcatcccctgcacgcagtacctgcccgcctacgccacgcaggcggactgggcggcgcgccacttcggccccgccggcagcggcaggtgggacaccttcctccgccgcaagaggaaatacgaccccatggcgatcttgtcgcgcggccagaggattttctcctccccgctgcttgcctcatgatccgccggttccggtctctcgatcgtcgtgtgttgctgacttgctgttgctggcatggactgcatgaaataatatagtgcaagcaagcaaaagcaaagcaagcttcaaggcatggctgtgttttgcttttactgatcagtagtcaagtgacacagttactacgtactacgatctgtctctgacactcttccagagggtcccaaattatatgatgctttttattaactttacaaaaaaaaaaaaaaaaaaaaaaaaaaaaaaaaaaaaaaaaaaaaaaaaaaaaaaaaaaaaaaaaaaaaaaaaaaaaaaaaaaaaaaaaaaaaaaaaaaaaaaaaaaaaaaaaaaaaaaaaaaaaaaaaaggggggggccttttaaaggaacaaaattttcctcccccggcatggaaaggaaaaattttttttttggggcccccaaaaaaaattccgggggccgggtttaaaaaaggggggcggggaaaaaaccgggggtcccccaaaaaaaatgccttggaaaaaaacccctttttcccagggggggaaaaaaaaaaaagggcccaaccgaacccccttccaaaaaaggggccaaccttaaggggaaagggaaaccccccttaaacgggccaaaaaaccgggggggggggggggttacccccaggggggcccttccttcttgcaagggcccaaaggccccgcttttttggttttttccctttttttttgggcagggtcgcgggtttcccccgaaaaactttaaaagggggggcccctttgggggtccaaaaaaggggtttacggggcccttgcccccaaaaaacatggaaaggggggaggggttcaacgggggggccatatcccctgtaaaaaggagttatcccccctttcaagggggagacccactttttaaaaaaggggaccttttgggtccaaaaagggagaaacaactttaaccgttatttggg

SEQ ID NO: 4929 - DNA, 488 bp, Zea mays
  Peptide Sequence Number=SeqID_12607
  Probeset Number=SeqID_19332
tgtttttgacttttcagttgttggtcttttaagatggcattacatgatagaaaggggaatgaggatgtgagagtttttgtgaaggttgatggaaaagagttttggattggaaaactatcagttgacaaataccctcagtgtaaaactagtttggtattcgagaaggagttccggatcgttcggctcgaggaacgggaacgtggtacgttgcggtacgctactaaaactaggatttaacactactggaacgagatcgttcccacgttcccggaacggaacgaacgttcccggaacgaggaacgtggccaagttcccggttcccggttactaaggtttgagttactacacacctctagatcttcgcagcaaccacaacaactcttccgaatcttcgaccaatgctgcaaatcagagtggtcgtggaggtcctagccggtttggacgaggtactcatggaggaaggaactcaaacgctccaacctagcggg

SEQ ID NO: 4930 - DNA, 692 bp, Zea mays
  misc_feature (597)..(597): n is a, c, g, or t
  misc_feature (630)..(631): n is a, c, g, or t
  misc_feature (634)..(634): n is a, c, g, or t
  misc_feature (647)..(647): n is a, c, g, or t
  misc_feature (650)..(650): n is a, c, g, or t
  Probeset Number=SeqID_19333
atcaccactcatcaggcattcaacaaaagacaacacgaactactcacaacgaatcaggcaagtgcagatcacacacttcacacagcaatggctgctctggctgccgtggtcgtcctcgcgcttgcaacggtcgtcgccggcgcagtttcggcgccgtccaggagtccggtcatctacattttcggggactccatgtcggacgtgggaaacaacaactatctcctcctctccctcgccaagtgcaactacccctggtacggcatcgactacaagaacggctaccccaccgggaggttcactaatggcaggaccatcggagacatcatggccgccaagtttggctccccgcccccggtgccgttcctctccctgtacatgaccgacgacgaggtcctcgccggcgtcaacttcgcgtccggcggcgctgggctcctcaacgagacgggcatttactttgtccagtatctatcgttcgacagccagatatcgtccttcgagcagatcaaggacgcgatgatcgccaagatcggcaagaaggctgccgaggagaccgtcaatggtgcgatcttccaaatcgggctcggaagcaacgactangtcaacaacttcctgcggccgttcatggcgganngcntcgtgtacacccncgncgagttcatcggcctcctcatggacaccattgacaggcagct

SEQ ID NO: 4931 - DNA, 747 bp, Zea mays
  Peptide Sequence Number=SeqID_12608
  Probeset Number=SeqID_19334
agaccgaaacgcgagcaccatcgacaaagcaggcaggcagacaggcagcagcagcgttcgttcacaatgacagctagtcttgcctgagcaggttgagctccaaagagcgcgagcgaggggctacagaagcgcattggcgccgcgcgcccgcagcgtggcctgccgccgccgatcgccggcaccccattgctgcgttggcttggcagaacagcttagccagcttgctgcgccatcaggcagccgaaacgcagcgtccccgcaaatggcgggccgccgtctggtgacgctgacgctgctggcggccgcgttcctggccgccgccccgggcggcgcaggcacgaaaccatcggcgaagttcgagctgatccacccggcgcaagcgcccgtgggaccaggtgacgcgcatggaccacgagcccacggcattcatctccttcgaacgacgtccccccccgacggaagtgggcccggtccaagccccaaccccaagcagtcgcccggccagagaagtccttcaccatggccgtttcccctcggggggggaaaccggggacaggagaaagaaccttcctgcccctttccgtcggggcccaccccccgcccggcacctttcctccttcttggacctaaaaccggccaagccccccttaaccctggagtacacgagggccccacggacaacaacaacttcctctcgccccagggacacgccccccggtcattctcctctacagtacatcccggccg

SEQ ID NO: 4932 - DNA, 314 bp, Zea mays
  Probeset Number=SeqID_19335
cacgtccatatacatttctatctattaataaatcatcccaaccctagttagggtttaggtttcctctcctaacaaaaagatttgcatgctttgctagacatgctgaagttaaactttgacatctaaagttaaattatgatatatcagtgcttacaagaataacaaggcagcatcactgaaaactatgcatttacatgtactttatgctgaagaataacaaggtccccatagttttaaattgtcagcacaaccatggctcttgtgtgtggcataacacaaaaaatggaagataatatcaagaaaataacctcgat

SEQ ID NO: 4933 - DNA, 509 bp, Zea mays
  Peptide Sequence Number=SeqID_12609
  Probeset Number=SeqID_19336
aaaccaagggcaaaacggttcattggagtaaaatgagggtcggggaaaaagaggcccaaatgcaaaagatgtggtcagtttggtccccaaatggggccatgtaatgacccagtatatgagtgaaaggcgccgcccccaaatgctccaaagcctaagagggttagccagaggaaaaaaaaggtggtggtggtaaaagatgatccattgtcagggcctgccccatcaagtccagtgtgcaacaaagagacccagaggggaaccaaaagcaagtagtgttccttaagttactcattatactgaggttctgtaaagtgccaagaaggggggaaataggttttgtatagacatgttttatagtgtaggacagagtgcaagtttgttttcttgttgaacaatgtggaatggggtcctctagtgtggcccagaaaagaaaaaaaaacccaaacaaaaaaaagaaaaaaaaaaagaaaaaaaaaaaaaaaaaaaaaaaggacgaccgctctagagga

SEQ ID NO: 4934 - DNA, 468 bp, Zea mays
  Probeset Number=SeqID_19337
cccacgcgttcggatagaaaagttgagttctaggatgaatgccaatgtgtggatggaaaaggccaagggagctgcgcagtactgagggagctcggacaagaatattgctgaattcgtcgccaagtattcatcaactcatgcttatctctgttcaagttttcattctcttgctccaacaacttacatcttttcgccatcttctggtatgcgcgcgaggtttcgaggatctgaagaatcaccctggtaactggaatctcaagtgccaggagaagaacatgtggttcaagaggagccacacatatgaggagttcaattcgatctaggtggcgtctcccagtcgactttctaacgccaaggatagattttagattattttatgtttatcttttattttgtaagacttccgctatgcaataaatactctccttattgtgacatctaaaaaaaaaaaaaaaaaatttgcggccc

SEQ ID NO: 4935 - DNA, 516 bp, Zea mays
  Peptide Sequence Number=SeqID_12610
  Probeset Number=SeqID_19338
gaaggacgtgccaattggagccatcagaccaaaagcagatgaagaagacgtgcagaatgtcgacatggcgtccgcgtcaaatgtggcggacgcgtgtgaaaacgcgtgggggcatgcaaatgaagatacatttgtctctcatgaacaagcaagggtacaagccgaagatgttgatgctccaggatcttcttcccaagtggttaacaggagaaactcatcactacttcaagctcatcctcaaaaccaaatcattaggagtccttcacaaggggttatcactcgatcccatagacatgcttcttttattgaacatcacttttttgtttcttgtgttgagcctacttgtatagatgaggcgctacaggtgtgggggacagatatcccctgggtccactggaaggataaaagacctcacgaaaggcccaagggcccaataaatcgtaaggtcatcccttcgtgggcctggggaggaaccaccagtgaagcaaatcgacataaggctggatcggagcaagc

SEQ ID NO: 4936 - DNA, 1547 bp, Zea mays
  misc_feature (1)..(26): n is a, c, g, or t
  misc_feature (1068)..(1547): n is a, c, g, or t
  Probeset Number=SeqID_19339
nnnnnnnnnnnnnnnnnnnnnnnnnnagcctcgcactctcgcaggcggcggcgcatcgagaaacaggggctgcggctgttgcttcttccacctctccggccatccggcggtccatcgttccgtgccggcggcctcccctcctacgcccctgccgattcttcaatcttcaccaacgtctgcgcgtagcaggctagcagtcggcacggcttcctcagatctgccggacgacttgctgttcgtcaccgactcaccagcaaccaacgtcagccatcagccggcagcaggggaagctgggcggagggtcattgcggcacggcgtccaggcgtacagaaggcaccagcaacagcccatggcaaacgccgcagatgaccctatggcagatgaagccggagtagaagatgccttcacacaggagatcaatcattcgtacgtccctagataccatgtgttgagttggatggaaactgtggaggggatggtggccggtgtggcgtcgcttccgccggtgtatttgatactgaacagagatcttcttgagacgggatggggatggaagaggctggtgccctacagacctggttatgttgagttgcatgtgttcaagaaataccttggggactatttcgaccataatcgtgaagcttttctttgtgccgagcagaagcctgatccatttggatggattgttgctgaaaagagtgccctgattgctgcagccaaatcgtgcctcaagatggagaaggcacttctcaggtactgtgctagctttctcactcctgacgacaaaaggctgatcctccggatcaaggaccaggcaaagcaaatgatccaatcagagggtgatcaatctttgattgtaactatatgcttggagtgtattgcgaaggaggccgagttaatgtacaattatttgccttgtgattttgacaccaccgaagaagtcgccgtctgcaataaggttcggcatattgttttgactaaaatgctctacccctctgatgggactgctggtgctgctgggcccatgatgggtatcacaacagaggctaagtccatttttgacttgnnnnnnnnnnnnnnnnnnnnnnnnnnnnnnnnnnnnnnnnnnnnnnnnnnnnnnnnnnnnnnnnnnnnnnnnnnnnnnnnnnnnnnnnnnnnnnnnnnnnnnnnnnnnnnnnnnnnnnnnnnnnnnnnnnnnnnnnnnnnnnnnnnnnnnnnnnnnnnnnnnnnnnnnnnnnnnnnnnnnnnnnnnnnnnnnnnnnnnnnnnnnnnnnnnnnnnnnnnnnnnnnnnnnnnnnnnnnnnnnnnnnnnnnnnnnnnnnnnnnnnnnnnnnnnnnnnnnnnnnnnnnnnnnnnnnnnnnnnnnnnnnnnnnnnnnnnnnnnnnnnnnnnnnnnnnnnnnnnnnnnnnnnnnnnnnnnnnnnnnnnnnnnnnnnnnnnnnnnnnnnnnnnnnnnnnnnnnnnnnnnnnnnnnnnnnnnnnnnnnnnnnnnnnnnnnnnnnnnnnnnnnnnnnnnnnnnnnnnnnnnnnnnnnnnnnnnnnnnnn

SEQ ID NO: 4937 - DNA, 1024 bp, Zea mays
  misc_feature (479)..(479): n is a, c, g, or t
  Peptide Sequence Number=SeqID_12611
  Probeset Number=SeqID_19340
ctcccgctcgcccggccggagttcctctgttcggccatggccgccgtcgagcttcctgctcgcgcctatctccctcccatggcgcgccctcctaggtcggatctcgctcctgttcgccggcgtttctccctgcgccgtgctccctccagttttcctcagcgccgccgtgcccagccgtggagtccctgcgcgtgtgtcttctccgctcgccggcgcttctccctgttgcgcgcgtcgatctccagcgccgtgaagcttcttccccgcgcgcacatggctacataccgccgttgctcatctctccatcatcgcaatttctggtgtcgactgccatggaatccagctcgtcagcacaagcacctcgcctgtgttttccccgtcacgccatgatgcttggccgcgtcctgcgcgcagagctgttcctgtcgcgtccttagcagactcgcaccctccgtggtatgtctgctcgtctattctgncggcctgtacggacacggggtctcacttgagtcgcgctgccgttggacgtgacgcaacacaggggttggctctctgctctgtccagctcgtcgagtccctagaatctgtcatagtcggtgcccaacatcttcgtgtcgcccttcgtgtgctgtgacaccccattgctcctcgtcgtcaattcacgccgcgtccgcgacgtgtccgtcgattccgacgatctatcttccagttgcgcgccacttgtgttgagctccgaagccccctatcgtgctcgaccctggaggcctctaactcgtcaacatcccttgcgtcgtcgaaaaatcccgagagtttggataaagcaacaaatcctgtgtggtgctcaccacgtgctcgacgtaatggcagaatcagaaatcgtagttgtgctcgtggccttgaaaaacgctttttttaaaaagaagctatcgtcgctctcgcttttcgttttagtatttctatcggctagttaatagattttctagtgttattatgtcgatttggttaattgatgaagtcgatgtcc

SEQ ID NO: 4938 - DNA, 254 bp, Zea mays
  Peptide Sequence Number=SeqID_12612
  Probeset Number=SeqID_19341
tataggatacccctgtcatatacacaaaggagagccttttaaacaatgtcttggctgctattcctccaaagcttacaagtgaggagtggtcagctgcattgccaagggcattagttgctggtttcgtgaaaacagataaagacttccaaacaaaaataagaactatggaaagccatcgcatgcgtgtaggtgctcttgcatggagttctttgctttcttctagaagccgtgataggagcatcctccaccatgat

SEQ ID NO: 4939 - DNA, 508 bp, Zea mays
  Peptide Sequence Number=SeqID_12613
  Probeset Number=SeqID_19342
cttggatcctctagtagcgccgccctttttttcccttttgcctaaatcctttttttttttttttttttttttttgtgtttcttcaggcaatgggccgtgcgcacggcgcttctccatcgcagccattagtttcctcaaggggacgggggggaatgtcaatctatcggcgcagcgcgaatcgcctatccacgcctgtttggtctggccaaagaaaataggggaacagtcctcagggcagcacgagcgtcaggggtccaacttccaaggctctctcatataccgtaagctggggctctagcaggtgcatccgccctttcaccaccagatcagccgcctacacaatgaatggagtcccactagatgtcttagccttcgaattgagcacctgaggtttgtgataacagttcccgtcagtgaatcatcgaccgagatgccgtacgcacgaacctgcagtttgcctcgagccgaattccgagcattacgtgcgcgatgcatgcgacgacatagc

SEQ ID NO: 4940 - DNA, 765 bp, Zea mays
  misc_feature (1)..(98): n is a, c, g, or t
  Probeset Number=SeqID_19343
nnnnnnnnnnnnnnnnnnnnnnnnnnnnnnnnnnnnnnnnnnnnnnnnnnnnnnnnnnnnnnnnnnnnnnnnnnnnnnnnnnnnnnnnnnnnnnnnnntacagtagtgtactgggataggggtactgctacagctcagtggagagttgagtcgtgcagtggatcagtggaaatcatgtatgttagtgtcaacgacgaggatgaggccacagatcatacatacactagttgcatcatcttgggtacgtggcatcctgtgctgtacgggaaggggagaacgttgctatctggccgtgctgtttcgcggcacgtaacaacaactgttttgtgtgttataatttgtggagaagtgtcttgcctttttatattatcatatatttttttttataatctttatatttctattttattttattcggttttttctattttggtatttatatcctttcttaattttttattctaatttattatttttcatttcgttattctttttataatatttttcttactttattattttattctttattaactctttttttttatattaatttattttatttatattctttcttctttatttatttttattttcacttattttatattatattatattattacttttatttttttccttattattattttttatctttttttttttaatttttttttcttttacttatttttattttttttgttgtattttatatttttttctttctttctttatctatttttttttttattttctattttt

SEQ ID NO: 4941 - DNA, 392 bp, Zea mays
  Peptide Sequence Number=SeqID_12614
  Probeset Number=SeqID_19344
cccttagactttgggtgggggtgttttttaaaaaaaggtggctgtattaactaaaacccactcaatccatgtagattgcgagccaaacgaactaatctctaacatgttattagaacgaagtattactacaaacttacattacatagcaaagctcggataacgggttccctctaacatgaccataacttaacatggggatatatatagcaggtcccaatggaataaatagaattctttaccggcactcctaagagctttcagatgccgacaccactttggccacctggaccagcatgaaaccttctccggcaatcggttgggttcctatgcagccaggaacccacctctcgggatctgggaattgtccaaaagtcaccccccgggctttttgt

SEQ ID NO: 4942 - DNA, 737 bp, Zea mays
  misc_feature (593)..(593): n is a, c, g, or t
  misc_feature (597)..(599): n is a, c, g, or t
  misc_feature (601)..(737): n is a, c, g, or t
  Probeset Number=SeqID_19345
gtaccggtgcagaattcgcgggacgattcacgggtcgaggcacgcgtctgcacacgcgtccgcccacgcgtccgctaaagcgagcggcggtcttgcaccaggagttgctattcccaacgttgctgctgctggggagcagggacagcatatcacaattataacccttaacaaaaagggcccgttaaaggttctgctccaactggtaatggcccaagcaatgtgattaacaacacaaccagcatgccccccggcagaaacaacagcttcaagtcggtgagcagcagtccagctgctgctaccggtggcattgcggtgaactcgaaggtcgacgactccttccatcaactggaggacctcgacctcgacggcttgatcacaaacgaactgatggagagcgggttgttcggcgccggacaagggtggtgagcatgtcccaccacgcctcacactactacccgagctccttcacggaaagcgccaagcaacaatataagctttgccacccttctctttcgggagtttttgtgttgacagtttcagatgatcgtgccataaacagtaggtaaggtagcgagttgttttcctccggagtngggnnngnnnnnnnnnnnnnnnnnnnnnnnnnnnnnnnnnnnnnnnnnnnnnnnnnnnnnnnnnnnnnnnnnnnnnnnnnnnnnnnnnnnnnnnnnnnnnnnnnnnnnnnnnnnnnnnnnnnnnnnnnnnnnnnnnnnnnnnnn

SEQ ID NO: 4943 - DNA, 247 bp, Zea mays
  Peptide Sequence Number=SeqID_12615
  Probeset Number=SeqID_19346
aaaaataagttccaggccgcttcgaaccaggtgaattttgtctaacagaaatagaggctatttgatcgggctactgggacgttatatgataacagtcgatgggctgaaacagaagccccacggattcgggaatttcatatgtcagcacggtgccaacgcaagctaaaatttcccttaaagggtatactacgggcccaggagggctgctgcctatcagtaaggggatcatttttggacagctggggcg

SEQ ID NO: 4944 - DNA, 429 bp, Zea mays
  Probeset Number=SeqID_19347
attcggctcgaggggagctcgcttgcgagcgttttcaaaacgggtggggcagcatgatggacccggaagtcgaatggattcccttgaagacaacggtagccgcagacataatcaccccatgcaccactgcgctgctccagtggtacgagcgctcaggcctaacggggggcagcttctatacctccgaacataggcggcttctgtgattctttgcgatcacctctcagccgtgtgaagcacctccgaggacgtcgccctaacgtgttcagagagaacacctcgccaaccagcgtgcgctcagaccgatgtttgcatcaagcgtgactccacgtgggggggccattcctcagacgtcatcagcctcccatgcacccgcggtgggcatgggacaacctctactagtcgggggaaaacttttcgtcttcaata

SEQ ID NO: 4945 - DNA, 408 bp, Zea mays
  Peptide Sequence Number=SeqID_12616
  Probeset Number=SeqID_19348
aaaagaatttcccccctggagcaccaatggccatgagtctctctacgtgaattggccgctttattagttcagctggtactcccgcttgtcccggtgcaaaattgattctcagggcatcgcacttaatattagttggctgcccctttatgcatcccaggcttttacgcttgttggcttccggtttgtatgatgtgtgggattttgacgccgcaacacaaggcgagcagagtttcagcatgccccgagtcaactcagcttggcctcaaagttcgagtatgtttgttcacatcagggctcatagcctagcgtaatacacttctcgcaaggcaaacagaagcatggccgtgcagcccacagtgcccgagcttctgtaaaatttttcgatagcaatctgccctcgagccgaat

SEQ ID NO: 4946 - DNA, 555 bp, Zea mays
  Probeset Number=SeqID_19349
tatgacgacacctaccgcgttgccaacaccgggggagccttttaaaatactgggggttttcattaaccaagcaatgaagcagatgtacctggcacgtcctttgctttcatatatacagcctcactcgatcgatcagtgactgctggtgttcagacgacatcccaaaacaaatgccggcgttggttaaggcgagcaaactccggcaatgcgacgtcaccggcgacggcgtcgaggtggtaccggtgccgctgctgccacgggcaggcgcatttgcatgatccatcatccatccaccgcctactctcctaccgtatattttgattgtatcttgtttcttttctctctctaaaaataataaaggagagcatgcatcatcagtttccattggcgtaaaaattattttctttagacgagggagcgtaacaacacaaatcacctgccaacactcaatgtaacgccccctcgaaaacacattgtgattttatttagctataagtattattgtaagcaagcttgtgataatataataagcaatcgaccacttgcatttgcgcc

SEQ ID NO: 4947 - DNA, 445 bp, Zea mays
  Peptide Sequence Number=SeqID_12617
  Probeset Number=SeqID_19350
ccggggcgagcccacgccgtaccgcttcgatgcccaacatggtgtggcggctggcggtctggcgggcccggcgtgatacggcaccccctcctcccgcccccttatgcaagctggcaatcagaaactccgatcaacaccgcacgcgcggcacgccagtgtcgtcttcgcaaccatgaactccatcgagcctttcaaccggctggtgaggctggcggcccgcgccttctacgacgtctccatgaagggcgacaaccagcccaagacttcccgcggggacaaccgcggcatggccgtcgtcgtcctggacgcgctcaccagtcagcaaaaaacgcaaaagcacataatgctgcagctgctaatgatggtcaaccaattgctaaggagggagaagagaaagtaaagctgcacacacattcatactgttgcttggattatgctcagatct

SEQ ID NO: 4948 - DNA, 955 bp, Zea mays
  misc_feature (780)..(780): n is a, c, g, or t
  Peptide Sequence Number=SeqID_12618
  Probeset Number=SeqID_19351
gggaagggcaagggcgaaaacaaaaatagacatacacatatacatacacgcatccacatcatcgccatagaacttgacacaatcacacaactagtacggtctacacatacatacaacaaacatccatgtctatacatacataattaattaacatatgaagtcacagcacccggcctcaagaacatggcaggaggggtcggttattacagggtccacagacgagtttaagcttgtcgaatcgtattaaaattcatatatccacacggtaagaaagttatatgcagtatgcatcactagtctctcttccagccagccaccgagcaccgtgtatagcactcggcggtcaagtcttcattctgctccaagcaactggtacctctcgagaacaaattttcctcccttgtatttatgactcctgtcacgtgcagcctagtatttccatccatcaatctgtccgcatccacctcaaaatatatcagaaacggaatacatccctgtgatcgtcatccggtcttctttctctccaacggttacattgtcagcattatggaagaggtaatcctttccgttctctcaatggaagctctaggtgatgatgttgtcgctgacggagaagagcgtcgcacaacgctagcagcagtacatgtttgcgtgctcgtagtagacctcaagaggcgcagcatcagcacgggaagtgtatctgcatcaggtgaatcgttttgttgtgtcactgacggtgttactgctaggtggcagtcgagttgctggtcagcacggctncagttggggtagtcgtcgttcggagggggtgtgactaagcttgagaggaaggagtccatcggcgatcgctgtcggttgtcctgccttatcgtctgtctgcttggagcaggttcttactacctaggtgtgaggtcggttctaatggcagtcccggccggcctcgaggtacccaatg

SEQ ID NO: 4949 - DNA, 1156 bp, Zea mays
  misc_feature (1)..(529): n is a, c, g, or t
  misc_feature (1130)..(1156): n is a, c, g, or t
  Peptide Sequence Number=SeqID_12619
  Probeset Number=SeqID_19352
nnnnnnnnnnnnnnnnnnnnnnnnnnnnnnnnnnnnnnnnnnnnnnnnnnnnnnnnnnnnnnnnnnnnnnnnnnnnnnnnnnnnnnnnnnnnnnnnnnnnnnnnnnnnnnnnnnnnnnnnnnnnnnnnnnnnnnnnnnnnnnnnnnnnnnnnnnnnnnnnnnnnnnnnnnnnnnnnnnnnnnnnnnnnnnnnnnnnnnnnnnnnnnnnnnnnnnnnnnnnnnnnnnnnnnnnnnnnnnnnnnnnnnnnnnnnnnnnnnnnnnnnnnnnnnnnnnnnnnnnnnnnnnnnnnnnnnnnnnnnnnnnnnnnnnnnnnnnnnnnnnnnnnnnnnnnnnnnnnnnnnnnnnnnnnnnnnnnnnnnnnnnnnnnnnnnnnnnnnnnnnnnnnnnnnnnnnnnnnnnnnnnnnnnnnnnnnnnnnnnnnnnnnnnnnnnnnnnnnnnnnnnnnnnnnnnnnnnnnnnnnnnnnnnnnnnnnnnnnnnnnnnnnnnnnnnnnnnnnnnnnnnnnnnnnnnnnnnnnnnnnnnnnnnncattaagattgaatgctgtctatgttccagataccgtactttgacgataacattggttttcctacaggagttcaagatcgcagtcctgcccattctgccgtgacaacctgaagaagacctgtcctagtgacctgtggatctatgttgaggaccaagatgtggtcgacatggagacggtgtcgagcgagaacctcagacggctgttcatgtacataagcaagctgcctctgattgtcccagacgtcatcttcagcgtgtatgattcccaaatcaaatgacttccgacgcgaccttcccgactgaccttcagccagtgcccagctccagttaatcttctttccccatgtcctccgttttcatgctttgctcaagctttgggaagtgcctgagctgttttggaaccgcaagccttccggtggtgctttagaaacttgtttagtgcctgctttaatcctttatcatatgcagcctctttgtagatatctttcttggctcagttaatagggggctgtgcttgccccaaatggaggcagggccgtttgtgtctttctcatgtttccattagcgaagcaacgcaaagttctgggcattggaaggtttnnnnnnnnnnnnnnnnnnnnnnnnnnn

SEQ ID NO: 4950 - DNA, 704 bp, Zea mays
  misc_feature (87)..(87): n is a, c, g, or t
  misc_feature (115)..(115): n is a, c, g, or t
  Peptide Sequence Number=SeqID_12620
  Probeset Number=SeqID_19353
aaaagaaaataaatctttcccataaaaaaaaaaaaaaaaaaacccccccccgaaaactttttttttttttaaaaaaaagagaaaaanaaacaagagaagggggcgcgccccccanaaataaaaaaaaaattgttttttttttttcccccccccccaaaaaaaaaaaagaaaggcggttttttttttttttttaaaaaaaaaagggtacccccccggggggaaaggggggcccccccaaaaaaaatttttttgttttgtttttagagaccccccccggcggaaaaaaaacacgtttttttttaaaaaaaaaaaaggggcccccccccaaaaatttgtgtttttaaaaacaaacccccccccaataaatttttaccaccctcttaaaaatcccccttcccccaaaaaaaaccccccccccccggtttggcgaagatttggtttccaaagaatccaaaagccccggggaatgtcccttatgtgggccctttaatataggacccacctgatgttttcataatcctggaacaggaaatgtaccccttcacatttctactagagtcgatgttcttcgtaggccattgtggcctggtttgcacatttactgggcatgtatttgtttatattctgacatcccgttattgagctaaaaaaaaaaaaaaaaaaaaaaaaaaaaaaaaaaaaaaaaaaaaaaaaaaaaaaaaaaa

SEQ ID NO: 4951 - DNA, 611 bp, Zea mays
  Probeset Number=SeqID_19354
aagaaaacgacaaaccaaaaaaaaaaacacaacaacaacaaaagaaaaaaagaaacacaccacaaaaaaaacgcaaacaaaaaaaaaaaaacacaaaggaagaaaaaaaagaaaagccccaaccaaagaaaaccacgaacaccaccaaacggaagaacagacccgccaaccgaccgcaagggacaccaagcaccagcgagaaccggaacgacgcggccagcgcggagaccgagccccgggcccgcgcccgcgcccgcggcgacgaaggcggaggcgatgaacagcgccagcacggcggccgaggagacggcgaaggtggggtgggacgggcggaacacgacgtagagcaccagcagggtgatccccgcggccaggagcaggacgaggacggcgcagcagagggcgcggaccgcgcccccgccctcgcccccgccgtagtagtagctgtaccgggggctgcggcgccaccagcgcggcttcaggtcgtcggcgtggacccccttcctcccgcctctgtggtggtccgcgtgcaccggcgggaggcggcccgcccggccgccaactgcacctgcgagggcttggcacctcgactctcggagcaagtggtgtga

SEQ ID NO: 4952 - DNA, 1049 bp, Zea mays
  misc_feature (1)..(444): n is a, c, g, or t
  misc_feature (1045)..(1049): n is a, c, g, or t
  Peptide Sequence Number=SeqID_12621
  Probeset Number=SeqID_19355
nnnnnnnnnnnnnnnnnnnnnnnnnnnnnnnnnnnnnnnnnnnnnnnnnnnnnnnnnnnnnnnnnnnnnnnnnnnnnnnnnnnnnnnnnnnnnnnnnnnnnnnnnnnnnnnnnnnnnnnnnnnnnnnnnnnnnnnnnnnnnnnnnnnnnnnnnnnnnnnnnnnnnnnnnnnnnnnnnnnnnnnnnnnnnnnnnnnnnnnnnnnnnnnnnnnnnnnnnnnnnnnnnnnnnnnnnnnnnnnnnnnnnnnnnnnnnnnnnnnnnnnnnnnnnnnnnnnnnnnnnnnnnnnnnnnnnnnnnnnnnnnnnnnnnnnnnnnnnnnnnnnnnnnnnnnnnnnnnnnnnnnnnnnnnnnnnnnnnnnnnnnnnnnnnnnnnnnnnnnnnnnnnnnnnnnnnnnnnnnnnnnnnnnnnnnnnnnnnnnnnnnnnnnnnnnnnnnnnnnnnnnnacagaaggcacgttgggagatagtattatgtattcaacttaaaatacacctcgtcaaaacaacctgtcaaacagtcttcataaaattgcaagttttgttgtcgaaaatacaagtgacattttcttatattttatagagttacctccaattattttgtctatgagtgattgcaggtttgatatggcttgagttaacctgtttatacaatataatttattgccttttcgtaggtgacggcaatggatcctacatacttcagaaccttggcagttcagaaactgggtcaaagaaagcaagaaaagctaaatactcaatagcactacaatatcttgttcttgaagagaccagcacctaaaaattctgcatttttctattacagttcagttcccaacagagatcataggacccgacagttagttttatgcttttagcatactgagtgtaacaacaatttccttttttatggttctcgtagctgcacttgagttagttgtatatgtaagtttgcacctctagctgatatgggtgttttgcatttgcaccaatccacaactgggtttgatatgctatgctgaacatcagtgagcaccacaaattttcnnnnn

SEQ ID NO: 4953 - DNA, 740 bp, Zea mays
  Peptide Sequence Number=SeqID_12622
  Probeset Number=SeqID_19356
gatcctcctgccagtgccaccaccctcggacctgcaccagcacttcggcgagctcctggagagcaaggatggagcggacgtcacgtttcgtgtctccgcctccggagagtccttcgccgcccacaaggtcatactcgccgcaaggtcctcggttttcaaggccgagttcttcggaggcgtgcaggaacaggaaagaagctccgcttatgtgatcagagacatggaggctgctgtgttcaggtccatgcttcgcttcatctatactgacatggcgccagagctcgacggtgcccaggagcctgacgcggcggcggccatggctaagcacctactggtagctgctgacaggtatgggctgaaccggctgaagctgatgtgtgaatgcaagctctctggtggcatcgacataggcacagcggctgcgacgttggctctcgccgagcagcacaactgctcactactcaaagccaagtgtcttgagttcgtcactaagtcgcctgagactcttgatgctgtcttggcaactgatggctacgcgcatctggtggcaaggtgccccttggtgctgactgaactagtgagggctgcgtgtggaaggaagatctgagctcgcgatgatggttttcgttgacagtcttagtattactactatcttcctcatgcatgtaacgagttgcttcgtttctcgtattatggttatggtttcccttggatgcatgatgaactagtgcttgcagggg

SEQ ID NO: 4954 - DNA, 307 bp, Zea mays
  Peptide Sequence Number=SeqID_12623
  Probeset Number=SeqID_19357
agacgctcaagctaccagacgactccgtggacggctacgtcctcagctttcgcaaccctgagatgaacgcagggatccctggtttggattttccccacaatgctgaaatgaacttcggttttcgcggagatattctctgggattcatggtagttcagctgatttttgtgttggaactttggtataatgcttgaggtaggtgacactctgggctttcatatatatgacatttgacaagttgaaaagttgcctggctgtgttttactatcaatgttgtacttgtacatagcatgaatattattagaaaa

SEQ ID NO: 4955 - DNA, 448 bp, Zea mays
  Probeset Number=SeqID_19358
acagctgaattgtagcaacattagagtgttccgccggtccgctcacacctccagctcactctttagttcaacattggtgtgattttcgatttgtaaaactaatcagtaatcaccacatggtcaagattttgtagtatcagatagttttttctcaatacatggggctctatgcatggaagcttatgaaaaaaaaaaaaaaaaaaaaaaaaaaaaaaaaaaaaaaaaaaaaaaaaaaaaaaaaaaaaaaaaaaaaaaaaaaaaggccccctgcccctaaccctttgggggagatttccaccactgtgggggccgtttataggggacccgacctgggcacaaagttgggcgaaatcagggccataggtgttccctgggaaaaattgttatgcgctaacattcccacacaatataggagccgaaagcataatgtgaaaccccgggggcccct

SEQ ID NO: 4956 - DNA, 844 bp, Zea mays
  misc_feature (1)..(6): n is a, c, g, or t
  misc_feature (697)..(844): n is a, c, g, or t
  Peptide Sequence Number=SeqID_12624
  Probeset Number=SeqID_19359
nnnnnntccccaatggagcatcagatattcaggagttaagcatgcttaatataaggtcgacgatggtggcaccacagctgatattgcagctagaacccttctttccatgtttcagcatagttctgaatgtgttgctcatcgccctggaagcagcaaccagacagcagctcagaaggtggacgacgagcctcagccttcgttggactcgttcgagaaaaccgtgttggattcagaggagaccaaagatgacgggcgatccttcagcgtggcgccacctttcaaggaagggccagcgtgtcggatcaagctaaagagagggaggggcatgagaaatttccagagggagatagttcctgggctccttctagggaggcaggagatatgcgaggacctgaaagctataggttacgaggcaaagaaggctcggtctaggaaacctcgcaagggtccaggtgcgtcttcggctcgacccaggccgcgcaagcgtggagctgccaagcactgaccaggagcatctgtgcgttccgtggcagggcgccatggggcaggcgagatccagaaagaggagagagttcgttctaaccatgtgaatatccattcgcgtgtatcaagcctagtttcaaactcccggtttgctagtggatatttagttgggggttggatatcctaattctttcaccttttctctgatatatannnnnnnnnnnnnnnnnnnnnnnnnnnnnnnnnnnnnnnnnnnnnnnnnnnnnnnnnnnnnnnnnnnnnnnnnnnnnnnnnnnnnnnnnnnnnnnnnnnnnnnnnnnnnnnnnnnnnnnnnnnnnnnnnnnnnnnnnnnnnnnnnnnn

SEQ ID NO: 4957 - DNA, 1992 bp, Zea mays
  misc_feature (1)..(865): n is a, c, g, or t
  misc_feature (1981)..(1992): n is a, c, g, or t
  Peptide Sequence Number=SeqID_12625
  Probeset Number=SeqID_19360
nnnnnnnnnnnnnnnnnnnnnnnnnnnnnnnnnnnnnnnnnnnnnnnnnnnnnnnnnnnnnnnnnnnnnnnnnnnnnnnnnnnnnnnnnnnnnnnnnnnnnnnnnnnnnnnnnnnnnnnnnnnnnnnnnnnnnnnnnnnnnnnnnnnnnnnnnnnnnnnnnnnnnnnnnnnnnnnnnnnnnnnnnnnnnnnnnnnnnnnnnnnnnnnnnnnnnnnnnnnnnnnnnnnnnnnnnnnnnnnnnnnnnnnnnnnnnnnnnnnnnnnnnnnnnnnnnnnnnnnnnnnnnnnnnnnnnnnnnnnnnnnnnnnnnnnnnnnnnnnnnnnnnnnnnnnnnnnnnnnnnnnnnnnnnnnnnnnnnnnnnnnnnnnnnnnnnnnnnnnnnnnnnnnnnnnnnnnnnnnnnnnnnnnnnnnnnnnnnnnnnnnnnnnnnnnnnnnnnnnnnnnnnnnnnnnnnnnnnnnnnnnnnnnnnnnnnnnnnnnnnnnnnnnnnnnnnnnnnnnnnnnnnnnnnnnnnnnnnnnnnnnnnnnnnnnnnnnnnnnnnnnnnnnnnnnnnnnnnnnnnnnnnnnnnnnnnnnnnnnnnnnnnnnnnnnnnnnnnnnnnnnnnnnnnnnnnnnnnnnnnnnnnnnnnnnnnnnnnnnnnnnnnnnnnnnnnnnnnnnnnnnnnnnnnnnnnnnnnnnnnnnnnnnnnnnnnnnnnnnnnnnnnnnnnnnnnnnnnnnnnnnnnnnnnnnnnnnnnnnnnnnnnnnnnnnnnnnnnnnnnnnnnnnnnnnnnnnnnnnnnnnnnnnnnnnnnnnnnnnnnnnnnnnnnnnnnnnnnnnnnnnnnnnnnnnnnnnnnnnnnnnnnnnnnnnnnnnnnnnnnnnnnagagtgatgtaaaatgtaaatacatagaaacttgttaaacagataacatggaacttgtacaaaaaaacagctggattcagcacaactttgtcattcagactcagttccaaattctggttagaacaccacccagcgagttaacgtgacatcacaccagaaatttccagcgcctgatgaaattttactacataaactgaatttagataacaataaacagcaatctggaaaagactaaccacagctaaccaaagcaactcgacattttctccacacaacccaagataaaaggtcagtaggtcacagcaccacaaaattacttagatatgcaagtctatgcgaaacctagtataaacgtgcgtgtcagtaggatgctacatcccaaacatcatagtgaaggaaacaagtgtgcatcacacctatacccaacaccaagaatgaaattggtcttaatcctgaacatcagtgacccagacagaatgagcaaataaaagcatgattcctctaccccttaaagctccagtcggcagtgatgggctgatggcttcaccacgacaccaccccaccctaccatgtctagtcactatacatggtctacctgatgcatgattgtatcaacatgtatacatgtagtaatagcctaatgcttcttttccttctaacactggtcagagtatcattggaactgcaagtaatagcctaatggtgtgtttggtttgtggagtcactctatgcttcatgaggtgatgcatcataagttcatttcatcaattttggtggaatcaacccactcctcatgtatatactaattattagcttatgaggaatggggtggtgatggatcaacccattctattccacaaaccaaataaaaaagtgaggagtgagaagaagatggattacttcattcctcacaccaaacacactatttatcacttcacatgttctgctgctacccatcagggcaagctggggagtgtaacttcatcaaaggagagaaagctgacccgtccattatccacatgagcatacttcagaggaatgcctctgaaatcacgtgcactgcttccaattcaaccttgagggcggtttaccccttaatagacataagaggaaacnnnnnnnnnnnn

SEQ ID NO: 4958 - DNA, 1622 bp, Zea mays
  misc_feature (1172)..(1172): n is a, c, g, or t
  misc_feature (1622)..(1622): n is a, c, g, or t
  Peptide Sequence Number=SeqID_12626
  Probeset Number=SeqID_19361
gtttttcttttattcccctccactgctttgcgcttgcgcctacgcatcgccgccccgcctctagttctctctgtcctcgtcttcctactgtaaaccacctcgtccctatccgcggcaaccgttcaccgcgccgcgaggcctgctgatccgaccgacctccaccgtcatggctcccctgcgccgcgcgtctcgcctccttcgatcagccgtctgccggctgaggtctccagcgccggctcgggccttctccagcgccgcggcgaccgagacgggtgccgtgatcgccgctgctgccgtggcggtggccagctccgggctcgggctgtggctgaaaccgccgtcgcttgccgactccggcgaggcgcccggcgaccagatctcggtcgcctgcgccggcgccacggaggcgcgggaggagaaggggtggttcctgttcgcagactcatttcgtagaagggtcttcttcaactacgagaagaggatacggcttctcagtcctcctgagaagatttttgagtactttgcgtctgtgaggaatcgagaagggaaagtttacatgttgcctgctgacttgatgagagcagtagtccctgtttttcctccatcagagtccacggtagttcgtgaaggaagattaaggggggagcggagccctggagaattgcactgtgctccatcagagttctttatgcagttcgacacaaataatgatggcctcatctcctttgctgagtacattttttttgtgacattgctcagcattcatgagtcaaatttcactgtggccttcaaaatgttcgacatcgaccacagtggttaatttatctcgccaagaaaaaagacctgctcgttatgagcatgttcaatcatctgacttgtttgttgatggtaaaagaaggggtgatagacagagaagagtttaagaaaataatggcactgatgcggtcctttaacagacaagggtcgactcataaggatggtttacgtattggacttaaagttggcaagcctgtggaaaatggtggggtggtcgagtacttctttgggagtgatgggaatgaacctctacactttgacaagttttctaaaattttgaaggaattgcatgatgagattattcaactggagttcagtcattatgatgtcaagtcgtctaaaacaataccagcaanaggattttgcattgtccatggttgcttctgctgacatgaaccatatcaacaaactgcttgatagagttgatagtttggtcaaggagccagatctgaaggacatacgcatcacctttgaggagtttaaggcatttgctgatttgcgacgaagattggagccactgtcgatggctatctttgcttacggtaaattgaatgggttattgacgaaggaggatctaaaacgtgcagcgcaacatgcgcagaaggtaatcaccaagcagtgcattgctgatcgttacaacggacttcactgtatgtcgtcttggtggccgaagcttgactagcagtaacagctgtaattgtaaatcgtgtcctctgtagccctaggactgagtgatatacattgttattctcacgtgtaaattaaaccccatatggccatatggcttcaatatatgaaacattgcn

SEQ ID NO: 4959 - DNA, 1635 bp, Zea mays
  misc_feature (1635)..(1635): n is a, c, g, or t
  Peptide Sequence Number=SeqID_12627
  Probeset Number=SeqID_19362
atccatctatcgcttgtgttaattatattgtatcctccctgcctccgtcccaatcttcctccctccctccgcttcgccaaaccctagttactcgcaagtcgcaagacaatggagccgcagccaccgctccccctcgccaacggccacggcaacagcatcgtcgaccgcgacgtctggctggcctgcgccgccccgctctcccgcctccccaccgtcggcgacgatgtctactactttcccgatggccacgccgagcagtgccccgcgcacctgccagcgccgctccccgcgccgcacttcttcccctgcaccgtcaccgacatcagcctcggcgcggacgacaagaccgacgaggtgttcgccaaaatctccctcaggccaggcctcgccgccgcttctcgtccggaccccggcagcagcaacagcccgccgcgggagcccctcagctactccatcaaggagctctcgcagagcgacgccaacggcggtggatccttctgcgtcccgcgctactgcggggaccacgtatggcccaaggtcgacttcgaggccgacccgcccatgcagaacctcgtcatgcacgacaccacgggcaaacagtgggagttccgccacgtctaccgcgccaagcagccccgacacgtgctcaccaccggctggagcaagttcgtcaacgccaagctgctcgtcgcgggggacatcatcgtcttcatgcgccgccccaacggcgacctcatcgtcggcctgcgccgcatgcccaggtacgcgggcaccttgcaccgcccggggaccgggggcgacgcccaagacccggatcagccgcccccgcccccgccccgcaacgcgctcgcgcgggtgccgcccaaggacgtcatggaggccgcgcgcctcgccgccgagggcaggcccttcacggtcacctactacccgaggaaggccgccggagagttcgtcgtcccgcgcaacgaggtggaaggcgtgctcgacaccctctgggagccaggctcgcacgtactcatgcagttcgcggaggccgaggacacacggcgcaccatgtgggccgacggccacgtcaaggcgatccaccagaaaatctggcgggcgctcgagatcgactgggatgttgcctcctctgcaatttcagcacaactgggcagatttgtgaatgcttggcaagtccagcgtattgcctacccttctatttgcggcggccttggagatttatgttacccactgccactgatggagtcggaaagccaggtcatggccatgatattggagcagatgccaccgcgtacaagtgcttctcctcccaacaacccgccgcgtccaggtccaggccaaaaagtgaacaccataatgctcttcggcgccacaatccacgttgtgcagagtgataccgacgatgatggttatgaacagctgaatcgagatcctcctcctaatgctgctggtggtggtgatgatatggatcatgacagtgctgaaaatatataaactctgattctgtaatccatccattgcttgaaaatttgcaattgcatcgtgtggaactaagcagctgtttggttgcccgcgtccatcggtgcatggcccatcggatgcaaaaataaaacgagtctagttgtttggttn

SEQ ID NO: 4960 - DNA, 2489 bp, Zea mays
  misc_feature (2489)..(2489): n is a, c, g, or t
  Peptide Sequence Number=SeqID_12628
  Probeset Number=SeqID_19363
ggacaagggtctccaccgcttcccctcccctcccctcccctgctctgctcctcgcctcctccctcccgaatcccgatcccagcttccctccttcctcccgcccacgccgccaaatcgagccccagccgcgatgagttggtggtggacgggcgcgatcggcgcggtcaagaagcgccaggacgagcaggcgggcggcgccgagccctcctaccagagcgtcgccctcgtcgtcggatccaccggcatcgtcggcacctccctcctcgacatcctcccgctctccgacacccccgccgggccgtggaaggtctacgccgtctcgcgccgcccgctcccgccctggtccccggcgccctccccggccgtcacccacctccacctcgacctcgccgactccgccgccgtcgccgaggctctccagcccctcaccgacatcacccacgtcttcttcgtcgcctggaccagccgccccaccgaggcggagaaccgggaggccaactccgccatgctccgtaacgtcctctccgtcgtcgtcccgaactgccccgcgctcgtccacgtctgcctccagaccggccgcaagcactacgtcggccccttcgaggccatcggcaaggtcgccgccccggacccgcccttcaccgaggacatgccgcgcctcgactgccccaacttctactacgacatggaggacatcctcttccacgaggtctcccgccgagacggcgccgtcagctggtccgtgcaccgccccaccaccgtcttcggatactcccctcgcagcgccatgaacctcgtcggcagcctctgcgtctacgccgccatctgccggaaggagggcacgacgctccggtggcccggctctcgggtcacttgggagggcttcagcgacgcctccgacgccgaccttatcgccgagcacgagatctgggccgccgtggatccgttcgccaagaacgaggccttcaattgcagcaacggggatctcttcaagtggaagcagctgtggccgatactcgccgaccatttcggcctggaatgggctggctacgaaggtgaggagaacaggttcaagctcgaagaggtcatggccgggaaggaagctgtctgggcggagattgtcagggagaacgaccttatagccacggagcttgacgagatcacgaattggtggttcgtcgatgccatgtttgctgtggagacccagcttctggacagcatgaacaaaagcaaggagcatggcttcctcggcttcaggaacactgtcagctctttcaacacatggatcgagaagctgaaggtcttcaagattgttccctaataataattcatccttgctattcacttctatactgttgttctgcatccttattatcctgctcatttatcagcaccagttctcctgtaattcaaacatcttgctatctgtgccaggtttgcatgttatatactagggaccaataaagatcaacacattgcaaaataggttattcttgtccagcatgggtttgattgaaattgtttgtgtattgaattactagctgaaaccgttcttgtttacgagcattcttgtataaggctgcttctttcattacaaacattttgagaattaaatcttttattttggcactaataaaaaaaaaaaaaaaaaaaaaaaaaaaaaaaaaaaaaaaaaaaaaaaaaaaaaaaaaaaaaaaaaaaaaaaaaaaaaaaaaaaaaaaaaaaaaaaaaaaaaaaaaagggggggccccttttagaggacccaattttcctcccccgtgcttccaaggtattagtttttttttggggcccccaaaattaaattaacgggccgggttttaaaaacgtggggccgggaaaaccccggggttccccaacttaaatccctttgaaaaaaacccccttttccccagttgggaaaaaaccaaaaaggccccccccgttcccctttccaaaaatttgcccaccttaaaggggaaaggggcccccccttttaccggccctttaaccccgggggggggggggtttccccccagtggtcccgttacttttccaagccccttagccccggttcttttgttttttttcctttcttttttgcccaggttcccggtttttccccgaaaagttttaaatgggggcccccttttagggtccctttttagggttttagggccccttcccccaaaaaaacttttttagggggggggttcccgttggggcccttccccctgaaaaacggtttttcccctttggccctgggagcccccgttttaaaaaggggccttttgttccaaacggaaccacccctaacccttattgggggtttttttttggattaaaaagggtttttgccattttggcccctttgggtaaaaaaaggacctgtttaaacaaaattttaacgggatttttaccaaaatataaccgctcccattttgggtggccctctttgggggaaatgtgccggaaaccccttttggtttttn

SEQ ID NO: 4961 - DNA, 703 bp, Zea mays
  misc_feature (344)..(344): n is a, c, g, or t
  misc_feature (561)..(561): n is a, c, g, or t
  misc_feature (695)..(695): n is a, c, g, or t
  misc_feature (703)..(703): n is a, c, g, or t
  Peptide Sequence Number=SeqID_12629
  Probeset Number=SeqID_19364
atttttagtgtttgttgttggagatgctctaacgtttccggaggccgacatggagcgtggccgcagcagcacctcttgccggtccttgctgctcctcctcctggtctgcttctcccacggcgccggggcggcggcggcggctcggctcctgactccactgcaggcagctgctgccgttcctcctcctctggctcttcaccaagcggagagtaatggcgccacggcggcagctgccgacgacggcctcgtgatgactcaggaaggtgacgctgacgccacgagcaatggcaacgacgacgacgagatctcctccgtctcagagtcagagacgatgacgggcgcanaggaggcgtgtgggacggagggcaacgacgaggaggagtgcctgcagaggcggctgctcggagacgcgcacctcgactacatctacacgcagcacaagggcaagccgtgagccgagcccgtgaccaatgcatctcggcctcggcctcgccggtttgcatggatggcttggtttgttcagagtgcgtacattacatgcatgctgctgggaagaagtcnatgacagacgatccatcaggctgctgggatcgaatctagtgtgtgcgtgttagctgttcatgacatgaatctctctctttctgtgtttggttgttttctcactgatgactgatgtatataggccggccggtgcncggtgtgn

SEQ ID NO: 4962 - DNA, 1277 bp, Zea mays
  misc_feature (1277)..(1277): n is a, c, g, or t
  Peptide Sequence Number=SeqID_12630
  Probeset Number=SeqID_19365
agagccggccggtcgtcgtcgatccacatcaccattactccatctcctgataccgatcgagagctcctccctcgctccgggctgagtcgccggccggacggactcctccgatccgtgcggcgtcaggccggcccgccagctgggacatcccgtttgattcatcagccgtagtaggagccatggtcgaagctatttgatctatctctgagctgagctgggccggtaatttgatgatgcttgccggtgtgatcatgagtggatgataagagatgataagcggcaacctcaccaatgaagacctgggggccgggcgcaccaaggccgaggggccgacgaccgcggccggggccgtcgtcgcaaagagtcccgtgctgccgagctcccggcactggccgccgtcgacggagtccaggatcgtgcgcgtgtcgcgggtcttcggcggcaaggaccggcacagcaaggtgaggacggtcaaggggctgcgcgaccggcgcgtgcggctgtccgtgccgacggcgatacagctctacgacctccaggaccggctgggcctcagccagccgagcaaggtggtggactggctgctcgacgccgcgcagcacgagatcgacaagctgcctccgcttcagttcccaccgcaagcggcgcaggacctcgtcgcccatctgccgccgccatccatggtggcgcccttcgcagccgaccgagccgacggcgacaaacgccactgccacggcggcgtcaaagggctcatgggcctcaacaattccatccgcctcgtcaacgccaccatgccgctggctcacggcttgtactacacgcccgctcgtcttctactcgccggaaggcggcggattcaccatgaaagaagaagccaccggttatcagttcccagtacaaaatagcctcgaccactcgcaaggccagctctcactgagctcagctagaagcttccttcgccccggcaaccagggatgattaggtcactgatctctactgctccaagaaggtacgtagaagaataaagcttggtgtagtagtaatcaagtactcatttgaaggttccgtaacggttgtaactgcagttttgagatgctattgtttggtatgatcgagtagagggtctctagcatgcataattgaggttatttttgcaggacatgcaatgcaattcgttgcttcttttttatacaaggaagcaacgacaggtcatatgggtgtgtgtttttgtttgtattgtaataacaattttaataatccattcttgattttgtgtn

SEQ ID NO: 4963 - DNA, 1806 bp, Zea mays
  misc_feature (1806)..(1806): n is a, c, g, or t
  Peptide Sequence Number=SeqID_12631
  Probeset Number=SeqID_19366
cttcactagaatcatgcctataataaattgttctgaagccacctgctccaccctccagacgtccttttttttgtgcacatctgtctgtctacttatattgcaattgcttcaaaatacgatcaatacataggtgtgcatgcatcatcagtcactcagtcttttgtcaaaccaatcaatggacccgttgtattgtatctgtgaactatgatgacatttgtttttgggaatgaatcatgatctggttatgtttgcttgcccttgggtactatatacgtttcaaataaataagcacatgtttactcagattactgtgccatttgaatgatataatatcgtaggttgtcaaggttgcagactttggggttgcaagggttaaagaccagtcaggagttatgactgcagaaacaggaacctacagatggatggcccctgaggttgattttgccaaattgcttgttattaaacattgagaaactcttacattaaaagcagcgtatgtgaaattcgttttagtgcttaaaaatgtggtttcatatcaagcggattacatattagttgtgcagtctgcagacagaatgcccaaaatgtgagaatttattccccctagaccaccttgatagttcgcatgaagcagcaaatttgttggggttgggggcctcagtgttatacctaaaagtttacttagttcctaatgtcacttttcaaaaaaccaagattaatttttttgagcagcttgcgatgcctcggctattgcaacatgactattttttttattctgtgtgatctacatcaatgctgcttcaccaagccaacaattctagcatcgaatatgattcgtttacttggtctgcagttggtgttactgttcctgtattgagctataaagtaccgggaaaaatcatttttatctgaaagtactttggaaaaaaataatccaagaaccttttgtgggatcaaatcgctatctcagctttagagtaaattagtgagctgtcaaactgaaggtagtccagcaaatgtttatcatttatttttagtttgccttcagtaatgcataacatataatttattggtatgctgggggtcaatgagctccttagctgtgatatgaatgtgccatcttcacaatgccatcagccttgtaccacatagaagtcaaaactagcttttgtttatgcatcacctcgttctactaaaaaaactgtgcaggtcattgagcatttgccgtatgatcatagagcagatgttttcagttttgggatagttctttgggagctgctgaccggaaagcttccatatgaagacatgacacctcttcaggcagcagttgctgttgttcaaaaggatctgaggcctactattgctgttgatactcatcctatgctcgctgagctactccagagatgctggcagaaagatcctgctctaagaccaacatttgcagagattgtggatatattgaactctataaaggaggcggttcggagttctgtgcatcacaaaaggcattcatgtcgatctcactccgggagaagacgaggctgttgatgtgccagttttatgtggtgccgcacgcccttttcattttatttttgtagtcgagcgataacttcagaatacggccagaagagcttactgtgttcattccgagaggttttggtaactttattttttttaatttggacttatgcttcaaggattttcatcgttaaaaagcttagaggtgcatatccacgtttacatttggcatgtatctgtatctcgtactcgttttcttaagtttggcaggcaaccaagattttaatn

SEQ ID NO: 4964 - DNA, 1247 bp, Zea mays
  misc_feature (1)..(2): n is a, c, g, or t
  misc_feature (864)..(864): n is a, c, g, or t
  misc_feature (907)..(907): n is a, c, g, or t
  misc_feature (911)..(911): n is a, c, g, or t
  misc_feature (913)..(913): n is a, c, g, or t
  misc_feature (921)..(921): n is a, c, g, or t
  misc_feature (923)..(923): n is a, c, g, or t
  misc_feature (969)..(969): n is a, c, g, or t
  misc_feature (979)..(985): n is a, c, g, or t
  misc_feature (987)..(987): n is a, c, g, or t
  misc_feature (989)..(992): n is a, c, g, or t
  misc_feature (1009)..(1015): n is a, c, g, or t
  misc_feature (1018)..(1022): n is a, c, g, or t
  misc_feature (1028)..(1037): n is a, c, g, or t
  misc_feature (1040)..(1040): n is a, c, g, or t
  misc_feature (1049)..(1055): n is a, c, g, or t
  misc_feature (1057)..(1057): n is a, c, g, or t
  misc_feature (1064)..(1068): n is a, c, g, or t
  misc_feature (1075)..(1085): n is a, c, g, or t
  misc_feature (1090)..(1091): n is a, c, g, or t
  misc_feature (1161)..(1164): n is a, c, g, or t
  misc_feature (1168)..(1172): n is a, c, g, or t
  misc_feature (1180)..(1247): n is a, c, g, or t
  Peptide Sequence Number=SeqID_12632
  Probeset Number=SeqID_19367
nnccggccggtggatcggcttcccgtcttggctgcatttttctatccccgcgtggccgcgtgtagtcctagtctctcgccagcaccatcatcatcaatcacggcggcgaccccgccccgcccacgctgcccgactggaaccgctaatccacttcgctgtgccgcctcgctcagatcccacgttggctgttgttgttgctctgctctcctcggccgggaaaggacgctgctgctgctgctgctaggctgacagcgacgacgagggagccatggctcagatcttgctccacggcacgctccacgccaccatcttcgaggccgagtcgctctccaacccgcaccgcgccaccggcggcgcccccaagttcatccgcaagcttgtggaagggattgaggataccgtgggtatcggcaagggcaccaccaagatatacgccaccgttgatctggagaaggcccgcgtggggcgcacccggatggtctccaacgagcccgtgaaccctcgctggtacgagtccttccacatctactgcgcgcacatggccgccgacgtagtattcaccgtcaagatcgacaaccccatcggggcctcgctcatcgggagggcttacctgcctgtcgaggacatcctgggcggagacgagatcgacaagtggcttgagatccgcgatgagaagcgcgagcctattggggacagcaagatccacgtgaagcttcagtacttcgacgtcggcaaggaccgcaactgggcgaggggtgtccggagcaccaagtaccccggtgttccttacaccttcttctcgcagaggcaggggtgtaaggttactctgtaccaggacgcgcatgttggggcccacttctttgncaggatcccgctcgatgatggcaagaactgcgattttttcagnttantnggggatancnttgatgccaggagcaggggggagcatcgagttaaagtcactggctnctcccccccnnnnnnngntnnnnttgccccctgtttgggnnnnnnnggnnnnncttttnnnnnnnnnngcngtttgtaannnnnnntncaaagtnnnnnattaaannnnnnnnnnnttttnnaaaaaaaaaaaaaaaaaaaaaaaaaaaaaaaaaaaaaaaaaaaaaaaaaaaaaaaaaaaaaaaaactcgnnnncggnnnnnaaaaaaannnnnnnnnnnnnnnnnnnnnnnnnnnnnnnnnnnnnnnnnnnnnnnnnnnnnnnnnnnnnnnnnnnn

SEQ ID NO: 4965 - DNA, 486 bp, Zea mays
  misc_feature (368)..(368): n is a, c, g, or t
  misc_feature (387)..(387): n is a, c, g, or t
  misc_feature (464)..(464): n is a, c, g, or t
  misc_feature (468)..(468): n is a, c, g, or t
  misc_feature (477)..(477): n is a, c, g, or t
  misc_feature (479)..(479): n is a, c, g, or t
  misc_feature (482)..(482): n is a, c, g, or t
  misc_feature (484)..(484): n is a, c, g, or t
  Peptide Sequence Number=SeqID_12633
  Probeset Number=SeqID_19368
gaaccactacttcaatcatcccctattactgcttttgttacgaaagacaaaaaaacaaaacaaaacaaaagtcagctcaggcgaagaacagatggctcgtaccaagcaaaccgctcgtaagtccaccggaggtaaagctccaaggaagcaacttgctactaaggctgctcgtaaatctgcaccaaactactggtggagtcaagaaaccacatcgttaccgtccctggaactgttgctctccgtgaaatccgtaagtaccagaagagtactgagttgcttatcagggaaaatggccttttcagaggctagtcccgggagattgctccaagattttcaagactggttttggggttcccagaagccatggntggcctttagcctctcccngggaaggttgcaaaaaaccatttctttggttggggtcccccttttgaagaaaccccaaccccttttggggccctttnatgnccaaggggngngancnat

SEQ ID NO: 4966 - DNA, 559 bp, Zea mays
  misc_feature (203)..(203): n is a, c, g, or t
  misc_feature (248)..(248): n is a, c, g, or t
  misc_feature (250)..(250): n is a, c, g, or t
  misc_feature (265)..(265): n is a, c, g, or t
  misc_feature (294)..(294): n is a, c, g, or t
  misc_feature (301)..(301): n is a, c, g, or t
  misc_feature (310)..(310): n is a, c, g, or t
  misc_feature (320)..(320): n is a, c, g, or t
  misc_feature (356)..(356): n is a, c, g, or t
  misc_feature (366)..(366): n is a, c, g, or t
  misc_feature (369)..(369): n is a, c, g, or t
  misc_feature (378)..(378): n is a, c, g, or t
  misc_feature (384)..(384): n is a, c, g, or t
  misc_feature (397)..(397): n is a, c, g, or t
  misc_feature (411)..(411): n is a, c, g, or t
  misc_feature (418)..(418): n is a, c, g, or t
  misc_feature (423)..(423): n is a, c, g, or t
  misc_feature (428)..(428): n is a, c, g, or t
  misc_feature (441)..(441): n is a, c, g, or t
  misc_feature (445)..(445): n is a, c, g, or t
  misc_feature (447)..(448): n is a, c, g, or t
  misc_feature (468)..(468): n is a, c, g, or t
  misc_feature (486)..(486): n is a, c, g, or t
  misc_feature (495)..(495): n is a, c, g, or t
  misc_feature (497)..(497): n is a, c, g, or t
  misc_feature (509)..(509): n is a, c, g, or t
  misc_feature (520)..(521): n is a, c, g, or t
  misc_feature (526)..(526): n is a, c, g, or t
  misc_feature (531)..(531): n is a, c, g, or t
  misc_feature (540)..(541): n is a, c, g, or t
  misc_feature (551)..(551): n is a, c, g, or t
  misc_feature (559)..(559): n is a, c, g, or t
  Peptide Sequence Number=SeqID_12634
  Probeset Number=SeqID_19369
atgcaaccggagtgtggaggagatcccgcgtgaacatccatggaagtataagagggagaccccgctcggacaccctcgggggctgggccatagtttgcgctacccacttgagccggatcatctccggaagtaccctcgggggctgggcagtggtttgcgctttccacccgagccgagtcatccccggcaacatccttggaggntgggtaagtgtcaacaccatccttgaggaccaagttctctgcagnangcccgcctctaaggntgagggtcccctcatgttacttccatggnaccaaanacgatccanggtcaggttntcctgaccctcaaagaccggcgctctaaggccctgntgaagctacnggnaatgcttgncccggnaataacccccaanccccggggggctcnagccacnttcangctanaaaaaccatcccngtcngnnaaacaatcattccgcttggntttcttgaataaacagantccctcctngngaaacccaatantcctttcaagnnagttnctganttacaaaanntctcctcccnagggggan

SEQ ID NO: 4967 - DNA, 462 bp, Zea mays
  misc_feature (6)..(6): n is a, c, g, or t
  misc_feature (21)..(21): n is a, c, g, or t
  misc_feature (30)..(30): n is a, c, g, or t
  misc_feature (56)..(56): n is a, c, g, or t
  misc_feature (58)..(58): n is a, c, g, or t
  misc_feature (65)..(65): n is a, c, g, or t
  misc_feature (67)..(67): n is a, c, g, or t
  misc_feature (74)..(74): n is a, c, g, or t
  misc_feature (81)..(81): n is a, c, g, or t
  misc_feature (95)..(95): n is a, c, g, or t
  misc_feature (108)..(108): n is a, c, g, or t
  misc_feature (111)..(111): n is a, c, g, or t
  misc_feature (113)..(113): n is a, c, g, or t
  misc_feature (134)..(134): n is a, c, g, or t
  misc_feature (156)..(156): n is a, c, g, or t
  misc_feature (170)..(170): n is a, c, g, or t
  misc_feature (173)..(173): n is a, c, g, or t
  misc_feature (204)..(204): n is a, c, g, or t
  misc_feature (222)..(222): n is a, c, g, or t
  misc_feature (232)..(232): n is a, c, g, or t
  misc_feature (235)..(235): n is a, c, g, or t
  misc_feature (267)..(267): n is a, c, g, or t
  misc_feature (310)..(310): n is a, c, g, or t
  misc_feature (318)..(318): n is a, c, g, or t
  misc_feature (369)..(369): n is a, c, g, or t
  misc_feature (371)..(371): n is a, c, g, or t
  misc_feature (386)..(386): n is a, c, g, or t
  misc_feature (417)..(417): n is a, c, g, or t
  misc_feature (428)..(428): n is a, c, g, or t
  misc_feature (430)..(430): n is a, c, g, or t
  misc_feature (434)..(435): n is a, c, g, or t
  misc_feature (446)..(446): n is a, c, g, or t
  Peptide Sequence Number=SeqID_12635
  Probeset Number=SeqID_19370
gggganggaccgggatttatnccttggtgntctattcccaacgctctagctcgtgnantaattgngnagcctgncgtctanccctgctccggcgngaagtcctgatgntanangcaaggcctgatgcttctggntgtttttgtcttaaataaagangctagtatgcatgnggntatgtgagggctattgcatctgatttagtgntgcacatttaagtaatgntgatgattgnttnaagcaattttttacttgggctttatattctanattatgtaaccgcctaaccgggtgaaactaatgagatacatgntgatttgntaaatcataaatatatttatattggataatctggtacctaaggggcttagngnctatccttaacaaanatttttttatacttgattctattggggaggnatgggtgtaananaggnngttcaacgagnacctcattatccagag

SEQ ID NO: 4968 - DNA, 550 bp, Zea mays
  misc_feature (12)..(12): n is a, c, g, or t
  misc_feature (14)..(14): n is a, c, g, or t
  misc_feature (18)..(18): n is a, c, g, or t
  misc_feature (28)..(28): n is a, c, g, or t
  misc_feature (51)..(51): n is a, c, g, or t
  misc_feature (69)..(69): n is a, c, g, or t
  misc_feature (72)..(72): n is a, c, g, or t
  misc_feature (76)..(76): n is a, c, g, or t
  misc_feature (95)..(95): n is a, c, g, or t
  misc_feature (98)..(98): n is a, c, g, or t
  misc_feature (133)..(134): n is a, c, g, or t
  misc_feature (155)..(155): n is a, c, g, or t
  misc_feature (200)..(200): n is a, c, g, or t
  misc_feature (213)..(213): n is a, c, g, or t
  misc_feature (218)..(219): n is a, c, g, or t
  misc_feature (227)..(227): n is a, c, g, or t
  misc_feature (247)..(247): n is a, c, g, or t
  misc_feature (269)..(269): n is a, c, g, or t
  misc_feature (279)..(279): n is a, c, g, or t
  misc_feature (313)..(314): n is a, c, g, or t
  misc_feature (331)..(331): n is a, c, g, or t
  misc_feature (343)..(343): n is a, c, g, or t
  misc_feature (346)..(346): n is a, c, g, or t
  misc_feature (348)..(349): n is a, c, g, or t
  misc_feature (355)..(355): n is a, c, g, or t
  misc_feature (368)..(368): n is a, c, g, or t
  misc_feature (374)..(374): n is a, c, g, or t
  misc_feature (376)..(377): n is a, c, g, or t
  misc_feature (407)..(407): n is a, c, g, or t
  misc_feature (410)..(410): n is a, c, g, or t
  misc_feature (416)..(416): n is a, c, g, or t
  misc_feature (422)..(422): n is a, c, g, or t
  misc_feature (448)..(450): n is a, c, g, or t
  misc_feature (460)..(460): n is a, c, g, or t
  misc_feature (464)..(464): n is a, c, g, or t
  misc_feature (478)..(478): n is a, c, g, or t
  misc_feature (482)..(484): n is a, c, g, or t
  misc_feature (487)..(488): n is a, c, g, or t
  misc_feature (492)..(493): n is a, c, g, or t
  misc_feature (502)..(503): n is a, c, g, or t
  misc_feature (506)..(506): n is a, c, g, or t
  misc_feature (508)..(508): n is a, c, g, or t
  misc_feature (510)..(511): n is a, c, g, or t
  misc_feature (516)..(516): n is a, c, g, or t
  misc_feature (521)..(522): n is a, c, g, or t
  misc_feature (525)..(525): n is a, c, g, or t
  misc_feature (527)..(527): n is a, c, g, or t
  misc_feature (531)..(531): n is a, c, g, or t
  misc_feature (534)..(534): n is a, c, g, or t
  misc_feature (541)..(542): n is a, c, g, or t
  misc_feature (546)..(548): n is a, c, g, or t
  Probeset Number=SeqID_19371
cccccccccccncncccncctctctagnccgccgcctccttcctccggacntcccctctcctccgtctnganaagngtcggctgagatgttgaanagnagcaagaagagcattaagcaagcgagtcacgctgnnttagaagcacaaggtggagcncaaggtgaaggagcaccaccgcaagaagctgtaaggaggatcaanaatttggccaagngcggnnagaggagnaaggtcgagaaggatcccgntatccccaacgagtggcccttnaaggagcaanagctcaaggggctcgaggcccaatttgtgaaggnnctccaggagtttttagntcaagaagcagnttntnnaagganaggggttcaaaanaggaangnntgattgtttgaggacgaagaaattggtaanttnggcatntggatnttccgcacagggaaagagagtttgcnnntaaggaaaanggtnttttattttttggnaaannntanncatnngtttttttnncanananntttantaaannaantnaaanttncaaaggnnatgnnnct

SEQ ID NO: 4969 - DNA, 475 bp, Zea mays
  misc_feature (213)..(213): n is a, c, g, or t
  misc_feature (441)..(441): n is a, c, g, or t
  Peptide Sequence Number=SeqID_12636
  Probeset Number=SeqID_19372
ggaccgcctgcctccgattcgggcgccagcgaccggagctcatccggcatatatcaagatgggatattcaggttgccctacgatgtggttgtcccagcattgacaggaaggttgtaaactctgggaagcgactgcgggcttatgtagggcttgttgaaggagagcttgcaaagaagcttcatccagacacgaataaaggtgatgcggatgcanaaccgaagtttcaagaggttcagcgagcttatgagttctttaggaacattttcagggatagggattttggaagccgtgatattaaggttgcacttgaactatcatttatggaagcagttcaaggatgcagcaaaacgatcaacttccaaaacgtctgtcacgtgcgaaacctgcaatgggagccggcgtgcctcctggaaccaaacctgaaacatgtctagcttgcanggggttcaggattttatgttcatgcaaactggaa

SEQ ID NO: 4970 - DNA, 554 bp, Zea mays
  misc_feature (19)..(19): n is a, c, g, or t
  misc_feature (49)..(49): n is a, c, g, or t
  misc_feature (53)..(53): n is a, c, g, or t
  misc_feature (56)..(56): n is a, c, g, or t
  misc_feature (59)..(59): n is a, c, g, or t
  misc_feature (62)..(62): n is a, c, g, or t
  misc_feature (74)..(74): n is a, c, g, or t
  misc_feature (104)..(104): n is a, c, g, or t
  misc_feature (112)..(114): n is a, c, g, or t
  misc_feature (120)..(120): n is a, c, g, or t
  misc_feature (122)..(122): n is a, c, g, or t
  misc_feature (125)..(125): n is a, c, g, or t
  misc_feature (132)..(132): n is a, c, g, or t
  misc_feature (149)..(149): n is a, c, g, or t
  misc_feature (157)..(157): n is a, c, g, or t
  misc_feature (197)..(197): n is a, c, g, or t
  misc_feature (201)..(201): n is a, c, g, or t
  misc_feature (247)..(247): n is a, c, g, or t
  misc_feature (263)..(263): n is a, c, g, or t
  misc_feature (297)..(297): n is a, c, g, or t
  misc_feature (320)..(320): n is a, c, g, or t
  misc_feature (322)..(322): n is a, c, g, or t
  misc_feature (326)..(328): n is a, c, g, or t
  misc_feature (334)..(334): n is a, c, g, or t
  misc_feature (338)..(338): n is a, c, g, or t
  misc_feature (341)..(341): n is a, c, g, or t
  misc_feature (343)..(343): n is a, c, g, or t
  misc_feature (352)..(352): n is a, c, g, or t
  misc_feature (358)..(358): n is a, c, g, or t
  misc_feature (373)..(373): n is a, c, g, or t
  misc_feature (377)..(377): n is a, c, g, or t
  misc_feature (388)..(388): n is a, c, g, or t
  misc_feature (392)..(392): n is a, c, g, or t
  misc_feature (397)..(397): n is a, c, g, or t
  misc_feature (400)..(400): n is a, c, g, or t
  misc_feature (407)..(407): n is a, c, g, or t
  misc_feature (410)..(410): n is a, c, g, or t
  misc_feature (414)..(414): n is a, c, g, or t
  misc_feature (417)..(417): n is a, c, g, or t
  misc_feature (420)..(420): n is a, c, g, or t
  misc_feature (428)..(428): n is a, c, g, or t
  misc_feature (444)..(444): n is a, c, g, or t
  misc_feature (453)..(453): n is a, c, g, or t
  misc_feature (456)..(457): n is a, c, g, or t
  misc_feature (466)..(468): n is a, c, g, or t
  misc_feature (478)..(478): n is a, c, g, or t
  misc_feature (507)..(508): n is a, c, g, or t
  misc_feature (511)..(511): n is a, c, g, or t
  misc_feature (513)..(513): n is a, c, g, or t
  misc_feature (520)..(520): n is a, c, g, or t
  misc_feature (525)..(525): n is a, c, g, or t
  misc_feature (527)..(527): n is a, c, g, or t
  misc_feature (538)..(538): n is a, c, g, or t
  misc_feature (543)..(543): n is a, c, g, or t
  Peptide Sequence Number=SeqID_12647
  Probeset Number=SeqID_19373
tagatagagagctcactantcccccctcccccccccggagccgtaaacncctntcnatnganacatcgcttccngctcacccatcgcgaactgacccgaccctnccgagggnnncgggcntntcntctccgnctccgcctcccgccgantgcctccnacccatcacaagcgcagagaagacatggctctcacacgantagnctgccacttctacagagtgtggcttatggtgtgcttccaacggggnaacaatgtggcgcctncagaggagggataacttcagagtaaaagcgcttnaggagctgtacttcaacaaggangngtcnnntatcangaanctncnaactggagncaatangcttgcagacctagntggngttacactcgnaccnaaggnaangtaatgncgntttnggncancaagtacngctctcccaagaatgntaacgatgnccnntacagttgnnngagaggttgngctggaggacccctgggggaaaactttgnnagncnaaattgnttcangnaaagctgccanctaangaccaaacgaa

SEQ ID NO: 4971 - DNA, 609 bp, Zea mays
  misc_feature (41)..(41): n is a, c, g, or t
  misc_feature (44)..(44): n is a, c, g, or t
  misc_feature (47)..(47): n is a, c, g, or t
  misc_feature (61)..(61): n is a, c, g, or t
  misc_feature (65)..(65): n is a, c, g, or t
  misc_feature (609)..(609): n is a, c, g, or t
  Peptide Sequence Number=SeqID_12648
  Probeset Number=SeqID_19374
cagaaatctcgtgtggaacaaaagggtaaaagctcgtttgnttntgntttccagtcgaatncganccgtgaaagcggggcctatcgatcctttagcccttcggagtttgaagctagaggtgtcagaaaagttccccagggataactggcttgtggcagccaagcgttcataacgacgttgctttttgatccttcgatgtcggctcttcctatcattgtgaagcagaattccccaagtgttggattgttccagcagtggtgacaacgcagagtacgcggggttgcctccgaccatcgtggacacaactcaagatccaaagctctggcccccaaatgcttaggggcagctaccttggaatgttgactcattgtgccttttcatgcatttggtgggcaaatcagtgccagttaggtccctggagactggagaggaatcaagctcgcaactcgcgccatgtttatgctgtaacagctggtttccagccctagttatgaacttactttgttctactgaagggtggtgcctgtaattaatatatggatcttaaccctctagaaaaaaaaaaaaaaaaaaaaaaaaaaaaaagtactctgcgttgttaccactgcn

SEQ ID NO: 4972 - DNA, 453 bp, Zea mays
  misc_feature (3)..(3): n is a, c, g, or t
  misc_feature (10)..(10): n is a, c, g, or t
  misc_feature (22)..(22): n is a, c, g, or t
  misc_feature (57)..(57): n is a, c, g, or t
  misc_feature (68)..(68): n is a, c, g, or t
  misc_feature (95)..(95): n is a, c, g, or t
  misc_feature (102)..(102): n is a, c, g, or t
  misc_feature (114)..(114): n is a, c, g, or t
  misc_feature (137)..(137): n is a, c, g, or t
  misc_feature (161)..(161): n is a, c, g, or t
  misc_feature (177)..(177): n is a, c, g, or t
  misc_feature (186)..(186): n is a, c, g, or t
  misc_feature (199)..(199): n is a, c, g, or t
  misc_feature (215)..(215): n is a, c, g, or t
  misc_feature (272)..(272): n is a, c, g, or t
  misc_feature (280)..(280): n is a, c, g, or t
  misc_feature (315)..(315): n is a, c, g, or t
  misc_feature (332)..(332): n is a, c, g, or t
  misc_feature (393)..(393): n is a, c, g, or t
  misc_feature (399)..(399): n is a, c, g, or t
  misc_feature (403)..(403): n is a, c, g, or t
  misc_feature (416)..(416): n is a, c, g, or t
  misc_feature (418)..(418): n is a, c, g, or t
  misc_feature (423)..(423): n is a, c, g, or t
  Peptide Sequence Number=SeqID_12649
  Probeset Number=SeqID_19375
ggngggggtntgtggaagtggnggtccacgtcggggaatcggtcttaagtcggagantacctgggtgnataaagatcgagccaactcccccgaancctattnctaagacaaagntaaattcaactaacttgacatgngtccgaaggttacacaacaagtgnacagaaaacagaaagnttcgacttnagtaaaaaaattnaatagcagaatgatgnaatagcaatgaatgaaatgataacttctcaccaactcatctgtttatatagccctanaggtgaanaaggtgaacctccttaacgcgcatactgagtgatnggtggaccggcaaaggncgtatatttttattcgttttttaataacaagctaagggaacgtgttttttggaccttcggnattcanaagncttcgtgtttttngnggatnaagctcgttatgaaaaaacgacctagaacc

SEQ ID NO: 4973 - DNA, 533 bp, Zea mays
  misc_feature (95)..(95): n is a, c, g, or t
  misc_feature (110)..(110): n is a, c, g, or t
  misc_feature (126)..(126): n is a, c, g, or t
  misc_feature (143)..(143): n is a, c, g, or t
  misc_feature (219)..(219): n is a, c, g, or t
  misc_feature (234)..(234): n is a, c, g, or t
  misc_feature (247)..(247): n is a, c, g, or t
  misc_feature (252)..(252): n is a, c, g, or t
  misc_feature (285)..(285): n is a, c, g, or t
  misc_feature (287)..(287): n is a, c, g, or t
  misc_feature (297)..(297): n is a, c, g, or t
  misc_feature (306)..(306): n is a, c, g, or t
  misc_feature (336)..(336): n is a, c, g, or t
  misc_feature (339)..(339): n is a, c, g, or t
  misc_feature (346)..(346): n is a, c, g, or t
  misc_feature (357)..(357): n is a, c, g, or t
  misc_feature (362)..(362): n is a, c, g, or t
  misc_feature (384)..(384): n is a, c, g, or t
  misc_feature (393)..(393): n is a, c, g, or t
  misc_feature (409)..(409): n is a, c, g, or t
  misc_feature (415)..(415): n is a, c, g, or t
  misc_feature (420)..(420): n is a, c, g, or t
  misc_feature (439)..(439): n is a, c, g, or t
  misc_feature (441)..(441): n is a, c, g, or t
  misc_feature (448)..(448): n is a, c, g, or t
  misc_feature (457)..(457): n is a, c, g, or t
  misc_feature (464)..(464): n is a, c, g, or t
  misc_feature (477)..(477): n is a, c, g, or t
  misc_feature (488)..(489): n is a, c, g, or t
  misc_feature (491)..(492): n is a, c, g, or t
  misc_feature (498)..(498): n is a, c, g, or t
  misc_feature (501)..(501): n is a, c, g, or t
  misc_feature (511)..(511): n is a, c, g, or t
  misc_feature (518)..(518): n is a, c, g, or t
  misc_feature (522)..(522): n is a, c, g, or t
  Probeset Number=SeqID_19376
gctctctctttttacttcttcttcttcactttctctctgaatctggccgtcacgcgggaagcttccgattcaaaacactctctacatggcattgntgttgtacaactacnacactatacgacgagncttcaaggcttccgcgnctttcttcctcttttggagaatcgcttcttctttcctccaatcgatggttcacggcttctctctgcaaatggaggngacttcttcggatgngggggaagccagncaatntcgcaaagtgttgcctgatggggaatgggaccncntaaagcatcncaacctttngaagcttacctaagtccgacttttcggtanaanactgggnaaacaataagnagccnattgatggctttccccaccttncttggcaanggagggctggcatttncctttnaatangaaaaactgtggacatcgnanactttcngcttggtcncaagganggtgggggtaccnatctccagctnntnncctggntgngacagataanaaccatncccncacagggaacg

SEQ ID NO: 4974 - DNA, 495 bp, Zea mays
  Peptide Sequence Number=SeqID_12650
  Probeset Number=SeqID_19377
tggtccaacctcctacaatctgtgccgctctccgcaattgacacgctggcactgaccacctcactcaaccccaagaacgccatcatcgtcatcacctgctatgtctcaaacactcaactgccttctagtgctgccttgacagatccgttatgccatcatagcctgttttgcagcacatttcagatcgtccagctctgcaagtgccgtgccaatactcgatcgagcttccacaccaccacgtcttcaaccccaatccagctacccaacccctggtttaaacacagaaaggatccatggaaagcagggctctctctcttcctcagtaatcaggtccaatgatcgattctggactctggtctcgctctcgggtcgatcccccccccccccggagatttaattctataggcaaaagacatcatcgatggggccttggagcaatggcagtagcaaaatgcagagaacactcatccattcatcaatcgagggattttctgg

SEQ ID NO: 4975 - DNA, 497 bp, Zea mays
  misc_feature (19)..(19): n is a, c, g, or t
  misc_feature (21)..(21): n is a, c, g, or t
  misc_feature (267)..(267): n is a, c, g, or t
  misc_feature (354)..(354): n is a, c, g, or t
  misc_feature (367)..(367): n is a, c, g, or t
  misc_feature (378)..(378): n is a, c, g, or t
  misc_feature (392)..(392): n is a, c, g, or t
  misc_feature (415)..(415): n is a, c, g, or t
  misc_feature (419)..(419): n is a, c, g, or t
  misc_feature (446)..(446): n is a, c, g, or t
  misc_feature (464)..(464): n is a, c, g, or t
  misc_feature (470)..(470): n is a, c, g, or t
  misc_feature (480)..(480): n is a, c, g, or t
  misc_feature (486)..(486): n is a, c, g, or t
  misc_feature (488)..(488): n is a, c, g, or t
  Probeset Number=SeqID_19378
ctctccctatgcaccttcntnggcccccagtccccaccactatccccgccgccagcaccaccccagtccccgcccaacagctggctccggcgggtcgccttccttctcgtcctcatcctcttccgtcgcgacctccccatcccagcccgacgatatctcctttaccctcagctccttcctccgccccgaggacggcgtcatcgccgaaccctagagagggccgggggacggacaccgtagatagccatggttgttgctgttgagggnaacgacttcgtccacgacgacgaggaggagaccgccccatcagctccctctttcggcgcccaggctaggcgcgccccgcagtcccgnctgcctcgcaggncactgctccgncaagaggaggattncgaggcagacttcgaggagttcnaggngaaggccggcgactcggagttccaacnctacagatgaggcaacgnccttcnccggccccangagcgnantcgccagag

SEQ ID NO: 4976 - DNA, 472 bp, Zea mays
  misc_feature (11)..(12): n is a, c, g, or t
  misc_feature (35)..(35): n is a, c, g, or t
  misc_feature (63)..(63): n is a, c, g, or t
  misc_feature (68)..(68): n is a, c, g, or t
  misc_feature (71)..(72): n is a, c, g, or t
  misc_feature (92)..(92): n is a, c, g, or t
  misc_feature (98)..(98): n is a, c, g, or t
  misc_feature (103)..(103): n is a, c, g, or t
  misc_feature (142)..(142): n is a, c, g, or t
  misc_feature (157)..(157): n is a, c, g, or t
  misc_feature (159)..(160): n is a, c, g, or t
  misc_feature (166)..(166): n is a, c, g, or t
  misc_feature (171)..(171): n is a, c, g, or t
  misc_feature (174)..(174): n is a, c, g, or t
  misc_feature (179)..(180): n is a, c, g, or t
  misc_feature (183)..(183): n is a, c, g, or t
  misc_feature (190)..(190): n is a, c, g, or t
  misc_feature (198)..(198): n is a, c, g, or t
  misc_feature (225)..(225): n is a, c, g, or t
  misc_feature (235)..(235): n is a, c, g, or t
  misc_feature (268)..(268): n is a, c, g, or t
  misc_feature (273)..(273): n is a, c, g, or t
  misc_feature (326)..(326): n is a, c, g, or t
  misc_feature (337)..(337): n is a, c, g, or t
  misc_feature (350)..(350): n is a, c, g, or t
  misc_feature (353)..(353): n is a, c, g, or t
  misc_feature (357)..(357): n is a, c, g, or t
  misc_feature (359)..(360): n is a, c, g, or t
  misc_feature (366)..(366): n is a, c, g, or t
  misc_feature (373)..(373): n is a, c, g, or t
  misc_feature (380)..(381): n is a, c, g, or t
  misc_feature (383)..(383): n is a, c, g, or t
  misc_feature (385)..(385): n is a, c, g, or t
  misc_feature (388)..(388): n is a, c, g, or t
  misc_feature (390)..(391): n is a, c, g, or t
  misc_feature (395)..(395): n is a, c, g, or t
  misc_feature (397)..(399): n is a, c, g, or t
  misc_feature (401)..(409): n is a, c, g, or t
  misc_feature (411)..(472): n is a, c, g, or t
  Peptide Sequence Number=SeqID_12651
  Probeset Number=SeqID_19379
attgactctcnngactccaccaacaaaaaatggcnaccggccaccactgaagctgatctgcgngaggnccnngtccaggagaatagggcgangtcaantaaantccttgcttcatgagctgacagcgacccacttcgatggngacggggttggacgntnnttgtgnacgcntcngcggnntanttcttgngcgcctgnggcgagctcctcctcgagtgcgtgtgngacctggaangcgttctccccctcgggcctctcgggagggganctagnctccgaccccgacacctacgacctcctcctcgaccacgccatccgctccgagntcgtcctgggnaccgtcgcgcggnggnaagngnnccccgngaacggncccccgnncnanagntnnctcnannncnnnnnnnnntnnnnnnnnnnnnnnnnnnnnnnnnnnnnnnnnnnnnnnnnnnnnnnnnnnnnnnnnnnnnnn

SEQ ID NO: 4977 - DNA, 473 bp, Zea mays
  misc_feature (155)..(155): n is a, c, g, or t
  misc_feature (197)..(197): n is a, c, g, or t
  misc_feature (276)..(276): n is a, c, g, or t
  misc_feature (303)..(303): n is a, c, g, or t
  misc_feature (316)..(316): n is a, c, g, or t
  misc_feature (332)..(332): n is a, c, g, or t
  misc_feature (348)..(348): n is a, c, g, or t
  misc_feature (376)..(376): n is a, c, g, or t
  misc_feature (385)..(385): n is a, c, g, or t
  misc_feature (412)..(412): n is a, c, g, or t
  misc_feature (419)..(419): n is a, c, g, or t
  misc_feature (422)..(422): n is a, c, g, or t
  misc_feature (433)..(433): n is a, c, g, or t
  misc_feature (435)..(435): n is a, c, g, or t
  misc_feature (437)..(437): n is a, c, g, or t
  misc_feature (447)..(447): n is a, c, g, or t
  misc_feature (457)..(459): n is a, c, g, or t
  misc_feature (471)..(471): n is a, c, g, or t
  Probeset Number=SeqID_19380
agttccgagtggcgcacggttctgccgtcgcgctgcgtgcctgcatctcccttcgcgctccctccaccctcccgcgggcgcaccctgccccgcatcgcgcccgcatcccgcccgccgccgcacctcgccctgcatcccggccgcatcccgccggngggcgcaccccgccccgcatcccgcgaccttccatcaacggngcatcaacacccgcgcgcgatccactccccccacccttctgcgctgctggccgaggggacatcgatccgcggaggaganaacggtcgtaccttctgcgctgctggncgaggcagggganagctccattccgaggngaaggcgcgcggccgnggcttctggctggtggccggggctggtngaaaacttnatccacaatggaaaaggcccatccggnactcctnaantccccgacaancnanaaaggccccnaattttcccnnnatcccccccccncc

SEQ ID NO: 4978 - DNA, 482 bp, Zea mays
  misc_feature (34)..(34): n is a, c, g, or t
  misc_feature (45)..(45): n is a, c, g, or t
  misc_feature (189)..(189): n is a, c, g, or t
  misc_feature (246)..(246): n is a, c, g, or t
  misc_feature (437)..(437): n is a, c, g, or t
  misc_feature (453)..(455): n is a, c, g, or t
  misc_feature (458)..(458): n is a, c, g, or t
  misc_feature (461)..(461): n is a, c, g, or t
  misc_feature (465)..(465): n is a, c, g, or t
  misc_feature (470)..(470): n is a, c, g, or t
  misc_feature (478)..(478): n is a, c, g, or t
  Peptide Sequence Number=SeqID_12652
  Probeset Number=SeqID_19381
aaccccagtcccccaccgtcccacgccatgcggncgcccccttgntaaacaaccacggcgccgcgcgcgcgcatcgccgtcgcaatggccgccgccgactcgtccaagcccgcgcgcgggggcacgcttcccgcccgcacgctcctcctgggggttccctttctcttcctcctcctcctctttctctangtctaattcaccaccttcgtgggggcctgcatcagggcttcccggaaacggcggaanaaaaaacaaaaaaaaacggtggccaccaccaacaccaaccaaccggtggcggtgaaccccttcccttcggtcccggaaattcgggatggggggggtccgggtacggttcctacgacgactaacttccgccaccagctgaacaagacgctggacccgcggctccggcgggtgtgggcgacgcggactggcangggaaggggacgcttnnngcnctnttcnggggntcgggaanagga

SEQ ID NO: 4979 - DNA, 520 bp, Zea mays
  misc_feature (312)..(312): n is a, c, g, or t
  misc_feature (317)..(318): n is a, c, g, or t
  misc_feature (321)..(323): n is a, c, g, or t
  misc_feature (326)..(327): n is a, c, g, or t
  misc_feature (330)..(333): n is a, c, g, or t
  misc_feature (336)..(338): n is a, c, g, or t
  misc_feature (340)..(343): n is a, c, g, or t
  misc_feature (348)..(348): n is a, c, g, or t
  misc_feature (350)..(354): n is a, c, g, or t
  misc_feature (356)..(358): n is a, c, g, or t
  misc_feature (360)..(363): n is a, c, g, or t
  misc_feature (366)..(368): n is a, c, g, or t
  misc_feature (373)..(373): n is a, c, g, or t
  misc_feature (375)..(377): n is a, c, g, or t
  misc_feature (380)..(391): n is a, c, g, or t
  misc_feature (394)..(394): n is a, c, g, or t
  misc_feature (396)..(397): n is a, c, g, or t
  misc_feature (400)..(402): n is a, c, g, or t
  misc_feature (404)..(404): n is a, c, g, or t
  misc_feature (406)..(407): n is a, c, g, or t
  misc_feature (409)..(410): n is a, c, g, or t
  misc_feature (412)..(418): n is a, c, g, or t
  misc_feature (425)..(429): n is a, c, g, or t
  misc_feature (432)..(432): n is a, c, g, or t
  misc_feature (434)..(437): n is a, c, g, or t
  misc_feature (439)..(441): n is a, c, g, or t
  misc_feature (443)..(445): n is a, c, g, or t
  misc_feature (447)..(452): n is a, c, g, or t
  misc_feature (455)..(458): n is a, c, g, or t
  misc_feature (460)..(465): n is a, c, g, or t
  misc_feature (467)..(468): n is a, c, g, or t
  misc_feature (470)..(472): n is a, c, g, or t
  misc_feature (474)..(474): n is a, c, g, or t
  misc_feature (477)..(478): n is a, c, g, or t
  misc_feature (480)..(480): n is a, c, g, or t
  misc_feature (484)..(487): n is a, c, g, or t
  misc_feature (491)..(492): n is a, c, g, or t
  misc_feature (494)..(495): n is a, c, g, or t
  misc_feature (500)..(503): n is a, c, g, or t
  misc_feature (505)..(505): n is a, c, g, or t
  misc_feature (507)..(509): n is a, c, g, or t
  misc_feature (514)..(515): n is a, c, g, or t
  misc_feature (519)..(519): n is a, c, g, or t
  Probeset Number=SeqID_19382
attaggttgtaatttgtatgaaagctactaggcccccgcgtcgcccctttggcgacttgggcggctgcaagcctagccgccgccaactcccctccctccccatctctttgccttgccgccgccggagctagctggtgggttgcccgcgcggctagcaatgaaggcggtggtggggtgcttgctgccctgctcacgcgtccaacccgtggcagcgctgtccgtccactcaggcagctagccttcggctgggtgcgcgcccgcgtggatggcccggtggcggcatctgcccatccctgatgctcggggggttgnaggcnnccnnnganngcnnnntcnnncnnnngacgncnnnnngnnntnnnncgnnnccctncnnnctnnnnnnnnnnnnccncnnccnnntntnncnncnnnnnnnccccccnnnnnccncnnnntnnncnnncnnnnnnccnnnncnnnnnncnncnnncnccnncncccnnnntctnntnncaccnnnncncnnncacanncacnc

SEQ ID NO: 4980 - DNA, 509 bp, Zea mays
  misc_feature (331)..(331): n is a, c, g, or t
  misc_feature (339)..(339): n is a, c, g, or t
  misc_feature (344)..(344): n is a, c, g, or t
  misc_feature (346)..(347): n is a, c, g, or t
  misc_feature (349)..(349): n is a, c, g, or t
  misc_feature (360)..(360): n is a, c, g, or t
  misc_feature (365)..(365): n is a, c, g, or t
  misc_feature (377)..(377): n is a, c, g, or t
  misc_feature (381)..(381): n is a, c, g, or t
  misc_feature (389)..(391): n is a, c, g, or t
  misc_feature (393)..(394): n is a, c, g, or t
  misc_feature (397)..(398): n is a, c, g, or t
  misc_feature (401)..(401): n is a, c, g, or t
  misc_feature (405)..(406): n is a, c, g, or t
  misc_feature (409)..(409): n is a, c, g, or t
  misc_feature (414)..(419): n is a, c, g, or t
  misc_feature (421)..(422): n is a, c, g, or t
  misc_feature (424)..(424): n is a, c, g, or t
  misc_feature (428)..(430): n is a, c, g, or t
  misc_feature (432)..(432): n is a, c, g, or t
  misc_feature (434)..(438): n is a, c, g, or t
  misc_feature (440)..(442): n is a, c, g, or t
  misc_feature (444)..(444): n is a, c, g, or t
  misc_feature (446)..(446): n is a, c, g, or t
  misc_feature (449)..(449): n is a, c, g, or t
  misc_feature (451)..(454): n is a, c, g, or t
  misc_feature (456)..(456): n is a, c, g, or t
  misc_feature (459)..(467): n is a, c, g, or t
  misc_feature (469)..(471): n is a, c, g, or t
  misc_feature (473)..(473): n is a, c, g, or t
  misc_feature (475)..(476): n is a, c, g, or t
  misc_feature (478)..(479): n is a, c, g, or t
  misc_feature (481)..(481): n is a, c, g, or t
  misc_feature (484)..(485): n is a, c, g, or t
  misc_feature (488)..(488): n is a, c, g, or t
  misc_feature (491)..(491): n is a, c, g, or t
  misc_feature (494)..(494): n is a, c, g, or t
  misc_feature (501)..(503): n is a, c, g, or t
  Peptide Sequence Number=SeqID_12653
  Probeset Number=SeqID_19383
aacacagcactgcctctccgctctgcctcctccaagtccaatccatggctgctccgccgcggcgaaaccccaaccacggcggcaagaggaaggacgaggagccgtggctcgcggcgggcatccgcccggccaacttcctcccgggcctggccatcgggttcctcctcggcctcctcctcgacctctcctcctcctggaggccgaggtttagcctcccgtctgccccggcgccacggggctccaagcgggcggccgccggttcctccgccgccccagccccaggcgaagagctcaagatggttttagtagtgcgtcaggatcttaagatggngggctggnaaaananngnctcatgtgccntgcancaactgagttgnacgncgatctgnnngnnaannaancggnnttnttttnnnnnnannanttannncncnnnnncnnnancnttntnnnnanctnnnnnnnnncnnnantnnannanatnnttnatnacnccccttnnnttttct

SEQ ID NO: 4981 - DNA, 531 bp, Zea mays
  misc_feature (188)..(188): n is a, c, g, or t
  misc_feature (199)..(199): n is a, c, g, or t
  misc_feature (258)..(258): n is a, c, g, or t
  misc_feature (279)..(280): n is a, c, g, or t
  misc_feature (312)..(312): n is a, c, g, or t
  misc_feature (322)..(322): n is a, c, g, or t
  misc_feature (327)..(327): n is a, c, g, or t
  misc_feature (330)..(330): n is a, c, g, or t
  misc_feature (332)..(334): n is a, c, g, or t
  misc_feature (343)..(343): n is a, c, g, or t
  misc_feature (346)..(346): n is a, c, g, or t
  misc_feature (353)..(353): n is a, c, g, or t
  misc_feature (362)..(362): n is a, c, g, or t
  misc_feature (365)..(365): n is a, c, g, or t
  misc_feature (382)..(382): n is a, c, g, or t
  misc_feature (384)..(385): n is a, c, g, or t
  misc_feature (391)..(391): n is a, c, g, or t
  misc_feature (393)..(393): n is a, c, g, or t
  misc_feature (395)..(395): n is a, c, g, or t
  misc_feature (398)..(398): n is a, c, g, or t
  misc_feature (403)..(403): n is a, c, g, or t
  misc_feature (405)..(405): n is a, c, g, or t
  misc_feature (413)..(413): n is a, c, g, or t
  misc_feature (418)..(418): n is a, c, g, or t
  misc_feature (421)..(421): n is a, c, g, or t
  misc_feature (423)..(423): n is a, c, g, or t
  misc_feature (428)..(428): n is a, c, g, or t
  misc_feature (433)..(433): n is a, c, g, or t
  misc_feature (435)..(435): n is a, c, g, or t
  misc_feature (438)..(438): n is a, c, g, or t
  misc_feature (440)..(440): n is a, c, g, or t
  misc_feature (444)..(444): n is a, c, g, or t
  misc_feature (455)..(455): n is a, c, g, or t
  misc_feature (470)..(472): n is a, c, g, or t
  misc_feature (478)..(478): n is a, c, g, or t
  misc_feature (484)..(484): n is a, c, g, or t
  misc_feature (486)..(486): n is a, c, g, or t
  misc_feature (488)..(488): n is a, c, g, or t
  misc_feature (497)..(497): n is a, c, g, or t
  misc_feature (499)..(499): n is a, c, g, or t
  misc_feature (502)..(502): n is a, c, g, or t
  misc_feature (504)..(504): n is a, c, g, or t
  misc_feature (506)..(506): n is a, c, g, or t
  misc_feature (508)..(508): n is a, c, g, or t
  misc_feature (518)..(518): n is a, c, g, or t
  misc_feature (521)..(521): n is a, c, g, or t
  misc_feature (525)..(525): n is a, c, g, or t
  Peptide Sequence Number=SeqID_12654
  Probeset Number=SeqID_19384
cccttcctcttttttctcccattactaaccctagccgccgcccgacgcccgccgctgtggcccgatgccccgtgagacgtgagcccgtgacgattgacgactgcggcaccgaggcgcgccgcgcgccgcgcgccctgaccgatgaagactggcgcccacagcggcgaccctgaccggtgaagagcggngccccgagcgngcagtcctgaccagggaagaccggcgccccgcgtcgacaaccccgaccccccgtcggtngctccacttcccgcgacgcgnncgtacgccaccggtgctgcaactccctgacgnccggttcaancagangcnannncatcaccancanccgttcntcttccaanttntttcattgttttccccncnncctgcngncnatnttttncnggttcctnccccnctntnaaccncaatncnctncnattnccttggcatanatattttccatcatnnncccccncttcgntncnttttcaatncngantncnancttctttttnccnctcnttctcc

SEQ ID NO: 4982 - DNA, 529 bp, Zea mays
  misc_feature (273)..(273): n is a, c, g, or t
  misc_feature (280)..(280): n is a, c, g, or t
  misc_feature (295)..(295): n is a, c, g, or t
  misc_feature (311)..(311): n is a, c, g, or t
  misc_feature (314)..(314): n is a, c, g, or t
  misc_feature (320)..(320): n is a, c, g, or t
  misc_feature (323)..(323): n is a, c, g, or t
  misc_feature (325)..(325): n is a, c, g, or t
  misc_feature (337)..(337): n is a, c, g, or t
  misc_feature (345)..(346): n is a, c, g, or t
  misc_feature (355)..(355): n is a, c, g, or t
  misc_feature (357)..(358): n is a, c, g, or t
  misc_feature (362)..(362): n is a, c, g, or t
  misc_feature (365)..(366): n is a, c, g, or t
  misc_feature (368)..(369): n is a, c, g, or t
  misc_feature (371)..(371): n is a, c, g, or t
  misc_feature (373)..(373): n is a, c, g, or t
  misc_feature (378)..(379): n is a, c, g, or t
  misc_feature (387)..(387): n is a, c, g, or t
  misc_feature (393)..(394): n is a, c, g, or t
  misc_feature (396)..(396): n is a, c, g, or t
  misc_feature (398)..(398): n is a, c, g, or t
  misc_feature (404)..(405): n is a, c, g, or t
  misc_feature (408)..(408): n is a, c, g, or t
  misc_feature (410)..(410): n is a, c, g, or t
  misc_feature (414)..(414): n is a, c, g, or t
  misc_feature (418)..(419): n is a, c, g, or t
  misc_feature (421)..(421): n is a, c, g, or t
  misc_feature (427)..(427): n is a, c, g, or t
  misc_feature (430)..(430): n is a, c, g, or t
  misc_feature (433)..(434): n is a, c, g, or t
  misc_feature (437)..(437): n is a, c, g, or t
  misc_feature (439)..(439): n is a, c, g, or t
  misc_feature (441)..(441): n is a, c, g, or t
  misc_feature (444)..(445): n is a, c, g, or t
  misc_feature (448)..(448): n is a, c, g, or t
  misc_feature (452)..(452): n is a, c, g, or t
  misc_feature (454)..(454): n is a, c, g, or t
  misc_feature (459)..(460): n is a, c, g, or t
  misc_feature (467)..(467): n is a, c, g, or t
  misc_feature (469)..(469): n is a, c, g, or t
  misc_feature (472)..(472): n is a, c, g, or t
  misc_feature (476)..(476): n is a, c, g, or t
  misc_feature (479)..(480): n is a, c, g, or t
  misc_feature (484)..(484): n is a, c, g, or t
  misc_feature (486)..(488): n is a, c, g, or t
  misc_feature (492)..(492): n is a, c, g, or t
  misc_feature (498)..(498): n is a, c, g, or t
  misc_feature (506)..(506): n is a, c, g, or t
  misc_feature (510)..(510): n is a, c, g, or t
  misc_feature (514)..(514): n is a, c, g, or t
  misc_feature (517)..(518): n is a, c, g, or t
  misc_feature (520)..(520): n is a, c, g, or t
  misc_feature (528)..(528): n is a, c, g, or t
  Probeset Number=SeqID_19385
atccatccccatcccggcggttttcttaaaagaaaatccccatcccggcggccgttggacgacagcgtcaggtcgaccttcgacggcgagagcatgcagcagtcacgcgcatggtcgtcccttgcccgcggcttagcgcgccgcctcgccggaggagcgccgtcagctccgattcctcctctccagtcctcgggaatctccaccggctcggcctgtctgctcgcccgccaggacggaggttttgttcatggtggggttcatggattccattcnaatcggnggagttgtgataccnaaccactaagaagggntgnaagtanctncncttgcaattccnttcatggnntttggtccngnncacncanncnnanantattnnttttcacnacctcnntntngtaatnnacnancccncccnntnttatcnttnccnnttncngncannccntttncnacccnnctatttntnccnctantanncccntnnntctncctttntccttttntcancttnctnntnttttttcnt

SEQ ID NO: 4983 - DNA, 525 bp, Zea mays
  misc_feature (193)..(194): n is a, c, g, or t
  misc_feature (251)..(251): n is a, c, g, or t
  misc_feature (269)..(269): n is a, c, g, or t
  misc_feature (279)..(279): n is a, c, g, or t
  misc_feature (324)..(324): n is a, c, g, or t
  misc_feature (328)..(328): n is a, c, g, or t
  misc_feature (353)..(353): n is a, c, g, or t
  misc_feature (362)..(362): n is a, c, g, or t
  misc_feature (367)..(367): n is a, c, g, or t
  misc_feature (370)..(370): n is a, c, g, or t
  misc_feature (375)..(375): n is a, c, g, or t
  misc_feature (383)..(383): n is a, c, g, or t
  misc_feature (387)..(387): n is a, c, g, or t
  misc_feature (389)..(389): n is a, c, g, or t
  misc_feature (402)..(402): n is a, c, g, or t
  misc_feature (404)..(404): n is a, c, g, or t
  misc_feature (407)..(408): n is a, c, g, or t
  misc_feature (412)..(412): n is a, c, g, or t
  misc_feature (416)..(416): n is a, c, g, or t
  misc_feature (418)..(418): n is a, c, g, or t
  misc_feature (420)..(420): n is a, c, g, or t
  misc_feature (422)..(422): n is a, c, g, or t
  misc_feature (428)..(428): n is a, c, g, or t
  misc_feature (432)..(432): n is a, c, g, or t
  misc_feature (435)..(435): n is a, c, g, or t
  misc_feature (437)..(437): n is a, c, g, or t
  misc_feature (439)..(439): n is a, c, g, or t
  misc_feature (441)..(441): n is a, c, g, or t
  misc_feature (444)..(444): n is a, c, g, or t
  misc_feature (449)..(449): n is a, c, g, or t
  misc_feature (451)..(451): n is a, c, g, or t
  misc_feature (454)..(456): n is a, c, g, or t
  misc_feature (463)..(465): n is a, c, g, or t
  misc_feature (467)..(467): n is a, c, g, or t
  misc_feature (471)..(472): n is a, c, g, or t
  misc_feature (474)..(475): n is a, c, g, or t
  misc_feature (478)..(478): n is a, c, g, or t
  misc_feature (482)..(482): n is a, c, g, or t
  misc_feature (487)..(487): n is a, c, g, or t
  misc_feature (490)..(491): n is a, c, g, or t
  misc_feature (496)..(496): n is a, c, g, or t
  misc_feature (499)..(499): n is a, c, g, or t
  misc_feature (503)..(506): n is a, c, g, or t
  misc_feature (510)..(510): n is a, c, g, or t
  misc_feature (513)..(513): n is a, c, g, or t
  misc_feature (515)..(515): n is a, c, g, or t
  misc_feature (522)..(522): n is a, c, g, or t
  misc_feature (524)..(525): n is a, c, g, or t
  Peptide Sequence Number=SeqID_12655
  Probeset Number=SeqID_19386
ccaatccaatctcccaaaccttctcctccttctgaacctcccggcgcatctccgactccatggcccgcaccaagcagacggcgaggaagtccaccggcggcaaggcgccgaggaagcagctggccaccaaggtcgcccgcaagtccgccccggccaccggcggcgtcaagaagccccaccgcttccgccccgnnaccgtcgcgctccgcgagatccgcaagtaccagaagagcaccgagctgctcatccgnaagctccccttccagcgnctcgtccggnaagatcgcccagtacttcaagaaccgaacttccgctttcaaaagntccngcgcctcccgcccctgcaggaggancgccgaagnctaanggntgggnattcttanaggnanaccaacctcccgngnatnnctcntccnancncntccccnttcntgncnangnaantcccngnttnnnatgccannntncgcnngnnaantagnccttncannttttnatncatnnnnactnttnancccaatntnn

SEQ ID NO: 4984 - DNA, 569 bp, Zea mays
  misc_feature (259)..(259): n is a, c, g, or t
  misc_feature (261)..(261): n is a, c, g, or t
  misc_feature (294)..(294): n is a, c, g, or t
  misc_feature (305)..(306): n is a, c, g, or t
  misc_feature (309)..(309): n is a, c, g, or t
  misc_feature (314)..(314): n is a, c, g, or t
  misc_feature (319)..(320): n is a, c, g, or t
  misc_feature (324)..(324): n is a, c, g, or t
  misc_feature (331)..(331): n is a, c, g, or t
  misc_feature (336)..(337): n is a, c, g, or t
  misc_feature (339)..(339): n is a, c, g, or t
  misc_feature (341)..(344): n is a, c, g, or t
  misc_feature (351)..(351): n is a, c, g, or t
  misc_feature (354)..(354): n is a, c, g, or t
  misc_feature (359)..(360): n is a, c, g, or t
  misc_feature (364)..(365): n is a, c, g, or t
  misc_feature (368)..(368): n is a, c, g, or t
  misc_feature (374)..(374): n is a, c, g, or t
  misc_feature (394)..(394): n is a, c, g, or t
  misc_feature (396)..(396): n is a, c, g, or t
  misc_feature (400)..(400): n is a, c, g, or t
  misc_feature (405)..(405): n is a, c, g, or t
  misc_feature (410)..(410): n is a, c, g, or t
  misc_feature (413)..(413): n is a, c, g, or t
  misc_feature (415)..(415): n is a, c, g, or t
  misc_feature (417)..(417): n is a, c, g, or t
  misc_feature (432)..(432): n is a, c, g, or t
  misc_feature (434)..(434): n is a, c, g, or t
  misc_feature (439)..(439): n is a, c, g, or t
  misc_feature (451)..(451): n is a, c, g, or t
  misc_feature (456)..(457): n is a, c, g, or t
  misc_feature (464)..(464): n is a, c, g, or t
  misc_feature (472)..(472): n is a, c, g, or t
  misc_feature (474)..(474): n is a, c, g, or t
  misc_feature (495)..(495): n is a, c, g, or t
  misc_feature (500)..(502): n is a, c, g, or t
  misc_feature (505)..(505): n is a, c, g, or t
  misc_feature (516)..(516): n is a, c, g, or t
  misc_feature (526)..(526): n is a, c, g, or t
  misc_feature (535)..(536): n is a, c, g, or t
  misc_feature (547)..(547): n is a, c, g, or t
  misc_feature (552)..(552): n is a, c, g, or t
  misc_feature (554)..(555): n is a, c, g, or t
  misc_feature (560)..(560): n is a, c, g, or t
  misc_feature (565)..(565): n is a, c, g, or t
  misc_feature (568)..(568): n is a, c, g, or t
  Peptide Sequence Number=SeqID_12656
  Probeset Number=SeqID_19387
gaacacaccacaactcgactcacgcttcttccttggctggcgccagtccaatccgcttgcttccccactttcttccttggccaagttaaccaggtcgactgatccaatccatcgctccagtccaagctcgtttcttcaatccaaagtcaatcgccctcatccaagaaagatccaggagaaacgatcagggcatctcctaagctaaagaaaccgtgcgtgcgtgctccctgtccatatccatcgccatggccggagatgnanagtgctctgtctttgcccgtgaacaccaacaanagtggccgtcnnttncccanaaaanntaanaagagcnaggcnngnannnnaacaaanctncttgnnccgnnggnactctnttttggcgttgccttccttntngatnttcanttatnccncngnccccccacccccccncnttttnccccgccttccnccccnnttttttnctcccctntnccccctcgtttttctatcgtntctannngcncgccacatacnttaatatccncaccctctnncactccactcntcctncnnccctnccccnttnt

SEQ ID NO: 4985 - DNA, 631 bp, Zea mays
  misc_feature (27)..(27): n is a, c, g, or t
  misc_feature (46)..(46): n is a, c, g, or t
  misc_feature (53)..(53): n is a, c, g, or t
  misc_feature (85)..(85): n is a, c, g, or t
  misc_feature (132)..(132): n is a, c, g, or t
  misc_feature (141)..(141): n is a, c, g, or t
  misc_feature (146)..(146): n is a, c, g, or t
  misc_feature (156)..(156): n is a, c, g, or t
  misc_feature (158)..(159): n is a, c, g, or t
  misc_feature (163)..(163): n is a, c, g, or t
  misc_feature (165)..(165): n is a, c, g, or t
  misc_feature (167)..(167): n is a, c, g, or t
  misc_feature (171)..(171): n is a, c, g, or t
  misc_feature (173)..(174): n is a, c, g, or t
  misc_feature (176)..(178): n is a, c, g, or t
  misc_feature (182)..(183): n is a, c, g, or t
  misc_feature (188)..(188): n is a, c, g, or t
  misc_feature (190)..(190): n is a, c, g, or t
  misc_feature (194)..(196): n is a, c, g, or t
  misc_feature (202)..(202): n is a, c, g, or t
  misc_feature (205)..(205): n is a, c, g, or t
  misc_feature (207)..(207): n is a, c, g, or t
  misc_feature (217)..(217): n is a, c, g, or t
  misc_feature (221)..(221): n is a, c, g, or t
  misc_feature (225)..(226): n is a, c, g, or t
  misc_feature (228)..(228): n is a, c, g, or t
  misc_feature (233)..(233): n is a, c, g, or t
  misc_feature (237)..(237): n is a, c, g, or t
  misc_feature (239)..(239): n is a, c, g, or t
  misc_feature (241)..(243): n is a, c, g, or t
  misc_feature (245)..(248): n is a, c, g, or t
  misc_feature (252)..(252): n is a, c, g, or t
  misc_feature (254)..(255): n is a, c, g, or t
  misc_feature (257)..(258): n is a, c, g, or t
  misc_feature (263)..(263): n is a, c, g, or t
  misc_feature (266)..(268): n is a, c, g, or t
  misc_feature (271)..(272): n is a, c, g, or t
  misc_feature (274)..(274): n is a, c, g, or t
  misc_feature (276)..(276): n is a, c, g, or t
  misc_feature (278)..(279): n is a, c, g, or t
  misc_feature (283)..(283): n is a, c, g, or t
  misc_feature (285)..(286): n is a, c, g, or t
  misc_feature (292)..(292): n is a, c, g, or t
  misc_feature (294)..(294): n is a, c, g, or t
  misc_feature (300)..(300): n is a, c, g, or t
  misc_feature (302)..(302): n is a, c, g, or t
  misc_feature (305)..(305): n is a, c, g, or t
  misc_feature (308)..(308): n is a, c, g, or t
  misc_feature (311)..(311): n is a, c, g, or t
  misc_feature (313)..(313): n is a, c, g, or t
  misc_feature (316)..(316): n is a, c, g, or t
  misc_feature (318)..(320): n is a, c, g, or t
  misc_feature (324)..(324): n is a, c, g, or t
  misc_feature (327)..(327): n is a, c, g, or t
  misc_feature (331)..(331): n is a, c, g, or t
  misc_feature (334)..(334): n is a, c, g, or t
  misc_feature (341)..(342): n is a, c, g, or t
  misc_feature (347)..(348): n is a, c, g, or t
  misc_feature (351)..(351): n is a, c, g, or t
  misc_feature (354)..(354): n is a, c, g, or t
  misc_feature (362)..(363): n is a, c, g, or t
  misc_feature (365)..(366): n is a, c, g, or t
  misc_feature (371)..(371): n is a, c, g, or t
  misc_feature (373)..(374): n is a, c, g, or t
  misc_feature (378)..(378): n is a, c, g, or t
  misc_feature (382)..(382): n is a, c, g, or t
  misc_feature (386)..(386): n is a, c, g, or t
  misc_feature (388)..(388): n is a, c, g, or t
  misc_feature (393)..(393): n is a, c, g, or t
  misc_feature (397)..(400): n is a, c, g, or t
  misc_feature (402)..(403): n is a, c, g, or t
  misc_feature (406)..(406): n is a, c, g, or t
  misc_feature (409)..(409): n is a, c, g, or t
  misc_feature (412)..(412): n is a, c, g, or t
  misc_feature (414)..(414): n is a, c, g, or t
  misc_feature (426)..(426): n is a, c, g, or t
  misc_feature (428)..(428): n is a, c, g, or t
  misc_feature (431)..(431): n is a, c, g, or t
  misc_feature (435)..(435): n is a, c, g, or t
  misc_feature (437)..(437): n is a, c, g, or t
  misc_feature (439)..(439): n is a, c, g, or t
  misc_feature (443)..(443): n is a, c, g, or t
  misc_feature (449)..(450): n is a, c, g, or t
  misc_feature (452)..(452): n is a, c, g, or t
  misc_feature (457)..(458): n is a, c, g, or t
  misc_feature (461)..(462): n is a, c, g, or t
  misc_feature (465)..(465): n is a, c, g, or t
  misc_feature (468)..(469): n is a, c, g, or t
  misc_feature (471)..(471): n is a, c, g, or t
  misc_feature (474)..(475): n is a, c, g, or t
  misc_feature (480)..(480): n is a, c, g, or t
  misc_feature (484)..(484): n is a, c, g, or t
  misc_feature (486)..(487): n is a, c, g, or t
  misc_feature (489)..(490): n is a, c, g, or t
  misc_feature (493)..(493): n is a, c, g, or t
  misc_feature (495)..(495): n is a, c, g, or t
  misc_feature (501)..(501): n is a, c, g, or t
  misc_feature (504)..(504): n is a, c, g, or t
  misc_feature (512)..(513): n is a, c, g, or t
  misc_feature (524)..(524): n is a, c, g, or t
  misc_feature (527)..(528): n is a, c, g, or t
  misc_feature (531)..(531): n is a, c, g, or t
  misc_feature (533)..(534): n is a, c, g, or t
  misc_feature (538)..(538): n is a, c, g, or t
  misc_feature (541)..(544): n is a, c, g, or t
  misc_feature (553)..(553): n is a, c, g, or t
  misc_feature (568)..(569): n is a, c, g, or t
  misc_feature (571)..(571): n is a, c, g, or t
  misc_feature (574)..(575): n is a, c, g, or t
  misc_feature (579)..(580): n is a, c, g, or t
  misc_feature (583)..(584): n is a, c, g, or t
  misc_feature (588)..(591): n is a, c, g, or t
  misc_feature (593)..(594): n is a, c, g, or t
  misc_feature (597)..(597): n is a, c, g, or t
  misc_feature (599)..(599): n is a, c, g, or t
  misc_feature (601)..(631): n is a, c, g, or t
  Probeset Number=SeqID_19388
attccatccaccttcatcttcttgtanccacagagcgagccagcgnaccgagnagcggcgatttccatttcatctcagaattcanacggtgttgttgtctagggcaagaggggtttcttggtgttgatgtcnacggcgtanggtgngcctgagatncnntccncntnggcngnngnnncacnnatcgnancccnnncgtcanacncnccgcccgctntgcntccnngncggtntgcncngnnngnnnntttncnncnnccccnttnnnctnncncngnngtantnncccccncnacgccncnctngangcncnccngnnncccnctnaagncantcccggnngttanncgntgngcggccgnntnnatatnannatcnccangctncntttgntcannnncnnagnccnttncncagccgccgaangngtnacantncntgtnttcacnngnctatnnggnnacncanntntannaacgntccncnncnngcncnttcagntantcccgccnncccgcccagcnttnntcncnnaccntgnnnncgctccatnttttataggacattnntnctnncacnnacnntatnnnncnntcncnannnnnnnnnnnnnnnnnnnnnnnnnnnnnnn

SEQ ID NO: 4986 - DNA, 585 bp, Zea mays
  misc_feature (22)..(22): n is a, c, g, or t
  misc_feature (124)..(124): n is a, c, g, or t
  misc_feature (135)..(135): n is a, c, g, or t
  misc_feature (142)..(142): n is a, c, g, or t
  misc_feature (147)..(147): n is a, c, g, or t
  misc_feature (157)..(157): n is a, c, g, or t
  misc_feature (165)..(165): n is a, c, g, or t
  misc_feature (181)..(181): n is a, c, g, or t
  misc_feature (196)..(196): n is a, c, g, or t
  misc_feature (199)..(199): n is a, c, g, or t
  misc_feature (220)..(220): n is a, c, g, or t
  misc_feature (226)..(226): n is a, c, g, or t
  misc_feature (229)..(229): n is a, c, g, or t
  misc_feature (235)..(235): n is a, c, g, or t
  misc_feature (238)..(238): n is a, c, g, or t
  misc_feature (244)..(244): n is a, c, g, or t
  misc_feature (252)..(252): n is a, c, g, or t
  misc_feature (256)..(256): n is a, c, g, or t
  misc_feature (270)..(270): n is a, c, g, or t
  misc_feature (275)..(279): n is a, c, g, or t
  misc_feature (284)..(286): n is a, c, g, or t
  misc_feature (290)..(292): n is a, c, g, or t
  misc_feature (294)..(294): n is a, c, g, or t
  misc_feature (299)..(299): n is a, c, g, or t
  misc_feature (301)..(303): n is a, c, g, or t
  misc_feature (305)..(305): n is a, c, g, or t
  misc_feature (307)..(308): n is a, c, g, or t
  misc_feature (311)..(313): n is a, c, g, or t
  misc_feature (316)..(317): n is a, c, g, or t
  misc_feature (319)..(323): n is a, c, g, or t
  misc_feature (325)..(327): n is a, c, g, or t
  misc_feature (330)..(330): n is a, c, g, or t
  misc_feature (332)..(332): n is a, c, g, or t
  misc_feature (334)..(334): n is a, c, g, or t
  misc_feature (336)..(336): n is a, c, g, or t
  misc_feature (343)..(343): n is a, c, g, or t
  misc_feature (345)..(345): n is a, c, g, or t
  misc_feature (351)..(352): n is a, c, g, or t
  misc_feature (355)..(355): n is a, c, g, or t
  misc_feature (360)..(363): n is a, c, g, or t
  misc_feature (365)..(366): n is a, c, g, or t
  misc_feature (370)..(370): n is a, c, g, or t
  misc_feature (373)..(373): n is a, c, g, or t
  misc_feature (377)..(377): n is a, c, g, or t
  misc_feature (383)..(383): n is a, c, g, or t
  misc_feature (385)..(385): n is a, c, g, or t
  misc_feature (389)..(389): n is a, c, g, or t
  misc_feature (394)..(396): n is a, c, g, or t
  misc_feature (399)..(399): n is a, c, g, or t
  misc_feature (402)..(402): n is a, c, g, or t
  misc_feature (406)..(406): n is a, c, g, or t
  misc_feature (408)..(410): n is a, c, g, or t
  misc_feature (415)..(415): n is a, c, g, or t
  misc_feature (418)..(418): n is a, c, g, or t
  misc_feature (421)..(421): n is a, c, g, or t
  misc_feature (426)..(427): n is a, c, g, or t
  misc_feature (431)..(431): n is a, c, g, or t
  misc_feature (434)..(435): n is a, c, g, or t
  misc_feature (438)..(438): n is a, c, g, or t
  misc_feature (447)..(448): n is a, c, g, or t
  misc_feature (454)..(455): n is a, c, g, or t
  misc_feature (460)..(460): n is a, c, g, or t
  misc_feature (468)..(470): n is a, c, g, or t
  misc_feature (477)..(477): n is a, c, g, or t
  misc_feature (479)..(479): n is a, c, g, or t
  misc_feature (491)..(493): n is a, c, g, or t
  misc_feature (495)..(496): n is a, c, g, or t
  misc_feature (499)..(499): n is a, c, g, or t
  misc_feature (506)..(508): n is a, c, g, or t
  misc_feature (511)..(511): n is a, c, g, or t
  misc_feature (515)..(516): n is a, c, g, or t
  misc_feature (518)..(518): n is a, c, g, or t
  misc_feature (522)..(522): n is a, c, g, or t
  misc_feature (524)..(524): n is a, c, g, or t
  misc_feature (528)..(528): n is a, c, g, or t
  misc_feature (530)..(530): n is a, c, g, or t
  misc_feature (532)..(532): n is a, c, g, or t
  misc_feature (536)..(536): n is a, c, g, or t
  misc_feature (539)..(539): n is a, c, g, or t
  misc_feature (541)..(541): n is a, c, g, or t
  misc_feature (545)..(545): n is a, c, g, or t
  misc_feature (548)..(548): n is a, c, g, or t
  misc_feature (550)..(551): n is a, c, g, or t
  misc_feature (559)..(560): n is a, c, g, or t
  misc_feature (569)..(570): n is a, c, g, or t
  misc_feature (574)..(574): n is a, c, g, or t
  misc_feature (577)..(577): n is a, c, g, or t
  misc_feature (580)..(580): n is a, c, g, or t
  misc_feature (582)..(582): n is a, c, g, or t
  misc_feature (584)..(584): n is a, c, g, or t
  Peptide Sequence Number=SeqID_12657
  Probeset Number=SeqID_19389
actactatattcagcaaattanggtgtttggcagactagatgcatacgtccgccaactagtaccactgccaccgacgagtactgatctggtgcggtcgacatgggcggcctgaggagcacgcancacgactgcgncggcagnggcgntagcgtcggncactcggnctcaattcctccttgnggctctccctccccnacngggctgatcttcttcctcgcntccgancgnttcctnacnagcaanctgtccangcanaaccgacccttcanggttnnnnnaaacnnnatcnnncnagggngnnnancnngannnatnncnnnnnannnttnancntnctcacancnggagtnnaantgcannnnannccantantganaaactnanccantgacnnnaanccntacncnnnatgtntancgntcccnnacgnaanntanacttttaannaaaacnncaccnccccgacnnnaatgagncncggctgcgacannntnntanttaaaannngcnaacnnantganantttncntngacnctnanattntantnntacgccannagtcatttnntctnccnganancna

SEQ ID NO: 4987 - DNA, 663 bp, Zea mays
  misc_feature (123)..(123): n is a, c, g, or t
  misc_feature (152)..(152): n is a, c, g, or t
  misc_feature (159)..(159): n is a, c, g, or t
  misc_feature (169)..(170): n is a, c, g, or t
  misc_feature (174)..(174): n is a, c, g, or t
  misc_feature (177)..(177): n is a, c, g, or t
  misc_feature (183)..(183): n is a, c, g, or t
  misc_feature (192)..(193): n is a, c, g, or t
  misc_feature (211)..(211): n is a, c, g, or t
  misc_feature (216)..(216): n is a, c, g, or t
  misc_feature (218)..(220): n is a, c, g, or t
  misc_feature (232)..(233): n is a, c, g, or t
  misc_feature (237)..(237): n is a, c, g, or t
  misc_feature (240)..(240): n is a, c, g, or t
  misc_feature (242)..(242): n is a, c, g, or t
  misc_feature (253)..(253): n is a, c, g, or t
  misc_feature (257)..(257): n is a, c, g, or t
  misc_feature (259)..(259): n is a, c, g, or t
  misc_feature (264)..(266): n is a, c, g, or t
  misc_feature (270)..(270): n is a, c, g, or t
  misc_feature (274)..(275): n is a, c, g, or t
  misc_feature (277)..(278): n is a, c, g, or t
  misc_feature (280)..(281): n is a, c, g, or t
  misc_feature (285)..(290): n is a, c, g, or t
  misc_feature (292)..(292): n is a, c, g, or t
  misc_feature (298)..(298): n is a, c, g, or t
  misc_feature (300)..(300): n is a, c, g, or t
  misc_feature (303)..(303): n is a, c, g, or t
  misc_feature (312)..(312): n is a, c, g, or t
  misc_feature (314)..(315): n is a, c, g, or t
  misc_feature (317)..(317): n is a, c, g, or t
  misc_feature (325)..(326): n is a, c, g, or t
  misc_feature (330)..(330): n is a, c, g, or t
  misc_feature (334)..(334): n is a, c, g, or t
  misc_feature (336)..(337): n is a, c, g, or t
  misc_feature (340)..(340): n is a, c, g, or t
  misc_feature (344)..(344): n is a, c, g, or t
  misc_feature (350)..(350): n is a, c, g, or t
  misc_feature (353)..(353): n is a, c, g, or t
  misc_feature (355)..(355): n is a, c, g, or t
  misc_feature (358)..(358): n is a, c, g, or t
  misc_feature (361)..(361): n is a, c, g, or t
  misc_feature (369)..(369): n is a, c, g, or t
  misc_feature (375)..(375): n is a, c, g, or t
  misc_feature (382)..(382): n is a, c, g, or t
  misc_feature (389)..(389): n is a, c, g, or t
  misc_feature (393)..(393): n is a, c, g, or t
  misc_feature (400)..(401): n is a, c, g, or t
  misc_feature (407)..(407): n is a, c, g, or t
  misc_feature (409)..(410): n is a, c, g, or t
  misc_feature (424)..(424): n is a, c, g, or t
  misc_feature (426)..(426): n is a, c, g, or t
  misc_feature (429)..(429): n is a, c, g, or t
  misc_feature (432)..(432): n is a, c, g, or t
  misc_feature (434)..(434): n is a, c, g, or t
  misc_feature (439)..(440): n is a, c, g, or t
  misc_feature (443)..(444): n is a, c, g, or t
  misc_feature (446)..(446): n is a, c, g, or t
  misc_feature (448)..(448): n is a, c, g, or t
  misc_feature (450)..(450): n is a, c, g, or t
  misc_feature (454)..(454): n is a, c, g, or t
  misc_feature (456)..(458): n is a, c, g, or t
  misc_feature (460)..(460): n is a, c, g, or t
  misc_feature (462)..(462): n is a, c, g, or t
  misc_feature (467)..(468): n is a, c, g, or t
  misc_feature (471)..(471): n is a, c, g, or t
  misc_feature (479)..(479): n is a, c, g, or t
  misc_feature (481)..(481): n is a, c, g, or t
  misc_feature (501)..(501): n is a, c, g, or t
  misc_feature (503)..(503): n is a, c, g, or t
  misc_feature (510)..(511): n is a, c, g, or t
  misc_feature (515)..(516): n is a, c, g, or t
  misc_feature (518)..(518): n is a, c, g, or t
  misc_feature (521)..(522): n is a, c, g, or t
  misc_feature (524)..(524): n is a, c, g, or t
  misc_feature (526)..(526): n is a, c, g, or t
  misc_feature (529)..(529): n is a, c, g, or t
  misc_feature (536)..(536): n is a, c, g, or t
  misc_feature (546)..(546): n is a, c, g, or t
  misc_feature (549)..(549): n is a, c, g, or t
  misc_feature (551)..(551): n is a, c, g, or t
  misc_feature (553)..(553): n is a, c, g, or t
  misc_feature (555)..(556): n is a, c, g, or t
  misc_feature (562)..(563): n is a, c, g, or t
  misc_feature (567)..(567): n is a, c, g, or t
  misc_feature (570)..(570): n is a, c, g, or t
  misc_feature (576)..(576): n is a, c, g, or t
  misc_feature (579)..(579): n is a, c, g, or t
  misc_feature (581)..(582): n is a, c, g, or t
  misc_feature (584)..(584): n is a, c, g, or t
  misc_feature (586)..(586): n is a, c, g, or t
  misc_feature (588)..(590): n is a, c, g, or t
  misc_feature (593)..(593): n is a, c, g, or t
  misc_feature (601)..(663): n is a, c, g, or t
  Probeset Number=SeqID_19390
catttttgctccgtgcgtgcgcccgtcactggcgctcggaagaggagtggttgcgccctcgcccaacggctcgcccggccccgtgccgcttgttggcttgcgcccttgtgcggggtggagtgnttgtccgctggttttgtgcccatcgccgntgccggncgacgatgannggcngtntcgcanaaaccccanntcttgtccccccatcttnatttncnnntcccccgcgccnnttcnccntnctcacaacttnaccncntacannntgtntacnnanncnnccannnnnngncaaccnanaanaaaaccccncnntncttaccgnnccanaccnanntcncccncctccnccntnacnacnaccatctnatacancattgcnacctttnacgnagcaccnnttcatngnnaaactaatctaaancnatnctncnaatannccnnantnanatcncnnncntnacatnnctnaatcacantnccgctttttcttagtatcancncactctnncacnncnacnncnanaancaatatnactctttctnccncncncnncctccnntttnatntctcanttnannancntnnnttnactactcnnnnnnnnnnnnnnnnnnnnnnnnnnnnnnnnnnnnnnnnnnnnnnnnnnnnnnnnnnnnnnn

SEQ ID NO: 4988 - DNA, 473 bp, Zea mays
  misc_feature (338)..(338): n is a, c, g, or t
  misc_feature (345)..(345): n is a, c, g, or t
  misc_feature (355)..(355): n is a, c, g, or t
  misc_feature (363)..(363): n is a, c, g, or t
  misc_feature (366)..(366): n is a, c, g, or t
  misc_feature (368)..(368): n is a, c, g, or t
  misc_feature (370)..(371): n is a, c, g, or t
  misc_feature (374)..(375): n is a, c, g, or t
  misc_feature (378)..(378): n is a, c, g, or t
  misc_feature (381)..(390): n is a, c, g, or t
  misc_feature (393)..(399): n is a, c, g, or t
  misc_feature (401)..(406): n is a, c, g, or t
  misc_feature (410)..(410): n is a, c, g, or t
  misc_feature (413)..(428): n is a, c, g, or t
  misc_feature (430)..(472): n is a, c, g, or t
  Peptide Sequence Number=SeqID_12658
  Probeset Number=SeqID_19391
aatcgacgtaacaccagcactttcaccactttgcgtcgagcttcccgcgcgcacccacgctcttgatcattgccgccgtagcctgctcgggacgtacggacgtgccatccgtcgtattttattttcgcagcaatgcgtatggcgccggtggcggcaggaagagcccacggcgcttggagcagcgcaccacgcgcgctctccgaccggcgcggcctcctgtcatcatctcacgacgtcgccgccacggcggacggttcggttcggcgctcgtcgcgccggcgggaagcagagtgatcctctgcctcgcgtcgggaggtggtcacccgcgggacagcggngagtggnagcccgcggnctcgccgnggnangnncgnntgntgnnnnnnnnnntgnnnnnnntnnnnnncccntcnnnnnnnnnnnnnnnntnnnnnnnnnnnnnnnnnnnnnnnnnnnnnnnnnnnnnnnnnnnt

SEQ ID NO: 4989 - DNA, 530 bp, Zea mays
  misc_feature (298)..(298): n is a, c, g, or t
  misc_feature (314)..(314): n is a, c, g, or t
  misc_feature (328)..(328): n is a, c, g, or t
  misc_feature (331)..(333): n is a, c, g, or t
  misc_feature (335)..(335): n is a, c, g, or t
  misc_feature (340)..(340): n is a, c, g, or t
  misc_feature (342)..(342): n is a, c, g, or t
  misc_feature (346)..(346): n is a, c, g, or t
  misc_feature (351)..(352): n is a, c, g, or t
  misc_feature (354)..(354): n is a, c, g, or t
  misc_feature (362)..(364): n is a, c, g, or t
  misc_feature (370)..(370): n is a, c, g, or t
  misc_feature (381)..(383): n is a, c, g, or t
  misc_feature (388)..(388): n is a, c, g, or t
  misc_feature (393)..(393): n is a, c, g, or t
  misc_feature (395)..(396): n is a, c, g, or t
  misc_feature (401)..(401): n is a, c, g, or t
  misc_feature (406)..(407): n is a, c, g, or t
  misc_feature (409)..(409): n is a, c, g, or t
  misc_feature (411)..(411): n is a, c, g, or t
  misc_feature (414)..(415): n is a, c, g, or t
  misc_feature (419)..(419): n is a, c, g, or t
  misc_feature (422)..(422): n is a, c, g, or t
  misc_feature (425)..(425): n is a, c, g, or t
  misc_feature (431)..(432): n is a, c, g, or t
  misc_feature (439)..(439): n is a, c, g, or t
  misc_feature (443)..(445): n is a, c, g, or t
  misc_feature (451)..(451): n is a, c, g, or t
  misc_feature (455)..(455): n is a, c, g, or t
  misc_feature (466)..(466): n is a, c, g, or t
  misc_feature (468)..(468): n is a, c, g, or t
  misc_feature (470)..(470): n is a, c, g, or t
  misc_feature (475)..(475): n is a, c, g, or t
  misc_feature (478)..(479): n is a, c, g, or t
  misc_feature (487)..(488): n is a, c, g, or t
  misc_feature (494)..(494): n is a, c, g, or t
  misc_feature (496)..(496): n is a, c, g, or t
  misc_feature (498)..(498): n is a, c, g, or t
  misc_feature (506)..(506): n is a, c, g, or t
  misc_feature (508)..(508): n is a, c, g, or t
  misc_feature (511)..(511): n is a, c, g, or t
  misc_feature (515)..(515): n is a, c, g, or t
  misc_feature (520)..(520): n is a, c, g, or t
  misc_feature (524)..(524): n is a, c, g, or t
  misc_feature (526)..(526): n is a, c, g, or t
  Probeset Number=SeqID_19392
agggggtagcttagaatcgaagcggacgacgccacatatataccgcggccgcggcggcccctctccctcgtccgtcagatacgcgccctcgcatcgccgccgaagcccatcgctctcactctccgaaccccgccgacgccagcgcgggctcctgctccggaggcttcggccgcaatggctctccccaacaccccgcccgtggactaccccagcttcaagctcgtcctcgtcggcgacggcggcaccggcaagacgacgttcgtgaagaggcacgtcaccggggagttcgagaagaagnacgaaccgacgatcgncgtgtaaggtgcgngtnnntngtacntnccanattannanggacaagnnntcggtnttctacttgcnnnactancaatncnntttcntaaannantnccnntcangtnccncccatnntattttnccannncccccnattnatctaccatgntncncattntannctatgtanntacccncnantcttcttncnttnaacnaaaanatantnccat

SEQ ID NO: 4990 - DNA, 536 bp, Zea mays
  misc_feature (128)..(128): n is a, c, g, or t
  misc_feature (201)..(201): n is a, c, g, or t
  misc_feature (203)..(203): n is a, c, g, or t
  misc_feature (228)..(228): n is a, c, g, or t
  misc_feature (234)..(234): n is a, c, g, or t
  misc_feature (241)..(241): n is a, c, g, or t
  misc_feature (244)..(244): n is a, c, g, or t
  misc_feature (247)..(247): n is a, c, g, or t
  misc_feature (249)..(250): n is a, c, g, or t
  misc_feature (255)..(255): n is a, c, g, or t
  misc_feature (263)..(263): n is a, c, g, or t
  misc_feature (266)..(266): n is a, c, g, or t
  misc_feature (271)..(272): n is a, c, g, or t
  misc_feature (288)..(290): n is a, c, g, or t
  misc_feature (294)..(294): n is a, c, g, or t
  misc_feature (296)..(297): n is a, c, g, or t
  misc_feature (300)..(300): n is a, c, g, or t
  misc_feature (307)..(309): n is a, c, g, or t
  misc_feature (312)..(312): n is a, c, g, or t
  misc_feature (322)..(323): n is a, c, g, or t
  misc_feature (325)..(325): n is a, c, g, or t
  misc_feature (328)..(331): n is a, c, g, or t
  misc_feature (339)..(339): n is a, c, g, or t
  misc_feature (341)..(341): n is a, c, g, or t
  misc_feature (344)..(347): n is a, c, g, or t
  misc_feature (352)..(354): n is a, c, g, or t
  misc_feature (357)..(357): n is a, c, g, or t
  misc_feature (359)..(359): n is a, c, g, or t
  misc_feature (365)..(365): n is a, c, g, or t
  misc_feature (370)..(372): n is a, c, g, or t
  misc_feature (377)..(378): n is a, c, g, or t
  misc_feature (381)..(381): n is a, c, g, or t
  misc_feature (393)..(393): n is a, c, g, or t
  misc_feature (395)..(395): n is a, c, g, or t
  misc_feature (397)..(398): n is a, c, g, or t
  misc_feature (403)..(403): n is a, c, g, or t
  misc_feature (413)..(413): n is a, c, g, or t
  misc_feature (418)..(418): n is a, c, g, or t
  misc_feature (420)..(421): n is a, c, g, or t
  misc_feature (446)..(448): n is a, c, g, or t
  misc_feature (450)..(451): n is a, c, g, or t
  misc_feature (454)..(454): n is a, c, g, or t
  misc_feature (467)..(467): n is a, c, g, or t
  misc_feature (470)..(470): n is a, c, g, or t
  misc_feature (495)..(495): n is a, c, g, or t
  misc_feature (498)..(498): n is a, c, g, or t
  misc_feature (500)..(500): n is a, c, g, or t
  misc_feature (507)..(508): n is a, c, g, or t
  misc_feature (512)..(512): n is a, c, g, or t
  misc_feature (516)..(517): n is a, c, g, or t
  misc_feature (523)..(526): n is a, c, g, or t
  misc_feature (529)..(529): n is a, c, g, or t
  Peptide Sequence Number=SeqID_12659
  Probeset Number=SeqID_19393
attgctcgtccagggttttagccgccgccgccgccgcccccgccccagccccccccccacagagagaagcgagcgacagcgaggtcgacgccatggtgcagcgcctgacgtaccggaagcggtacagntacgccaccaagtccaaccagaccagggttgtcaaaaccccaggagggaggcttgtgtaccagtacaccaaanangagggcgagcggtccgaaatgtccnggtcancggcaanaanatntnnggggntatcttcntcnaaggnnctactgagtacaaaannncccngnnttntcccagnnnacnggataacagnngnatnnnncctttatngntgnnnntttannnttnanaccatnatacnnncttannccnatctcatttttncncnnattcntcttttcctntcccncnnccccttccctcttatctcttaattnnntnnaantttacttcctttnttntttgcctttcaattcactaattccnacntnttttatnnttcntttnntcattnnnnacnctttccg

SEQ ID NO: 4991 - DNA, 452 bp, Zea mays
  misc_feature (356)..(356): n is a, c, g, or t
  misc_feature (444)..(444): n is a, c, g, or t
  misc_feature (447)..(447): n is a, c, g, or t
  Peptide Sequence Number=SeqID_12660
  Probeset Number=SeqID_19394
atcgccgccgcatgttcgtccaacgtctctgcttcctgctccgactccgactccgaggatctccgactcctcctcccaaacctcctccccgcgtccgccgccgccgccccctcatccgaggcgcagctccaccaattccacctccccgcgcttccgtcccccatcaccgtccgcaccatcccttccctcgggctcaccttccagctctggccctccgccaccacgctcctccgcttcctcccagcctccccgcacctcctcccgcgcccgcccgccgcacactgcccgctcagcatcctggagctcggctccgggaccggcgccgcgggcctcgccctggcggcggctctcccggngcacaccgtcctctccgacctccccgccgcgctccccaatctccgccacaacgcctccctcaacgcgcccctcctcgactcccgcggnggntccgt

SEQ ID NO: 4992 - DNA, 541 bp, Zea mays
  misc_feature (169)..(169): n is a, c, g, or t
  misc_feature (293)..(293): n is a, c, g, or t
  misc_feature (295)..(295): n is a, c, g, or t
  misc_feature (297)..(297): n is a, c, g, or t
  misc_feature (300)..(301): n is a, c, g, or t
  misc_feature (307)..(308): n is a, c, g, or t
  misc_feature (314)..(315): n is a, c, g, or t
  misc_feature (320)..(320): n is a, c, g, or t
  misc_feature (322)..(322): n is a, c, g, or t
  misc_feature (324)..(324): n is a, c, g, or t
  misc_feature (328)..(328): n is a, c, g, or t
  misc_feature (331)..(332): n is a, c, g, or t
  misc_feature (336)..(336): n is a, c, g, or t
  misc_feature (342)..(344): n is a, c, g, or t
  misc_feature (348)..(348): n is a, c, g, or t
  misc_feature (351)..(353): n is a, c, g, or t
  misc_feature (355)..(356): n is a, c, g, or t
  misc_feature (358)..(358): n is a, c, g, or t
  misc_feature (360)..(360): n is a, c, g, or t
  misc_feature (362)..(363): n is a, c, g, or t
  misc_feature (365)..(366): n is a, c, g, or t
  misc_feature (370)..(370): n is a, c, g, or t
  misc_feature (372)..(375): n is a, c, g, or t
  misc_feature (380)..(380): n is a, c, g, or t
  misc_feature (385)..(386): n is a, c, g, or t
  misc_feature (388)..(389): n is a, c, g, or t
  misc_feature (393)..(394): n is a, c, g, or t
  misc_feature (396)..(397): n is a, c, g, or t
  misc_feature (400)..(400): n is a, c, g, or t
  misc_feature (408)..(408): n is a, c, g, or t
  misc_feature (410)..(411): n is a, c, g, or t
  misc_feature (413)..(413): n is a, c, g, or t
  misc_feature (415)..(415): n is a, c, g, or t
  misc_feature (417)..(418): n is a, c, g, or t
  misc_feature (421)..(421): n is a, c, g, or t
  misc_feature (428)..(428): n is a, c, g, or t
  misc_feature (430)..(430): n is a, c, g, or t
  misc_feature (432)..(434): n is a, c, g, or t
  misc_feature (436)..(436): n is a, c, g, or t
  misc_feature (438)..(439): n is a, c, g, or t
  misc_feature (441)..(441): n is a, c, g, or t
  misc_feature (444)..(444): n is a, c, g, or t
  misc_feature (446)..(447): n is a, c, g, or t
  misc_feature (449)..(450): n is a, c, g, or t
  misc_feature (452)..(454): n is a, c, g, or t
  misc_feature (457)..(457): n is a, c, g, or t
  misc_feature (461)..(461): n is a, c, g, or t
  misc_feature (464)..(464): n is a, c, g, or t
  misc_feature (466)..(467): n is a, c, g, or t
  misc_feature (469)..(469): n is a, c, g, or t
  misc_feature (473)..(476): n is a, c, g, or t
  misc_feature (479)..(479): n is a, c, g, or t
  misc_feature (481)..(481): n is a, c, g, or t
  misc_feature (485)..(485): n is a, c, g, or t
  misc_feature (487)..(487): n is a, c, g, or t
  misc_feature (489)..(489): n is a, c, g, or t
  misc_feature (491)..(492): n is a, c, g, or t
  misc_feature (494)..(494): n is a, c, g, or t
  misc_feature (498)..(498): n is a, c, g, or t
  misc_feature (505)..(505): n is a, c, g, or t
  misc_feature (508)..(508): n is a, c, g, or t
  misc_feature (514)..(514): n is a, c, g, or t
  misc_feature (517)..(517): n is a, c, g, or t
  misc_feature (519)..(521): n is a, c, g, or t
  misc_feature (526)..(526): n is a, c, g, or t
  misc_feature (532)..(532): n is a, c, g, or t
  misc_feature (538)..(540): n is a, c, g, or t
  Peptide Sequence Number=SeqID_12661
  Probeset Number=SeqID_19395
ttccctacccttcgccgccaccgacagaatccaccggcgtagcccggatggcgccggcggcggcggacatcccttccccgctcgctaggaggtggattcggggctccctcctccaggcggcggtgctgctcggcggacggcggtgtggctcggcggcggagtccgcggncctcgagcgcccttgacgcgacggcgtggccgttggctgcggggctgcgtggcgtgcggctggccggcggtgcccgctcggcccagatctgggccctttcggccccatctgggtttggggcggncngncgnnttcacnncttctnnatctntncncccntgnnaggngggggnnncccngtnnntnntngntnncnnccancnnnnccccnccacnntnnctcnngnnagntcccgccncnntnantnnctntcttacncntnnntntnntnccngnntnncnnnagnaccnccncnncncctnnnntcntncttncntntnntntccnccttcgntcntttccntcncnnntttcnccttcncccccnnnc

SEQ ID NO: 4993 - DNA, 645 bp, Zea mays
  misc_feature (207)..(207): n is a, c, g, or t
  misc_feature (215)..(217): n is a, c, g, or t
  misc_feature (219)..(219): n is a, c, g, or t
  misc_feature (227)..(227): n is a, c, g, or t
  misc_feature (229)..(230): n is a, c, g, or t
  misc_feature (239)..(239): n is a, c, g, or t
  misc_feature (246)..(246): n is a, c, g, or t
  misc_feature (248)..(248): n is a, c, g, or t
  misc_feature (261)..(261): n is a, c, g, or t
  misc_feature (263)..(263): n is a, c, g, or t
  misc_feature (265)..(265): n is a, c, g, or t
  misc_feature (267)..(267): n is a, c, g, or t
  misc_feature (270)..(270): n is a, c, g, or t
  misc_feature (273)..(273): n is a, c, g, or t
  misc_feature (282)..(282): n is a, c, g, or t
  misc_feature (286)..(286): n is a, c, g, or t
  misc_feature (288)..(288): n is a, c, g, or t
  misc_feature (293)..(294): n is a, c, g, or t
  misc_feature (298)..(300): n is a, c, g, or t
  misc_feature (303)..(304): n is a, c, g, or t
  misc_feature (307)..(308): n is a, c, g, or t
  misc_feature (310)..(310): n is a, c, g, or t
  misc_feature (319)..(319): n is a, c, g, or t
  misc_feature (322)..(323): n is a, c, g, or t
  misc_feature (325)..(325): n is a, c, g, or t
  misc_feature (332)..(333): n is a, c, g, or t
  misc_feature (338)..(338): n is a, c, g, or t
  misc_feature (349)..(349): n is a, c, g, or t
  misc_feature (351)..(352): n is a, c, g, or t
  misc_feature (354)..(354): n is a, c, g, or t
  misc_feature (356)..(356): n is a, c, g, or t
  misc_feature (358)..(358): n is a, c, g, or t
  misc_feature (360)..(361): n is a, c, g, or t
  misc_feature (365)..(365): n is a, c, g, or t
  misc_feature (372)..(372): n is a, c, g, or t
  misc_feature (374)..(374): n is a, c, g, or t
  misc_feature (377)..(377): n is a, c, g, or t
  misc_feature (386)..(388): n is a, c, g, or t
  misc_feature (390)..(391): n is a, c, g, or t
  misc_feature (393)..(394): n is a, c, g, or t
  misc_feature (400)..(400): n is a, c, g, or t
  misc_feature (403)..(404): n is a, c, g, or t
  misc_feature (407)..(407): n is a, c, g, or t
  misc_feature (411)..(411): n is a, c, g, or t
  misc_feature (413)..(413): n is a, c, g, or t
  misc_feature (416)..(416): n is a, c, g, or t
  misc_feature (421)..(421): n is a, c, g, or t
  misc_feature (424)..(424): n is a, c, g, or t
  misc_feature (428)..(428): n is a, c, g, or t
  misc_feature (431)..(431): n is a, c, g, or t
  misc_feature (433)..(433): n is a, c, g, or t
  misc_feature (436)..(436): n is a, c, g, or t
  misc_feature (438)..(439): n is a, c, g, or t
  misc_feature (447)..(447): n is a, c, g, or t
  misc_feature (449)..(449): n is a, c, g, or t
  misc_feature (453)..(454): n is a, c, g, or t
  misc_feature (460)..(460): n is a, c, g, or t
  misc_feature (463)..(463): n is a, c, g, or t
  misc_feature (465)..(465): n is a, c, g, or t
  misc_feature (468)..(468): n is a, c, g, or t
  misc_feature (470)..(470): n is a, c, g, or t
  misc_feature (473)..(473): n is a, c, g, or t
  misc_feature (476)..(477): n is a, c, g, or t
  misc_feature (488)..(488): n is a, c, g, or t
  misc_feature (492)..(493): n is a, c, g, or t
  misc_feature (497)..(497): n is a, c, g, or t
  misc_feature (501)..(502): n is a, c, g, or t
  misc_feature (504)..(506): n is a, c, g, or t
  misc_feature (508)..(508): n is a, c, g, or t
  misc_feature (510)..(514): n is a, c, g, or t
  misc_feature (516)..(516): n is a, c, g, or t
  misc_feature (522)..(522): n is a, c, g, or t
  misc_feature (527)..(527): n is a, c, g, or t
  misc_feature (531)..(531): n is a, c, g, or t
  misc_feature (536)..(536): n is a, c, g, or t
  misc_feature (539)..(541): n is a, c, g, or t
  misc_feature (546)..(546): n is a, c, g, or t
  misc_feature (559)..(559): n is a, c, g, or t
  misc_feature (562)..(562): n is a, c, g, or t
  misc_feature (564)..(564): n is a, c, g, or t
  misc_feature (568)..(569): n is a, c, g, or t
  misc_feature (577)..(577): n is a, c, g, or t
  misc_feature (579)..(579): n is a, c, g, or t
  misc_feature (585)..(585): n is a, c, g, or t
  misc_feature (589)..(589): n is a, c, g, or t
  misc_feature (597)..(598): n is a, c, g, or t
  misc_feature (601)..(645): n is a, c, g, or t
  Probeset Number=SeqID_19396
cccactggccactcccctccctcccgcatcagcagccaaacgccaccgagctcccggcctccgcagccaggaacatcctcctttctcccgagctcctactcctccacgtacgctcggagcttaccataggacgccagacgccagtcgccagccatgaagcggctcctgaggcggctctcccgcacggtatcggtatcggaggcgggngaggacgnnngnccggacgntnncggccctancaagcangncaccgggagggangnangnaanggngaaaaaaangtcncnccccnntttnnnccnnatnntntcccatccnaanncncattccnnactcncccgtcccacncnnancngntnntccnccctttncnctncctcacccnnncnnannagtccntcnngancaantnatnaccgnccnccgnccnanttncnntcggtgcntntccnnccccanagntnctnanagnttnnatcctcccacncganncccntacnncnnntntnnnnncncccccncaccntacnccatnaannncctcntattatcacttgntantntgannatatagancnacctcncacnctcgcctnntgnnnnnnnnnnnnnnnnnnnnnnnnnnnnnnnnnnnnnnnnnnnnn

SEQ ID NO: 4994 - DNA, 527 bp, Zea mays
  misc_feature (230)..(230): n is a, c, g, or t
  misc_feature (245)..(245): n is a, c, g, or t
  misc_feature (261)..(261): n is a, c, g, or t
  misc_feature (263)..(263): n is a, c, g, or t
  misc_feature (266)..(266): n is a, c, g, or t
  misc_feature (269)..(269): n is a, c, g, or t
  misc_feature (274)..(274): n is a, c, g, or t
  misc_feature (281)..(281): n is a, c, g, or t
  misc_feature (291)..(291): n is a, c, g, or t
  misc_feature (300)..(300): n is a, c, g, or t
  misc_feature (304)..(304): n is a, c, g, or t
  misc_feature (308)..(309): n is a, c, g, or t
  misc_feature (317)..(318): n is a, c, g, or t
  misc_feature (321)..(321): n is a, c, g, or t
  misc_feature (323)..(323): n is a, c, g, or t
  misc_feature (326)..(327): n is a, c, g, or t
  misc_feature (330)..(330): n is a, c, g, or t
  misc_feature (334)..(335): n is a, c, g, or t
  misc_feature (339)..(340): n is a, c, g, or t
  misc_feature (343)..(344): n is a, c, g, or t
  misc_feature (346)..(346): n is a, c, g, or t
  misc_feature (350)..(350): n is a, c, g, or t
  misc_feature (362)..(362): n is a, c, g, or t
  misc_feature (369)..(369): n is a, c, g, or t
  misc_feature (371)..(371): n is a, c, g, or t
  misc_feature (375)..(376): n is a, c, g, or t
  misc_feature (380)..(380): n is a, c, g, or t
  misc_feature (384)..(385): n is a, c, g, or t
  misc_feature (388)..(388): n is a, c, g, or t
  misc_feature (394)..(396): n is a, c, g, or t
  misc_feature (401)..(407): n is a, c, g, or t
  misc_feature (412)..(412): n is a, c, g, or t
  misc_feature (417)..(419): n is a, c, g, or t
  misc_feature (422)..(423): n is a, c, g, or t
  misc_feature (426)..(427): n is a, c, g, or t
  misc_feature (431)..(433): n is a, c, g, or t
  misc_feature (436)..(437): n is a, c, g, or t
  misc_feature (443)..(444): n is a, c, g, or t
  misc_feature (451)..(453): n is a, c, g, or t
  misc_feature (455)..(456): n is a, c, g, or t
  misc_feature (459)..(459): n is a, c, g, or t
  misc_feature (463)..(464): n is a, c, g, or t
  misc_feature (471)..(471): n is a, c, g, or t
  misc_feature (476)..(476): n is a, c, g, or t
  misc_feature (484)..(485): n is a, c, g, or t
  misc_feature (490)..(490): n is a, c, g, or t
  misc_feature (497)..(497): n is a, c, g, or t
  misc_feature (499)..(499): n is a, c, g, or t
  misc_feature (502)..(502): n is a, c, g, or t
  misc_feature (505)..(506): n is a, c, g, or t
  misc_feature (509)..(511): n is a, c, g, or t
  misc_feature (519)..(520): n is a, c, g, or t
  misc_feature (522)..(523): n is a, c, g, or t
  Peptide Sequence Number=SeqID_12662
  Probeset Number=SeqID_19397
attgggcccgtggcctcgccgtctagctggcaccatcaccacctcgtcgccgtgagcagagatccaagcgggtcgccatcgcgacccctcgcccgtgtcctcggcgttggctgggcggtgctgttggagggcagcctgagcgccacacactcggctccatccttctgtccgcgctcacgccgcctgggcctcgtgatcgccgtcatcatctcgacggggcaccgcttctntgtgttggtcgcggntctggtccgcacctcntngtntanctacncccaagntgcaggcggnctctcgcgntgtntcgnngctcccannccncntgnntcncgtnnctcnnccnncncttnctttcccttccnttgcctncncccnntctncccnnccntcctgnnncatgnnnnnnntactntttcnnnttnnccnncgcnnnttnngcccannatccctnnnannccncccnntttcatnttcantttctcannttttncctctcnantcnccnnagnnnttttattnntnnctat

SEQ ID NO: 4995 - DNA, 504 bp, Zea mays
  misc_feature (7)..(7): n is a, c, g, or t
  misc_feature (35)..(35): n is a, c, g, or t
  misc_feature (45)..(45): n is a, c, g, or t
  misc_feature (59)..(59): n is a, c, g, or t
  misc_feature (105)..(105): n is a, c, g, or t
  misc_feature (130)..(130): n is a, c, g, or t
  misc_feature (175)..(176): n is a, c, g, or t
  misc_feature (189)..(189): n is a, c, g, or t
  misc_feature (191)..(192): n is a, c, g, or t
  misc_feature (203)..(204): n is a, c, g, or t
  misc_feature (206)..(207): n is a, c, g, or t
  misc_feature (215)..(215): n is a, c, g, or t
  misc_feature (222)..(222): n is a, c, g, or t
  misc_feature (225)..(225): n is a, c, g, or t
  misc_feature (227)..(227): n is a, c, g, or t
  misc_feature (234)..(234): n is a, c, g, or t
  misc_feature (237)..(237): n is a, c, g, or t
  misc_feature (239)..(239): n is a, c, g, or t
  misc_feature (252)..(252): n is a, c, g, or t
  misc_feature (257)..(260): n is a, c, g, or t
  misc_feature (266)..(266): n is a, c, g, or t
  misc_feature (270)..(270): n is a, c, g, or t
  misc_feature (284)..(284): n is a, c, g, or t
  misc_feature (288)..(288): n is a, c, g, or t
  misc_feature (292)..(292): n is a, c, g, or t
  misc_feature (297)..(297): n is a, c, g, or t
  misc_feature (307)..(307): n is a, c, g, or t
  misc_feature (309)..(309): n is a, c, g, or t
  misc_feature (311)..(311): n is a, c, g, or t
  misc_feature (315)..(315): n is a, c, g, or t
  misc_feature (317)..(317): n is a, c, g, or t
  misc_feature (320)..(320): n is a, c, g, or t
  misc_feature (326)..(326): n is a, c, g, or t
  misc_feature (340)..(340): n is a, c, g, or t
  misc_feature (345)..(345): n is a, c, g, or t
  misc_feature (350)..(350): n is a, c, g, or t
  misc_feature (354)..(356): n is a, c, g, or t
  misc_feature (359)..(359): n is a, c, g, or t
  misc_feature (376)..(377): n is a, c, g, or t
  misc_feature (379)..(379): n is a, c, g, or t
  misc_feature (383)..(383): n is a, c, g, or t
  misc_feature (385)..(385): n is a, c, g, or t
  misc_feature (393)..(394): n is a, c, g, or t
  misc_feature (400)..(402): n is a, c, g, or t
  misc_feature (419)..(419): n is a, c, g, or t
  misc_feature (422)..(422): n is a, c, g, or t
  misc_feature (427)..(427): n is a, c, g, or t
  misc_feature (434)..(434): n is a, c, g, or t
  misc_feature (438)..(439): n is a, c, g, or t
  misc_feature (444)..(444): n is a, c, g, or t
  misc_feature (447)..(448): n is a, c, g, or t
  misc_feature (455)..(455): n is a, c, g, or t
  misc_feature (457)..(457): n is a, c, g, or t
  misc_feature (469)..(469): n is a, c, g, or t
  misc_feature (478)..(478): n is a, c, g, or t
  misc_feature (499)..(500): n is a, c, g, or t
  Probeset Number=SeqID_19398
atcacanaccagctggactcttcataccattagcntttattatantccacgagctgcanaaggaatccggatattacacacatgtagggtgttggctcgttgccntcgagtctcctgtgctctcgctgcnagcgccatcctccacgcatacaaatgaatggactgcgattgacanncaccgacgccggntnntctaccgccgnngnngcatctgncacctcngantnacctgcnaantncggtgtatctccnaccgnnnntccacntgtngacgccggtccttntgtnaccnccganccatgtgtcncngncgantnttntgccgncgacaccatgccantaccntactnaaannnccnggactctatgctcatcnncngccncncccatgcnngtgccnnnagctcgcatccgagctncgngccanctggagngaanntgcgntgnnggaactncnccttatcctggnaccagtgcnttgagtacctgaagcttttgnnaaat

SEQ ID NO: 4996 - DNA, 542 bp, Zea mays
  misc_feature (1)..(1): n is a, c, g, or t
  misc_feature (3)..(3): n is a, c, g, or t
  misc_feature (18)..(18): n is a, c, g, or t
  misc_feature (29)..(29): n is a, c, g, or t
  misc_feature (34)..(35): n is a, c, g, or t
  misc_feature (52)..(53): n is a, c, g, or t
  misc_feature (58)..(58): n is a, c, g, or t
  misc_feature (61)..(61): n is a, c, g, or t
  misc_feature (64)..(64): n is a, c, g, or t
  misc_feature (75)..(75): n is a, c, g, or t
  misc_feature (77)..(78): n is a, c, g, or t
  misc_feature (81)..(81): n is a, c, g, or t
  misc_feature (89)..(90): n is a, c, g, or t
  misc_feature (92)..(92): n is a, c, g, or t
  misc_feature (97)..(97): n is a, c, g, or t
  misc_feature (102)..(103): n is a, c, g, or t
  misc_feature (105)..(105): n is a, c, g, or t
  misc_feature (119)..(119): n is a, c, g, or t
  misc_feature (128)..(128): n is a, c, g, or t
  misc_feature (131)..(131): n is a, c, g, or t
  misc_feature (140)..(140): n is a, c, g, or t
  misc_feature (144)..(145): n is a, c, g, or t
  misc_feature (150)..(150): n is a, c, g, or t
  misc_feature (157)..(157): n is a, c, g, or t
  misc_feature (162)..(162): n is a, c, g, or t
  misc_feature (171)..(171): n is a, c, g, or t
  misc_feature (173)..(173): n is a, c, g, or t
  misc_feature (188)..(188): n is a, c, g, or t
  misc_feature (211)..(212): n is a, c, g, or t
  misc_feature (222)..(222): n is a, c, g, or t
  misc_feature (228)..(228): n is a, c, g, or t
  misc_feature (235)..(235): n is a, c, g, or t
  misc_feature (237)..(237): n is a, c, g, or t
  misc_feature (262)..(262): n is a, c, g, or t
  misc_feature (266)..(266): n is a, c, g, or t
  misc_feature (281)..(281): n is a, c, g, or t
  misc_feature (305)..(305): n is a, c, g, or t
  misc_feature (347)..(347): n is a, c, g, or t
  misc_feature (356)..(356): n is a, c, g, or t
  misc_feature (368)..(368): n is a, c, g, or t
  misc_feature (370)..(370): n is a, c, g, or t
  misc_feature (399)..(399): n is a, c, g, or t
  misc_feature (402)..(403): n is a, c, g, or t
  misc_feature (406)..(408): n is a, c, g, or t
  misc_feature (418)..(418): n is a, c, g, or t
  misc_feature (421)..(421): n is a, c, g, or t
  misc_feature (428)..(428): n is a, c, g, or t
  misc_feature (436)..(436): n is a, c, g, or t
  misc_feature (438)..(438): n is a, c, g, or t
  misc_feature (440)..(440): n is a, c, g, or t
  misc_feature (445)..(445): n is a, c, g, or t
  misc_feature (449)..(449): n is a, c, g, or t
  misc_feature (455)..(455): n is a, c, g, or t
  misc_feature (461)..(461): n is a, c, g, or t
  misc_feature (464)..(464): n is a, c, g, or t
  misc_feature (477)..(477): n is a, c, g, or t
  misc_feature (481)..(481): n is a, c, g, or t
  misc_feature (486)..(487): n is a, c, g, or t
  misc_feature (492)..(492): n is a, c, g, or t
  misc_feature (496)..(496): n is a, c, g, or t
  misc_feature (500)..(500): n is a, c, g, or t
  misc_feature (502)..(502): n is a, c, g, or t
  misc_feature (505)..(505): n is a, c, g, or t
  misc_feature (515)..(515): n is a, c, g, or t
  misc_feature (518)..(519): n is a, c, g, or t
  misc_feature (523)..(524): n is a, c, g, or t
  misc_feature (528)..(528): n is a, c, g, or t
  misc_feature (532)..(532): n is a, c, g, or t
  Peptide Sequence Number=SeqID_12663
  Probeset Number=SeqID_19399
nanagacgccgtcgccgntcttgttgttnccgannccagaaccccaaagagnntccgncgncanctcagctcccncnncanaccgatgnncngatcnaagtnnangcggcgcatgaccnccggaggcnaangcgccgggnaagnngttgncgaccanggcancgcgcaagncntccccgttgaccgtnggcgtgtaataagcgcgtaccgnnttccgtccgngtcacngtggcgntnctgcgagatccgcaagtaccagaanagcncggagctgctcatcngcaggttccccttccagcgcctgntgccgcgagattcgcgcaggattccaagaccgacctccgctnccagtcccnccgccgtccccncncctggtaggtggccgcggcaggcctaccntcnnccnnnctccttcganganacccagnccccctgntncnttcanggcnaagcgncgtccnccnccatgcccccaangacntttcnntttcncccngccngnatnccgccggtcnaannggtnntttnaggnccgcttaagg

SEQ ID NO: 4997 - DNA, 508 bp, Zea mays
  misc_feature (44)..(44): n is a, c, g, or t
  misc_feature (50)..(50): n is a, c, g, or t
  misc_feature (108)..(108): n is a, c, g, or t
  misc_feature (112)..(112): n is a, c, g, or t
  misc_feature (126)..(126): n is a, c, g, or t
  misc_feature (139)..(139): n is a, c, g, or t
  misc_feature (173)..(173): n is a, c, g, or t
  misc_feature (175)..(175): n is a, c, g, or t
  misc_feature (183)..(183): n is a, c, g, or t
  misc_feature (219)..(219): n is a, c, g, or t
  misc_feature (222)..(222): n is a, c, g, or t
  misc_feature (247)..(247): n is a, c, g, or t
  misc_feature (255)..(255): n is a, c, g, or t
  misc_feature (261)..(261): n is a, c, g, or t
  misc_feature (274)..(274): n is a, c, g, or t
  misc_feature (279)..(279): n is a, c, g, or t
  misc_feature (291)..(291): n is a, c, g, or t
  misc_feature (299)..(299): n is a, c, g, or t
  misc_feature (328)..(328): n is a, c, g, or t
  misc_feature (372)..(372): n is a, c, g, or t
  misc_feature (401)..(402): n is a, c, g, or t
  misc_feature (406)..(406): n is a, c, g, or t
  misc_feature (416)..(416): n is a, c, g, or t
  misc_feature (421)..(421): n is a, c, g, or t
  misc_feature (423)..(423): n is a, c, g, or t
  misc_feature (426)..(426): n is a, c, g, or t
  misc_feature (429)..(429): n is a, c, g, or t
  misc_feature (434)..(434): n is a, c, g, or t
  misc_feature (440)..(441): n is a, c, g, or t
  misc_feature (446)..(446): n is a, c, g, or t
  misc_feature (452)..(452): n is a, c, g, or t
  misc_feature (454)..(455): n is a, c, g, or t
  misc_feature (457)..(457): n is a, c, g, or t
  misc_feature (459)..(459): n is a, c, g, or t
  misc_feature (461)..(464): n is a, c, g, or t
  misc_feature (467)..(468): n is a, c, g, or t
  misc_feature (470)..(470): n is a, c, g, or t
  misc_feature (472)..(472): n is a, c, g, or t
  misc_feature (476)..(480): n is a, c, g, or t
  misc_feature (483)..(495): n is a, c, g, or t
  misc_feature (498)..(508): n is a, c, g, or t
  Probeset Number=SeqID_19400
ccgacgcgacgcctcaatcgctcccctgcctctggtcacttcgnttccgntcccggttcccctcgggcacccagacatcgtcccgttcgctcgccaagagacaggacngganacatggcggacagntcaccgacgacanatcgccgagttcaaggaggccttcagcctcttcnanaggacggngacggttgcatcacaacaaggagctcggaactgtcntgngatcactgggtcaaaaccaaccganggttgagntcaganatgatcaacgagnccccncgacggaacggnacctccanttcccggagttcctaacctcatggcccgnaaaatgaaggaccccgactccgaggaggagctcagggggggttnagggtgtttaaaaaggacaaaaaggtttnntttntggggggganccccncncgngangaccnccccgnnaaaantgaccnannangngnnnnttnnantntccnnnnnccnnnnnnnnnnnnnggnnnnnnnnnnn

SEQ ID NO: 4998 - DNA, 505 bp, Zea mays
  misc_feature (304)..(304): n is a, c, g, or t
  misc_feature (425)..(426): n is a, c, g, or t
  misc_feature (439)..(439): n is a, c, g, or t
  misc_feature (442)..(442): n is a, c, g, or t
  misc_feature (467)..(467): n is a, c, g, or t
  misc_feature (481)..(482): n is a, c, g, or t
  misc_feature (484)..(484): n is a, c, g, or t
  misc_feature (494)..(494): n is a, c, g, or t
  Peptide Sequence Number=SeqID_12664
  Probeset Number=SeqID_19401
cgcaaaccctcctaccccattccgccgcccgccccgcgaccccgaggaggaggcaagatgaagacgatcctggcgtcggagacgatggacatcccggagggcgtcacagtgacggtggcggccaagctggtggacggtggagggcccccgcgggaagctcacccggaacttcaagcacctcaacctcgacttccaggctggcagggagggcggccgcaaggctcaaggtgggacggcatggttcggcacccgccgcaccatggccgccatccgcaccgcccatctcccacgtccaaacctccanttcaaggggggtcaccaagggctacgtacaaagaaatggggggtttgtctacgcccatttccccatcaacgcgtccatcaccaactccaacaccgccatcgagataaggaacttcctcggnnggagaagaaaggncanaaaaggtggacatggttttgacggngtgaccatcctccnntncgaaaaaggncaaggacgagc

SEQ ID NO: 4999 - DNA, 518 bp, Zea mays
  misc_feature (1)..(3): n is a, c, g, or t
  misc_feature (8)..(8): n is a, c, g, or t
  misc_feature (10)..(10): n is a, c, g, or t
  misc_feature (19)..(19): n is a, c, g, or t
  misc_feature (27)..(27): n is a, c, g, or t
  misc_feature (33)..(33): n is a, c, g, or t
  misc_feature (55)..(55): n is a, c, g, or t
  misc_feature (57)..(57): n is a, c, g, or t
  misc_feature (68)..(68): n is a, c, g, or t
  misc_feature (85)..(85): n is a, c, g, or t
  misc_feature (123)..(123): n is a, c, g, or t
  misc_feature (143)..(143): n is a, c, g, or t
  misc_feature (149)..(149): n is a, c, g, or t
  misc_feature (152)..(152): n is a, c, g, or t
  misc_feature (184)..(184): n is a, c, g, or t
  misc_feature (192)..(192): n is a, c, g, or t
  misc_feature (202)..(204): n is a, c, g, or t
  misc_feature (211)..(211): n is a, c, g, or t
  misc_feature (222)..(224): n is a, c, g, or t
  misc_feature (294)..(294): n is a, c, g, or t
  misc_feature (296)..(296): n is a, c, g, or t
  misc_feature (332)..(332): n is a, c, g, or t
  misc_feature (348)..(348): n is a, c, g, or t
  misc_feature (355)..(357): n is a, c, g, or t
  misc_feature (361)..(361): n is a, c, g, or t
  misc_feature (367)..(367): n is a, c, g, or t
  misc_feature (369)..(369): n is a, c, g, or t
  misc_feature (374)..(374): n is a, c, g, or t
  misc_feature (377)..(379): n is a, c, g, or t
  misc_feature (389)..(389): n is a, c, g, or t
  misc_feature (401)..(401): n is a, c, g, or t
  misc_feature (403)..(403): n is a, c, g, or t
  misc_feature (446)..(447): n is a, c, g, or t
  Peptide Sequence Number=SeqID_12665
  Probeset Number=SeqID_19402
nnncatantnagattacgntaccaatncaatanagaataattctgcttcttcatntntactaagcacntatctacataactcttnctctcctgctgataatggtgcgtctgcgctcctcctcntcccagaacgcagactgtcnttttcnccnaagaggcctgatggccctacctgcttgctgcnggaagtgnctctgcgctnnngcctggnctccatggatnnnatgtacatgcgacttggtgcacaccaccaatggcatgcatgtacaactgtgaccacactacaatcctgcntncgaaggagcatggcagcaccagaagatgagaaccgncatgctgggtgatctnggaaacnnnacanctgcancngatgntgnnncaaaaaatcngtgtacccgacngncccagatccccactgactgggccaaactcaatctttggcaganncttgttgttggttcacgctggatcctgatgatctttggaaaagggtgggcacgagctcagcaagagcactg

SEQ ID NO: 5000 - DNA, 515 bp, Zea mays
  misc_feature (5)..(6): n is a, c, g, or t
  misc_feature (12)..(12): n is a, c, g, or t
  misc_feature (37)..(37): n is a, c, g, or t
  misc_feature (71)..(71): n is a, c, g, or t
  misc_feature (73)..(74): n is a, c, g, or t
  misc_feature (77)..(77): n is a, c, g, or t
  misc_feature (82)..(82): n is a, c, g, or t
  misc_feature (90)..(90): n is a, c, g, or t
  misc_feature (99)..(99): n is a, c, g, or t
  misc_feature (108)..(108): n is a, c, g, or t
  misc_feature (114)..(114): n is a, c, g, or t
  misc_feature (139)..(139): n is a, c, g, or t
  misc_feature (162)..(162): n is a, c, g, or t
  misc_feature (166)..(166): n is a, c, g, or t
  misc_feature (170)..(171): n is a, c, g, or t
  misc_feature (184)..(184): n is a, c, g, or t
  misc_feature (220)..(220): n is a, c, g, or t
  misc_feature (223)..(223): n is a, c, g, or t
  misc_feature (226)..(226): n is a, c, g, or t
  misc_feature (235)..(235): n is a, c, g, or t
  misc_feature (249)..(250): n is a, c, g, or t
  misc_feature (255)..(255): n is a, c, g, or t
  misc_feature (292)..(292): n is a, c, g, or t
  misc_feature (323)..(323): n is a, c, g, or t
  misc_feature (332)..(332): n is a, c, g, or t
  misc_feature (344)..(344): n is a, c, g, or t
  misc_feature (449)..(449): n is a, c, g, or t
  misc_feature (465)..(465): n is a, c, g, or t
  Probeset Number=SeqID_19403
atcanncatatnattgagacctacaagcaatcataanaaagtggaatccagctatcaacatgtatgagtgncnntgnggacnaagatatnttccctccntatgctccntgctcnttctgcatgtgttgctaacgcgacnattttccctcaatgctcacaagntccnatannttcccttcttccnccataccttccatcgatgatagcttcagtatgtganaanccngctcttcanccctataggctccnncaagnaatcgcagcaagcaacatacctttatcacccttgttncaacaatcgccagccctatctttggtgcagncattggtanaaaccatcaggncacagcagctgcagcaactcgtgctacctgtgatcaaccaagtagctctggcaaacctttctccctactctcagcaacaacaatttcttccattcaaccaactgnctaacattggaaccgngctgcttattttgcagcaacaactattaccatttcagccagctagctact

SEQ ID NO: 5001 - DNA, 525 bp, Zea mays
  misc_feature (276)..(276): n is a, c, g, or t
  misc_feature (347)..(347): n is a, c, g, or t
  misc_feature (366)..(366): n is a, c, g, or t
  misc_feature (390)..(391): n is a, c, g, or t
  misc_feature (396)..(396): n is a, c, g, or t
  misc_feature (398)..(399): n is a, c, g, or t
  misc_feature (407)..(407): n is a, c, g, or t
  misc_feature (429)..(429): n is a, c, g, or t
  misc_feature (431)..(431): n is a, c, g, or t
  misc_feature (435)..(435): n is a, c, g, or t
  misc_feature (442)..(443): n is a, c, g, or t
  misc_feature (447)..(447): n is a, c, g, or t
  misc_feature (449)..(449): n is a, c, g, or t
  misc_feature (463)..(463): n is a, c, g, or t
  misc_feature (466)..(466): n is a, c, g, or t
  misc_feature (469)..(469): n is a, c, g, or t
  misc_feature (473)..(474): n is a, c, g, or t
  misc_feature (478)..(479): n is a, c, g, or t
  misc_feature (482)..(482): n is a, c, g, or t
  misc_feature (485)..(485): n is a, c, g, or t
  misc_feature (488)..(488): n is a, c, g, or t
  misc_feature (490)..(492): n is a, c, g, or t
  misc_feature (494)..(494): n is a, c, g, or t
  misc_feature (496)..(497): n is a, c, g, or t
  misc_feature (500)..(500): n is a, c, g, or t
  misc_feature (502)..(502): n is a, c, g, or t
  misc_feature (504)..(504): n is a, c, g, or t
  misc_feature (507)..(507): n is a, c, g, or t
  misc_feature (510)..(512): n is a, c, g, or t
  misc_feature (515)..(516): n is a, c, g, or t
  misc_feature (521)..(521): n is a, c, g, or t
  misc_feature (525)..(525): n is a, c, g, or t
  Peptide Sequence Number=SeqID_12666
  Probeset Number=SeqID_19404
aaaccctagccgcctgcctctcctcctccagagctcgtcgccaccggccaccgccaccctcgatcacgccgtccgtcgaggtaaggtcaggcatggtgagggtcagtgtgctcaacgatgcgctcaagtccatgtacaacgctgagaagatcggcaagaggcaggtcatgattcaggccggtcgtccaaggtcatcatcaaggttcctgacggtcatgcagcgccacggctaccattgggagaggttcgaggtacgttgatgaccaccgatcgggnaaagaatcgtggtcgaactcaacgggaggctgaacaaagtgcggcgtcatcagccctcgctttggatatcnggcgtgaaagacatttgangggatggactgcaaggctgctccnntccangnnagttcggnatacatcgtcctcacaacttcngnaggnatcatgnnaccncnaagaggcccgtcgnaanaanggannaggnnggnttntangnnncntnnatngnanaanttnnnaanntttgntatn

SEQ ID NO: 5002 - DNA, 504 bp, Zea mays
  misc_feature (199)..(199): n is a, c, g, or t
  misc_feature (208)..(208): n is a, c, g, or t
  misc_feature (217)..(217): n is a, c, g, or t
  misc_feature (223)..(223): n is a, c, g, or t
  misc_feature (240)..(240): n is a, c, g, or t
  misc_feature (244)..(244): n is a, c, g, or t
  misc_feature (251)..(251): n is a, c, g, or t
  misc_feature (266)..(266): n is a, c, g, or t
  misc_feature (271)..(272): n is a, c, g, or t
  misc_feature (274)..(275): n is a, c, g, or t
  misc_feature (277)..(277): n is a, c, g, or t
  misc_feature (279)..(279): n is a, c, g, or t
  misc_feature (281)..(282): n is a, c, g, or t
  misc_feature (284)..(284): n is a, c, g, or t
  misc_feature (287)..(287): n is a, c, g, or t
  misc_feature (290)..(294): n is a, c, g, or t
  misc_feature (296)..(298): n is a, c, g, or t
  misc_feature (300)..(301): n is a, c, g, or t
  misc_feature (303)..(322): n is a, c, g, or t
  misc_feature (324)..(337): n is a, c, g, or t
  misc_feature (339)..(340): n is a, c, g, or t
  misc_feature (342)..(397): n is a, c, g, or t
  misc_feature (399)..(422): n is a, c, g, or t
  misc_feature (424)..(504): n is a, c, g, or t
  Peptide Sequence Number=SeqID_12667
  Probeset Number=SeqID_19405
agcctccgccgcacgttcacagttcacacacacaggcacagctcgcagcatccagctcccgtcgagctcactcgctcactccagtctatctacccagtctcccttcggttcaggagctcgatttcccgcgcgccgtctgccaacgagatggccgtgcctgtggaaggggttcggcgtcttcgccctgtgactggacggnggcagcggngaccaccgncagcgncaggcgacgaaactggntcgnctctggncggtgtgctactggngctgnngnnancngnnanctngannnnnannngnngnnnnnnnnnnnnnnnnnnnngnnnnnnnnnnnnnngnngnnnnnnnnnnnnnnnnnnnnnnnnnnnnnnnnnnnnnnnnnnnnnnnnnnnnnnnngnnnnnnnnnnnnnnnnnnnnnnnngnnnnnnnnnnnnnnnnnnnnnnnnnnnnnnnnnnnnnnnnnnnnnnnnnnnnnnnnnnnnnnnnnnnnnnnnnnnnnnnnn

SEQ ID NO: 5003 - DNA, 502 bp, Zea mays
  misc_feature (6)..(6): n is a, c, g, or t
  misc_feature (17)..(19): n is a, c, g, or t
  misc_feature (28)..(30): n is a, c, g, or t
  misc_feature (39)..(39): n is a, c, g, or t
  misc_feature (46)..(46): n is a, c, g, or t
  misc_feature (57)..(57): n is a, c, g, or t
  misc_feature (74)..(75): n is a, c, g, or t
  misc_feature (83)..(83): n is a, c, g, or t
  misc_feature (87)..(87): n is a, c, g, or t
  misc_feature (90)..(90): n is a, c, g, or t
  misc_feature (130)..(130): n is a, c, g, or t
  misc_feature (133)..(133): n is a, c, g, or t
  misc_feature (137)..(137): n is a, c, g, or t
  misc_feature (139)..(139): n is a, c, g, or t
  misc_feature (147)..(147): n is a, c, g, or t
  misc_feature (160)..(160): n is a, c, g, or t
  misc_feature (172)..(172): n is a, c, g, or t
  misc_feature (184)..(184): n is a, c, g, or t
  misc_feature (229)..(229): n is a, c, g, or t
  misc_feature (242)..(242): n is a, c, g, or t
  misc_feature (263)..(263): n is a, c, g, or t
  misc_feature (284)..(284): n is a, c, g, or t
  misc_feature (286)..(286): n is a, c, g, or t
  misc_feature (335)..(335): n is a, c, g, or t
  misc_feature (340)..(340): n is a, c, g, or t
  misc_feature (352)..(352): n is a, c, g, or t
  misc_feature (363)..(364): n is a, c, g, or t
  misc_feature (368)..(368): n is a, c, g, or t
  misc_feature (371)..(371): n is a, c, g, or t
  misc_feature (373)..(373): n is a, c, g, or t
  misc_feature (376)..(377): n is a, c, g, or t
  misc_feature (383)..(384): n is a, c, g, or t
  misc_feature (387)..(387): n is a, c, g, or t
  misc_feature (392)..(392): n is a, c, g, or t
  misc_feature (403)..(403): n is a, c, g, or t
  misc_feature (407)..(408): n is a, c, g, or t
  misc_feature (434)..(434): n is a, c, g, or t
  misc_feature (443)..(443): n is a, c, g, or t
  misc_feature (446)..(447): n is a, c, g, or t
  misc_feature (452)..(454): n is a, c, g, or t
  misc_feature (456)..(456): n is a, c, g, or t
  misc_feature (471)..(471): n is a, c, g, or t
  misc_feature (479)..(479): n is a, c, g, or t
  misc_feature (485)..(485): n is a, c, g, or t
  misc_feature (495)..(495): n is a, c, g, or t
  misc_feature (498)..(498): n is a, c, g, or t
  misc_feature (500)..(500): n is a, c, g, or t
  Probeset Number=SeqID_19406
atctcncatattattgnnnccaccaagnnncgtagcaangttgctnattccatgccncgaacaaatagaatcanncagatggngganccnagcatatgtttcccctccgtatgcctccttgcgtctttcngcnatgngnaaggtaancggcgacgaattntcccgtcaatgntcacaaggtccnatagcttcccttcttcccccataccttccatcaatgatagcttcngtatgtgaaaacncagcttcttcaccctataggntccaacaagcaatcgcagcangnaacatacctttatcacccttgtttcaacaatcgccagccctatctttgntgcanccattggtacanaccatcagggnnactncancntgnncaaacnngangatanctgcggatcanttcnngtaaatcttctgcatcatatcatttnttccctacntcnncaggnnncnaacaatctttccttnccattccnacaaanttggctcttnacncntg

SEQ ID NO: 5004 - DNA, 487 bp, Zea mays
  misc_feature (57)..(57): n is a, c, g, or t
  misc_feature (247)..(247): n is a, c, g, or t
  misc_feature (250)..(250): n is a, c, g, or t
  misc_feature (253)..(253): n is a, c, g, or t
  misc_feature (258)..(258): n is a, c, g, or t
  misc_feature (260)..(260): n is a, c, g, or t
  misc_feature (268)..(269): n is a, c, g, or t
  misc_feature (279)..(279): n is a, c, g, or t
  misc_feature (282)..(282): n is a, c, g, or t
  misc_feature (285)..(286): n is a, c, g, or t
  misc_feature (295)..(295): n is a, c, g, or t
  misc_feature (304)..(304): n is a, c, g, or t
  misc_feature (308)..(308): n is a, c, g, or t
  misc_feature (316)..(316): n is a, c, g, or t
  misc_feature (319)..(319): n is a, c, g, or t
  misc_feature (332)..(332): n is a, c, g, or t
  misc_feature (338)..(338): n is a, c, g, or t
  misc_feature (341)..(341): n is a, c, g, or t
  misc_feature (346)..(348): n is a, c, g, or t
  misc_feature (354)..(355): n is a, c, g, or t
  misc_feature (365)..(365): n is a, c, g, or t
  misc_feature (367)..(367): n is a, c, g, or t
  misc_feature (384)..(384): n is a, c, g, or t
  misc_feature (388)..(388): n is a, c, g, or t
  misc_feature (390)..(390): n is a, c, g, or t
  misc_feature (402)..(402): n is a, c, g, or t
  misc_feature (406)..(406): n is a, c, g, or t
  misc_feature (409)..(409): n is a, c, g, or t
  misc_feature (412)..(412): n is a, c, g, or t
  misc_feature (416)..(416): n is a, c, g, or t
  misc_feature (420)..(420): n is a, c, g, or t
  misc_feature (422)..(422): n is a, c, g, or t
  misc_feature (442)..(442): n is a, c, g, or t
  misc_feature (444)..(444): n is a, c, g, or t
  misc_feature (449)..(449): n is a, c, g, or t
  misc_feature (453)..(453): n is a, c, g, or t
  misc_feature (455)..(455): n is a, c, g, or t
  misc_feature (471)..(471): n is a, c, g, or t
  misc_feature (473)..(473): n is a, c, g, or t
  misc_feature (485)..(485): n is a, c, g, or t
  Peptide Sequence Number=SeqID_12668
  Probeset Number=SeqID_19407
cattccgatcctcgcttctatttggcggctaaccctagggcctagcttcgttttggnggtggctgctctggtgcgcagtgcagtgcctggcggctgctcttcagctcttgtgcgcactgcgcagtgcgctccatgccttagtgcctgccgcggtgccgccctcccacctccagcgaatggcgacggtccagggctctaggcgtccagccctccagctccatccgttggactcctgctcggatcccantcnagntcagntnctcggctnngtggatgctnatngcnnggtgaccantgacttctnacancctgtganccngatggcaaggaanatgaanganaccgnnntccganngagtagcttnanggaggccttttcgcgtnttcnanaaagggaccatnaaanggnttncatnctcngnctgatagaggtccccccatngncatgnaccnancctcggtgaaaaaacntnaactgacgaaanag

SEQ ID NO: 5005 - DNA, 459 bp, Zea mays
  misc_feature (7)..(7): n is a, c, g, or t
  misc_feature (20)..(20): n is a, c, g, or t
  misc_feature (24)..(24): n is a, c, g, or t
  misc_feature (29)..(29): n is a, c, g, or t
  misc_feature (32)..(32): n is a, c, g, or t
  misc_feature (46)..(46): n is a, c, g, or t
  misc_feature (53)..(53): n is a, c, g, or t
  misc_feature (63)..(64): n is a, c, g, or t
  misc_feature (75)..(75): n is a, c, g, or t
  misc_feature (99)..(99): n is a, c, g, or t
  misc_feature (102)..(102): n is a, c, g, or t
  misc_feature (120)..(120): n is a, c, g, or t
  misc_feature (129)..(129): n is a, c, g, or t
  misc_feature (150)..(150): n is a, c, g, or t
  misc_feature (166)..(166): n is a, c, g, or t
  misc_feature (184)..(184): n is a, c, g, or t
  misc_feature (251)..(251): n is a, c, g, or t
  misc_feature (265)..(265): n is a, c, g, or t
  misc_feature (276)..(276): n is a, c, g, or t
  misc_feature (284)..(284): n is a, c, g, or t
  misc_feature (290)..(290): n is a, c, g, or t
  misc_feature (294)..(295): n is a, c, g, or t
  misc_feature (313)..(313): n is a, c, g, or t
  misc_feature (347)..(347): n is a, c, g, or t
  misc_feature (352)..(352): n is a, c, g, or t
  misc_feature (359)..(359): n is a, c, g, or t
  misc_feature (368)..(368): n is a, c, g, or t
  misc_feature (370)..(370): n is a, c, g, or t
  misc_feature (375)..(375): n is a, c, g, or t
  misc_feature (379)..(379): n is a, c, g, or t
  misc_feature (400)..(400): n is a, c, g, or t
  misc_feature (409)..(409): n is a, c, g, or t
  misc_feature (413)..(413): n is a, c, g, or t
  misc_feature (433)..(433): n is a, c, g, or t
  misc_feature (436)..(437): n is a, c, g, or t
  misc_feature (446)..(446): n is a, c, g, or t
  Probeset Number=SeqID_19408
atggcanatctcctccgcancttnttggntgnatcatcgttttccntcggtcntactcctatnntccacaaaatntgagacggtattgatggtgcccancgntgagaagaaaactgcggngtagatatntggtaggaggatccctcgganatgtggcttcggtggngaagggcccgcgtgtatnagaccaaggggataagcgggtacctgcgcccaagtccccctgaaagagggggggacaagaaaggtangaaaatgcaagaanggcgtggagangtagaganctaatnttcnnggcctgaaaaagggcacncgacatcggcatctcctcgagggcatgtgcatcntgaantccttcntcaacgacntnttcanaagntcgccggggaggccgccaagntcgcccggnacanaaaaaaaccaccatcacctnccnngggatccanacctccgtccgcc

SEQ ID NO: 5006 - DNA, 487 bp, Zea mays
  misc_feature (26)..(27): n is a, c, g, or t
  misc_feature (29)..(29): n is a, c, g, or t
  misc_feature (34)..(34): n is a, c, g, or t
  misc_feature (36)..(36): n is a, c, g, or t
  misc_feature (44)..(44): n is a, c, g, or t
  misc_feature (46)..(46): n is a, c, g, or t
  misc_feature (48)..(48): n is a, c, g, or t
  misc_feature (51)..(51): n is a, c, g, or t
  misc_feature (54)..(54): n is a, c, g, or t
  misc_feature (63)..(63): n is a, c, g, or t
  misc_feature (66)..(66): n is a, c, g, or t
  misc_feature (69)..(70): n is a, c, g, or t
  misc_feature (74)..(74): n is a, c, g, or t
  misc_feature (78)..(78): n is a, c, g, or t
  misc_feature (80)..(80): n is a, c, g, or t
  misc_feature (89)..(89): n is a, c, g, or t
  misc_feature (93)..(93): n is a, c, g, or t
  misc_feature (96)..(96): n is a, c, g, or t
  misc_feature (100)..(100): n is a, c, g, or t
  misc_feature (105)..(105): n is a, c, g, or t
  misc_feature (111)..(111): n is a, c, g, or t
  misc_feature (116)..(116): n is a, c, g, or t
  misc_feature (118)..(118): n is a, c, g, or t
  misc_feature (122)..(123): n is a, c, g, or t
  misc_feature (127)..(127): n is a, c, g, or t
  misc_feature (135)..(135): n is a, c, g, or t
  misc_feature (139)..(139): n is a, c, g, or t
  misc_feature (142)..(142): n is a, c, g, or t
  misc_feature (145)..(145): n is a, c, g, or t
  misc_feature (150)..(150): n is a, c, g, or t
  misc_feature (153)..(153): n is a, c, g, or t
  misc_feature (159)..(159): n is a, c, g, or t
  misc_feature (162)..(162): n is a, c, g, or t
  misc_feature (164)..(164): n is a, c, g, or t
  misc_feature (168)..(169): n is a, c, g, or t
  misc_feature (171)..(171): n is a, c, g, or t
  misc_feature (179)..(179): n is a, c, g, or t
  misc_feature (181)..(183): n is a, c, g, or t
  misc_feature (189)..(189): n is a, c, g, or t
  misc_feature (193)..(193): n is a, c, g, or t
  misc_feature (205)..(205): n is a, c, g, or t
  misc_feature (219)..(220): n is a, c, g, or t
  misc_feature (224)..(224): n is a, c, g, or t
  misc_feature (244)..(244): n is a, c, g, or t
  misc_feature (246)..(246): n is a, c, g, or t
  misc_feature (257)..(258): n is a, c, g, or t
  misc_feature (261)..(261): n is a, c, g, or t
  misc_feature (263)..(263): n is a, c, g, or t
  misc_feature (268)..(268): n is a, c, g, or t
  misc_feature (288)..(288): n is a, c, g, or t
  misc_feature (295)..(295): n is a, c, g, or t
  misc_feature (320)..(320): n is a, c, g, or t
  misc_feature (338)..(338): n is a, c, g, or t
  misc_feature (347)..(347): n is a, c, g, or t
  misc_feature (358)..(358): n is a, c, g, or t
  misc_feature (362)..(362): n is a, c, g, or t
  misc_feature (369)..(369): n is a, c, g, or t
  misc_feature (465)..(465): n is a, c, g, or t
  Peptide Sequence Number=SeqID_12669
  Probeset Number=SeqID_19409
atctgcttattattgtcgacgcatcnnantgatntnaaggggangncngcngcnatgataganganaannggcngccnanatattgttncctnctnatgntcctngctctntctanangggnngctnacgcgaanattntcnctncatgntcnctggcnccnanaagnncncttcttcncnnntacctnacanctattatagatncgatatgggagaanncagntcttccaccatataggcttnanccagcaaatcnnagnangcaanatacctttatcggcccttgntgtttcnagaatcgacaggcctatcttttggnggagtcattggtacaaancatcagggnacaacagctgnaggnaactcgnggctacctctgatcaaccaaagaagctctgggaaacctttctccctactctcagcaacaacaatttcttcatttcaaccaactgtctacactgaancctggctgcttatttgcagcac

SEQ ID NO: 5007 - DNA, 526 bp, Zea mays
  misc_feature (5)..(5): n is a, c, g, or t
  misc_feature (7)..(7): n is a, c, g, or t
  misc_feature (14)..(14): n is a, c, g, or t
  misc_feature (18)..(19): n is a, c, g, or t
  misc_feature (21)..(21): n is a, c, g, or t
  misc_feature (23)..(23): n is a, c, g, or t
  misc_feature (25)..(25): n is a, c, g, or t
  misc_feature (29)..(29): n is a, c, g, or t
  misc_feature (31)..(31): n is a, c, g, or t
  misc_feature (67)..(67): n is a, c, g, or t
  misc_feature (71)..(71): n is a, c, g, or t
  misc_feature (75)..(75): n is a, c, g, or t
  misc_feature (99)..(99): n is a, c, g, or t
  misc_feature (131)..(131): n is a, c, g, or t
  misc_feature (135)..(135): n is a, c, g, or t
  misc_feature (140)..(140): n is a, c, g, or t
  misc_feature (160)..(160): n is a, c, g, or t
  misc_feature (313)..(313): n is a, c, g, or t
  misc_feature (323)..(323): n is a, c, g, or t
  misc_feature (335)..(336): n is a, c, g, or t
  misc_feature (338)..(340): n is a, c, g, or t
  misc_feature (343)..(343): n is a, c, g, or t
  misc_feature (346)..(346): n is a, c, g, or t
  misc_feature (350)..(351): n is a, c, g, or t
  misc_feature (353)..(354): n is a, c, g, or t
  misc_feature (356)..(356): n is a, c, g, or t
  misc_feature (362)..(365): n is a, c, g, or t
  misc_feature (367)..(367): n is a, c, g, or t
  misc_feature (371)..(371): n is a, c, g, or t
  misc_feature (373)..(373): n is a, c, g, or t
  misc_feature (376)..(379): n is a, c, g, or t
  misc_feature (381)..(381): n is a, c, g, or t
  misc_feature (386)..(386): n is a, c, g, or t
  misc_feature (389)..(389): n is a, c, g, or t
  misc_feature (393)..(393): n is a, c, g, or t
  misc_feature (398)..(407): n is a, c, g, or t
  misc_feature (409)..(411): n is a, c, g, or t
  misc_feature (415)..(417): n is a, c, g, or t
  misc_feature (420)..(423): n is a, c, g, or t
  misc_feature (425)..(427): n is a, c, g, or t
  misc_feature (430)..(431): n is a, c, g, or t
  misc_feature (434)..(435): n is a, c, g, or t
  misc_feature (437)..(437): n is a, c, g, or t
  misc_feature (439)..(441): n is a, c, g, or t
  misc_feature (443)..(444): n is a, c, g, or t
  misc_feature (446)..(446): n is a, c, g, or t
  misc_feature (448)..(452): n is a, c, g, or t
  misc_feature (455)..(455): n is a, c, g, or t
  misc_feature (457)..(488): n is a, c, g, or t
  misc_feature (490)..(491): n is a, c, g, or t
  misc_feature (493)..(525): n is a, c, g, or t
  Peptide Sequence Number=SeqID_12670
  Probeset Number=SeqID_19410
atccnanctatganttgnnangngntagngngatagagaggatcgtagagtagcaacagcatgaagntggncatnttttcgcgtcctgatgctgcttgntgctttctgccagtgctgctgcggtgaccatnttcngaccntgctcgcaagctgctatagntgtcccttcttcccccgtacctctcaccagcggtgtcttcggtatgtgaaaacccaattcttcaaccctataggatccaacaggcaatcgcagctggcatcttacctttatcacccttgttcctccaacaatcatcagccctattacagcagntacctttggngcatttattggnncnnnacntcngggnncnncnactacnnnnanttgngntannnnancttgntgnctantctcnnnnnnnnnngnnncttnnnttnnnncnnntanntgnntngnnntnngntnnnnnttngnnnnnnnnnnnnnnnnnnnnnnnnnnnnnnnngnngnnnnnnnnnnnnnnnnnnnnnnnnnnnnnnnnng

SEQ ID NO: 5008 - DNA, 459 bp, Zea mays
  misc_feature (68)..(68): n is a, c, g, or t
  misc_feature (87)..(87): n is a, c, g, or t
  misc_feature (117)..(117): n is a, c, g, or t
  misc_feature (133)..(133): n is a, c, g, or t
  misc_feature (157)..(157): n is a, c, g, or t
  misc_feature (163)..(163): n is a, c, g, or t
  misc_feature (170)..(170): n is a, c, g, or t
  misc_feature (177)..(177): n is a, c, g, or t
  misc_feature (184)..(184): n is a, c, g, or t
  misc_feature (200)..(200): n is a, c, g, or t
  misc_feature (230)..(230): n is a, c, g, or t
  misc_feature (254)..(254): n is a, c, g, or t
  misc_feature (263)..(263): n is a, c, g, or t
  misc_feature (266)..(266): n is a, c, g, or t
  misc_feature (279)..(279): n is a, c, g, or t
  misc_feature (349)..(349): n is a, c, g, or t
  misc_feature (359)..(359): n is a, c, g, or t
  misc_feature (363)..(363): n is a, c, g, or t
  misc_feature (380)..(381): n is a, c, g, or t
  misc_feature (392)..(392): n is a, c, g, or t
  misc_feature (395)..(395): n is a, c, g, or t
  misc_feature (399)..(399): n is a, c, g, or t
  misc_feature (403)..(403): n is a, c, g, or t
  misc_feature (409)..(414): n is a, c, g, or t
  misc_feature (417)..(417): n is a, c, g, or t
  misc_feature (422)..(426): n is a, c, g, or t
  misc_feature (432)..(433): n is a, c, g, or t
  misc_feature (436)..(438): n is a, c, g, or t
  misc_feature (441)..(445): n is a, c, g, or t
  misc_feature (447)..(456): n is a, c, g, or t
  misc_feature (458)..(458): n is a, c, g, or t
  Probeset Number=SeqID_19411
aagaatccgcatttccccttccccgcaccgcacccaacccccgtcggagagagagagagagagatggnatgcggtggcggagatgcngcccctcgcgccggtggtgtaccgccgcgngccggagatgaagganaaggtggaggcgtgcggtggtggnacctgnaggacgngaccggngagacgntggtatgcggcgatcntcgcggcggggagagcgctcttcctgatgnggcttcgagccgtgaggtctacgncatcctcgntgngcagctgctcctncaccaccgccgtctccgccctcaccgttctccaccccaccctcaacgccacgctctccgactccccgggnctcgcgctcngtgntcgccgtcctgcccttnntcctgatgatnccnttgnatcnttatcnnnnnnagnacccnnnnnatttcnnttnnntgnnnnngnnnnnnnnnngnt

SEQ ID NO: 5009 - DNA, 533 bp, Zea mays
  misc_feature (2)..(2): n is a, c, g, or t
  misc_feature (6)..(6): n is a, c, g, or t
  misc_feature (12)..(12): n is a, c, g, or t
  misc_feature (21)..(21): n is a, c, g, or t
  misc_feature (32)..(32): n is a, c, g, or t
  misc_feature (36)..(36): n is a, c, g, or t
  misc_feature (39)..(39): n is a, c, g, or t
  misc_feature (50)..(50): n is a, c, g, or t
  misc_feature (69)..(69): n is a, c, g, or t
  misc_feature (84)..(85): n is a, c, g, or t
  misc_feature (92)..(93): n is a, c, g, or t
  misc_feature (109)..(109): n is a, c, g, or t
  misc_feature (118)..(118): n is a, c, g, or t
  misc_feature (122)..(122): n is a, c, g, or t
  misc_feature (141)..(141): n is a, c, g, or t
  misc_feature (193)..(193): n is a, c, g, or t
  misc_feature (215)..(215): n is a, c, g, or t
  misc_feature (224)..(224): n is a, c, g, or t
  misc_feature (230)..(230): n is a, c, g, or t
  misc_feature (248)..(248): n is a, c, g, or t
  misc_feature (272)..(272): n is a, c, g, or t
  misc_feature (276)..(276): n is a, c, g, or t
  misc_feature (337)..(337): n is a, c, g, or t
  misc_feature (342)..(342): n is a, c, g, or t
  misc_feature (348)..(348): n is a, c, g, or t
  misc_feature (354)..(354): n is a, c, g, or t
  misc_feature (358)..(358): n is a, c, g, or t
  misc_feature (370)..(370): n is a, c, g, or t
  misc_feature (377)..(378): n is a, c, g, or t
  misc_feature (387)..(387): n is a, c, g, or t
  misc_feature (389)..(389): n is a, c, g, or t
  misc_feature (392)..(392): n is a, c, g, or t
  misc_feature (400)..(400): n is a, c, g, or t
  misc_feature (407)..(408): n is a, c, g, or t
  misc_feature (410)..(410): n is a, c, g, or t
  misc_feature (412)..(412): n is a, c, g, or t
  misc_feature (414)..(416): n is a, c, g, or t
  misc_feature (420)..(420): n is a, c, g, or t
  misc_feature (423)..(423): n is a, c, g, or t
  misc_feature (425)..(425): n is a, c, g, or t
  misc_feature (430)..(430): n is a, c, g, or t
  misc_feature (432)..(432): n is a, c, g, or t
  misc_feature (438)..(438): n is a, c, g, or t
  misc_feature (447)..(448): n is a, c, g, or t
  misc_feature (464)..(464): n is a, c, g, or t
  misc_feature (479)..(479): n is a, c, g, or t
  misc_feature (483)..(483): n is a, c, g, or t
  misc_feature (486)..(486): n is a, c, g, or t
  misc_feature (488)..(489): n is a, c, g, or t
  misc_feature (494)..(495): n is a, c, g, or t
  misc_feature (502)..(502): n is a, c, g, or t
  misc_feature (504)..(504): n is a, c, g, or t
  misc_feature (514)..(514): n is a, c, g, or t
  misc_feature (524)..(524): n is a, c, g, or t
  misc_feature (533)..(533): n is a, c, g, or t
  Peptide Sequence Number=SeqID_12671
  Probeset Number=SeqID_19412
ancaanggtatnttgcaatcnaacgaacaatngctntcnatctcaccganaccgaggaagaagagatcnatggagtccgagcanngcagtcnngatcgcgtgccacagnaaggctganttcnacgcccacatgaccaaggnccagctaaaccgtcaagctggtggacatcgacttcactgccgcctggtgcgntccatgctgcgccatcgccccnctgttcggngaacangccaagaagttcactcangtcggcttcctgaaggtggacgtngacnaagtgaaggaagtcaccgcggtctacttacgtttaggtgatgccgaccttccagttcgtgncgaangagcanccacgntttncgattatcctgngctggcnngaaaggacngntcntcgtgggncctgaanncnanannnctgncgngncctgncnccttgngccttgcgnnacgcctaaagggacantcatcttccgtgccncacntcntnntacanncttcccncncgtcccgccncaccactttnttccccttn

SEQ ID NO: 5010 - DNA, 500 bp, Zea mays
  misc_feature (4)..(4): n is a, c, g, or t
  misc_feature (13)..(13): n is a, c, g, or t
  misc_feature (16)..(16): n is a, c, g, or t
  misc_feature (23)..(23): n is a, c, g, or t
  misc_feature (27)..(27): n is a, c, g, or t
  misc_feature (42)..(42): n is a, c, g, or t
  misc_feature (51)..(51): n is a, c, g, or t
  misc_feature (70)..(70): n is a, c, g, or t
  misc_feature (85)..(85): n is a, c, g, or t
  misc_feature (127)..(127): n is a, c, g, or t
  misc_feature (149)..(149): n is a, c, g, or t
  misc_feature (173)..(173): n is a, c, g, or t
  misc_feature (210)..(210): n is a, c, g, or t
  misc_feature (234)..(234): n is a, c, g, or t
  misc_feature (254)..(254): n is a, c, g, or t
  misc_feature (273)..(274): n is a, c, g, or t
  misc_feature (276)..(276): n is a, c, g, or t
  misc_feature (280)..(280): n is a, c, g, or t
  misc_feature (284)..(284): n is a, c, g, or t
  misc_feature (289)..(290): n is a, c, g, or t
  misc_feature (294)..(294): n is a, c, g, or t
  misc_feature (296)..(296): n is a, c, g, or t
  misc_feature (299)..(299): n is a, c, g, or t
  misc_feature (301)..(303): n is a, c, g, or t
  misc_feature (305)..(309): n is a, c, g, or t
  misc_feature (311)..(311): n is a, c, g, or t
  misc_feature (314)..(314): n is a, c, g, or t
  misc_feature (316)..(316): n is a, c, g, or t
  misc_feature (318)..(322): n is a, c, g, or t
  misc_feature (324)..(325): n is a, c, g, or t
  misc_feature (328)..(335): n is a, c, g, or t
  misc_feature (338)..(500): n is a, c, g, or t
  Peptide Sequence Number=SeqID_12672
  Probeset Number=SeqID_19413
atcncaagctgtnacnaaactcngcanacaatcacactgacncacacaccnccaccacggcaccgctagngagaagcggagcggnaggacacgcgggcgcgtgactggcgatggctcgtgcgctccngcgcttgcgtggctgctcgcgnttccctgctcggtgccctggcggnccggcggcggccgcgcgcgcccacgacgaccaggggnaagcggggccgggcatacggtagncggagcggggagtaccgcgngagggaaaggtgtggagcnngnacgnaggngcggnnacgngnagngnnnannnnnanctncngnnnnncnntannnnnnnncgnnnnnnnnnnnnnnnnnnnnnnnnnnnnnnnnnnnnnnnnnnnnnnnnnnnnnnnnnnnnnnnnnnnnnnnnnnnnnnnnnnnnnnnnnnnnnnnnnnnnnnnnnnnnnnnnnnnnnnnnnnnnnnnnnnnnnnnnnnnnnnnnnnnnnnnnnnnnnnnnnnn

SEQ ID NO: 5011 - DNA, 541 bp, Zea mays
  misc_feature (2)..(3): n is a, c, g, or t
  misc_feature (42)..(42): n is a, c, g, or t
  misc_feature (62)..(62): n is a, c, g, or t
  misc_feature (70)..(70): n is a, c, g, or t
  misc_feature (79)..(79): n is a, c, g, or t
  misc_feature (89)..(89): n is a, c, g, or t
  misc_feature (91)..(91): n is a, c, g, or t
  misc_feature (94)..(94): n is a, c, g, or t
  misc_feature (96)..(97): n is a, c, g, or t
  misc_feature (102)..(103): n is a, c, g, or t
  misc_feature (106)..(106): n is a, c, g, or t
  misc_feature (111)..(111): n is a, c, g, or t
  misc_feature (114)..(114): n is a, c, g, or t
  misc_feature (119)..(119): n is a, c, g, or t
  misc_feature (122)..(122): n is a, c, g, or t
  misc_feature (144)..(144): n is a, c, g, or t
  misc_feature (164)..(165): n is a, c, g, or t
  misc_feature (172)..(172): n is a, c, g, or t
  misc_feature (176)..(176): n is a, c, g, or t
  misc_feature (178)..(178): n is a, c, g, or t
  misc_feature (207)..(207): n is a, c, g, or t
  misc_feature (242)..(243): n is a, c, g, or t
  misc_feature (287)..(288): n is a, c, g, or t
  misc_feature (293)..(293): n is a, c, g, or t
  misc_feature (304)..(304): n is a, c, g, or t
  misc_feature (306)..(306): n is a, c, g, or t
  misc_feature (318)..(318): n is a, c, g, or t
  misc_feature (326)..(326): n is a, c, g, or t
  misc_feature (333)..(337): n is a, c, g, or t
  misc_feature (355)..(355): n is a, c, g, or t
  misc_feature (359)..(359): n is a, c, g, or t
  misc_feature (371)..(371): n is a, c, g, or t
  misc_feature (375)..(375): n is a, c, g, or t
  misc_feature (378)..(378): n is a, c, g, or t
  misc_feature (386)..(386): n is a, c, g, or t
  misc_feature (388)..(388): n is a, c, g, or t
  misc_feature (398)..(400): n is a, c, g, or t
  misc_feature (406)..(406): n is a, c, g, or t
  misc_feature (413)..(413): n is a, c, g, or t
  misc_feature (417)..(417): n is a, c, g, or t
  misc_feature (420)..(420): n is a, c, g, or t
  misc_feature (424)..(427): n is a, c, g, or t
  misc_feature (429)..(431): n is a, c, g, or t
  misc_feature (434)..(434): n is a, c, g, or t
  misc_feature (437)..(467): n is a, c, g, or t
  misc_feature (470)..(501): n is a, c, g, or t
  misc_feature (503)..(541): n is a, c, g, or t
  Probeset Number=SeqID_19414
gnntccgcacgatcgcccgttgcctactctcgtccacactgnctcgccggggcggcggtggncggcggcntctccgcgnaccgtagatntngcncnnaaganncanatccnaancccgnatnttctcttcttccccctccttcnccattgtccccgccgctgcnntgggcancggngncgccggccgccaccgcctccgatgccggngccaaagaagaagttgctcatcttcgactccgagnnggaattctcgcggtttcctcttgcgaagtaacttgcggagtggnncgganaaattcggggncnaaaaagggtgcnttcaccgncgtggtnnnnngggggatcccctcatcgnaggnactcagggaagntganggnagccgcgnancctgggattnnnggggantgggagnaagnggnacgnnnntnnnggnggnnnnnnnnnnnnnnnnnnnnnnnnnnnnnnnggnnnnnnnnnnnnnnnnnnnnnnnnnnnnnnnngnnnnnnnnnnnnnnnnnnnnnnnnnnnnnnnnnnnnnnn

SEQ ID NO: 5012 - DNA, 515 bp, Zea mays
  misc_feature (4)..(4): n is a, c, g, or t
  misc_feature (11)..(11): n is a, c, g, or t
  misc_feature (21)..(21): n is a, c, g, or t
  misc_feature (25)..(25): n is a, c, g, or t
  misc_feature (55)..(55): n is a, c, g, or t
  misc_feature (71)..(71): n is a, c, g, or t
  misc_feature (121)..(121): n is a, c, g, or t
  misc_feature (143)..(144): n is a, c, g, or t
  misc_feature (152)..(152): n is a, c, g, or t
  misc_feature (167)..(167): n is a, c, g, or t
  misc_feature (181)..(181): n is a, c, g, or t
  misc_feature (190)..(190): n is a, c, g, or t
  misc_feature (192)..(192): n is a, c, g, or t
  misc_feature (196)..(196): n is a, c, g, or t
  misc_feature (199)..(199): n is a, c, g, or t
  misc_feature (201)..(203): n is a, c, g, or t
  misc_feature (206)..(208): n is a, c, g, or t
  misc_feature (211)..(214): n is a, c, g, or t
  misc_feature (216)..(218): n is a, c, g, or t
  misc_feature (221)..(222): n is a, c, g, or t
  misc_feature (225)..(226): n is a, c, g, or t
  misc_feature (228)..(231): n is a, c, g, or t
  misc_feature (233)..(247): n is a, c, g, or t
  misc_feature (249)..(288): n is a, c, g, or t
  misc_feature (291)..(297): n is a, c, g, or t
  misc_feature (307)..(515): n is a, c, g, or t
  Peptide Sequence Number=SeqID_12673
  Probeset Number=SeqID_19415
actngaaagangctctgtacntatntattgctcctttcactctgagcatcggganccgagtgaccatgagntcgacaggcggacggagcacgatgggcgtccgagagagtcttggctggangtaggccgctctcatcctgcanngacgatgngagtcggcatcacgngccgagaagatcgncacgatcgngnaggnagncnnnatnnnggnnnngnnntannggnngnnnntnnnnnnnnnnnnnnngnnnnnnnnnnnnnnnnnnnnnnnnnnnnnnnnnnnnnnnnccnnnnnnngggggggggnnnnnnnnnnnnnnnnnnnnnnnnnnnnnnnnnnnnnnnnnnnnnnnnnnnnnnnnnnnnnnnnnnnnnnnnnnnnnnnnnnnnnnnnnnnnnnnnnnnnnnnnnnnnnnnnnnnnnnnnnnnnnnnnnnnnnnnnnnnnnnnnnnnnnnnnnnnnnnnnnnnnnnnnnnnnnnnnnnnnnnnnnnnnnnnnnnnnnnnnnnnnnnnnn

SEQ ID NO: 5013 - DNA, 497 bp, Zea mays
  misc_feature (7)..(7): n is a, c, g, or t
  misc_feature (13)..(13): n is a, c, g, or t
  misc_feature (32)..(32): n is a, c, g, or t
  misc_feature (51)..(51): n is a, c, g, or t
  misc_feature (64)..(64): n is a, c, g, or t
  misc_feature (73)..(73): n is a, c, g, or t
  misc_feature (83)..(83): n is a, c, g, or t
  misc_feature (86)..(86): n is a, c, g, or t
  misc_feature (88)..(88): n is a, c, g, or t
  misc_feature (99)..(99): n is a, c, g, or t
  misc_feature (104)..(104): n is a, c, g, or t
  misc_feature (116)..(116): n is a, c, g, or t
  misc_feature (125)..(125): n is a, c, g, or t
  misc_feature (156)..(156): n is a, c, g, or t
  misc_feature (164)..(164): n is a, c, g, or t
  misc_feature (167)..(169): n is a, c, g, or t
  misc_feature (171)..(171): n is a, c, g, or t
  misc_feature (177)..(177): n is a, c, g, or t
  misc_feature (181)..(181): n is a, c, g, or t
  misc_feature (186)..(186): n is a, c, g, or t
  misc_feature (192)..(193): n is a, c, g, or t
  misc_feature (200)..(201): n is a, c, g, or t
  misc_feature (204)..(205): n is a, c, g, or t
  misc_feature (208)..(208): n is a, c, g, or t
  misc_feature (210)..(210): n is a, c, g, or t
  misc_feature (213)..(213): n is a, c, g, or t
  misc_feature (215)..(215): n is a, c, g, or t
  misc_feature (219)..(219): n is a, c, g, or t
  misc_feature (231)..(232): n is a, c, g, or t
  misc_feature (237)..(237): n is a, c, g, or t
  misc_feature (244)..(244): n is a, c, g, or t
  misc_feature (273)..(273): n is a, c, g, or t
  misc_feature (283)..(283): n is a, c, g, or t
  misc_feature (291)..(291): n is a, c, g, or t
  misc_feature (298)..(299): n is a, c, g, or t
  misc_feature (310)..(310): n is a, c, g, or t
  misc_feature (312)..(312): n is a, c, g, or t
  misc_feature (316)..(316): n is a, c, g, or t
  misc_feature (323)..(323): n is a, c, g, or t
  misc_feature (325)..(325): n is a, c, g, or t
  misc_feature (338)..(338): n is a, c, g, or t
  misc_feature (345)..(345): n is a, c, g, or t
  misc_feature (349)..(349): n is a, c, g, or t
  misc_feature (356)..(358): n is a, c, g, or t
  misc_feature (362)..(363): n is a, c, g, or t
  misc_feature (366)..(366): n is a, c, g, or t
  misc_feature (381)..(381): n is a, c, g, or t
  misc_feature (391)..(391): n is a, c, g, or t
  misc_feature (485)..(485): n is a, c, g, or t
  Probeset Number=SeqID_19416
atctgcngcatgnctcctcttttcctcgtcgncccggagcatctccgcgtncactcccgcaggncgcagatgnagcaccgagncgntntacccctccangccgntacgttcctcgnttctgtgcnaggtcatcgcctccgattatttcgtgggcgntgaggtcntannncntatggngttnctccnataccnncaggcanngcnngcntnccnangggngaaaccgggtcnnctccnctagagngtcctccgagatgatcggatggcgtccgnatactatttntcacgccntgattcnncaatcgtcagncntatntgttggngnaggaattggtacnaaccatnacgntgacagnnngtgnngcngctcgtgctacctgngatcaaccangtagctctggtgaaacctttctccctactctcagcaacaacaatttcttccattcaaccaactgtctacattggaaccgtgctgcttatttgcngcaacaactatt

SEQ ID NO: 5014 - DNA, 526 bp, Zea mays
  misc_feature (12)..(13): n is a, c, g, or t
  misc_feature (16)..(16): n is a, c, g, or t
  misc_feature (20)..(20): n is a, c, g, or t
  misc_feature (86)..(86): n is a, c, g, or t
  misc_feature (113)..(113): n is a, c, g, or t
  misc_feature (145)..(145): n is a, c, g, or t
  misc_feature (157)..(157): n is a, c, g, or t
  misc_feature (179)..(179): n is a, c, g, or t
  misc_feature (187)..(187): n is a, c, g, or t
  misc_feature (193)..(193): n is a, c, g, or t
  misc_feature (203)..(203): n is a, c, g, or t
  misc_feature (222)..(222): n is a, c, g, or t
  misc_feature (228)..(228): n is a, c, g, or t
  misc_feature (256)..(256): n is a, c, g, or t
  misc_feature (258)..(258): n is a, c, g, or t
  misc_feature (325)..(325): n is a, c, g, or t
  misc_feature (327)..(327): n is a, c, g, or t
  misc_feature (336)..(336): n is a, c, g, or t
  misc_feature (347)..(347): n is a, c, g, or t
  misc_feature (378)..(378): n is a, c, g, or t
  misc_feature (387)..(387): n is a, c, g, or t
  misc_feature (390)..(390): n is a, c, g, or t
  misc_feature (404)..(404): n is a, c, g, or t
  misc_feature (408)..(408): n is a, c, g, or t
  misc_feature (421)..(422): n is a, c, g, or t
  misc_feature (442)..(442): n is a, c, g, or t
  misc_feature (445)..(445): n is a, c, g, or t
  misc_feature (448)..(448): n is a, c, g, or t
  misc_feature (451)..(453): n is a, c, g, or t
  misc_feature (463)..(463): n is a, c, g, or t
  misc_feature (466)..(466): n is a, c, g, or t
  misc_feature (472)..(472): n is a, c, g, or t
  misc_feature (474)..(474): n is a, c, g, or t
  misc_feature (479)..(479): n is a, c, g, or t
  misc_feature (483)..(489): n is a, c, g, or t
  misc_feature (492)..(492): n is a, c, g, or t
  misc_feature (494)..(494): n is a, c, g, or t
  misc_feature (496)..(496): n is a, c, g, or t
  misc_feature (501)..(501): n is a, c, g, or t
  misc_feature (512)..(512): n is a, c, g, or t
  misc_feature (522)..(524): n is a, c, g, or t
  misc_feature (526)..(526): n is a, c, g, or t
  Peptide Sequence Number=SeqID_12674
  Probeset Number=SeqID_19417
aacctacctacnncgntccncgctcgaccgtctttgcctgccttcccattccccccgtctcctcttcccttccgccatggcccagnccgctttcctctcctctctccgctccngcctcggatccgcgccgccggccccgccgaancatcgcctccancccaggcgcggctaccacgtcnagcttggngctcgngaaaaagcgntttgggaggaggatgatgnttttgnaagaggttcaaatcatacaaaaacagtngngaaaagggtctccaagaatcgggtaatgctctccacttttaagctgttggtacttgcttgcagctancnagctttggntggggttgggngactagcacaaaaatgaagggaaaactcagncatgggggnggnacgggtattttccngggnaaagggatccatnnagcatgaactggcactctcntcnccnttnnngggttttttnaancccccngnttggntggnnnnnnncgnancnggggnaaaataaaaanaaaactaggnnnan

SEQ ID NO: 5015 - DNA, 494 bp, Zea mays
  misc_feature (8)..(8): n is a, c, g, or t
  misc_feature (39)..(39): n is a, c, g, or t
  misc_feature (42)..(42): n is a, c, g, or t
  misc_feature (51)..(52): n is a, c, g, or t
  misc_feature (79)..(80): n is a, c, g, or t
  misc_feature (84)..(84): n is a, c, g, or t
  misc_feature (95)..(95): n is a, c, g, or t
  misc_feature (99)..(99): n is a, c, g, or t
  misc_feature (103)..(104): n is a, c, g, or t
  misc_feature (110)..(110): n is a, c, g, or t
  misc_feature (112)..(112): n is a, c, g, or t
  misc_feature (115)..(115): n is a, c, g, or t
  misc_feature (120)..(120): n is a, c, g, or t
  misc_feature (122)..(122): n is a, c, g, or t
  misc_feature (132)..(132): n is a, c, g, or t
  misc_feature (136)..(136): n is a, c, g, or t
  misc_feature (140)..(143): n is a, c, g, or t
  misc_feature (148)..(148): n is a, c, g, or t
  misc_feature (156)..(156): n is a, c, g, or t
  misc_feature (158)..(158): n is a, c, g, or t
  misc_feature (163)..(165): n is a, c, g, or t
  misc_feature (168)..(168): n is a, c, g, or t
  misc_feature (175)..(175): n is a, c, g, or t
  misc_feature (185)..(186): n is a, c, g, or t
  misc_feature (190)..(190): n is a, c, g, or t
  misc_feature (194)..(194): n is a, c, g, or t
  misc_feature (204)..(204): n is a, c, g, or t
  misc_feature (211)..(211): n is a, c, g, or t
  misc_feature (219)..(220): n is a, c, g, or t
  misc_feature (233)..(233): n is a, c, g, or t
  misc_feature (235)..(235): n is a, c, g, or t
  misc_feature (244)..(245): n is a, c, g, or t
  misc_feature (247)..(247): n is a, c, g, or t
  misc_feature (256)..(257): n is a, c, g, or t
  misc_feature (261)..(262): n is a, c, g, or t
  misc_feature (266)..(266): n is a, c, g, or t
  misc_feature (269)..(269): n is a, c, g, or t
  misc_feature (276)..(276): n is a, c, g, or t
  misc_feature (280)..(280): n is a, c, g, or t
  misc_feature (296)..(297): n is a, c, g, or t
  misc_feature (311)..(311): n is a, c, g, or t
  misc_feature (314)..(315): n is a, c, g, or t
  misc_feature (328)..(328): n is a, c, g, or t
  misc_feature (351)..(351): n is a, c, g, or t
  misc_feature (356)..(356): n is a, c, g, or t
  misc_feature (370)..(370): n is a, c, g, or t
  misc_feature (374)..(374): n is a, c, g, or t
  misc_feature (468)..(468): n is a, c, g, or t
  Probeset Number=SeqID_19418
atccgttntattcctggatacgacttgacgcatgatacntgntcctgtcannctaggaccctcttaggcatgcaggggnngccntattgtttgcnatcntganncatctngntcntccancncgaggtgctnccgnggcnnnnattcncgctagancncaacnnnacngtctctncggagaccgnngcgngatntgaatacctnactatanaatcctannggctacaagaggntnatcgcagtnngnatcttacgnncgtnngcantgnccgtacnacanccatatgccctattgnnacaaccatccttantgnntctatatctccanagaatcgcagcacaacaactacnacatnagttgcttccaacnatcnatcaagtagttgcagcgaaccttgctgctttacctccagcaacaacaatttcttccattcaatcaactagctgggggtgaaccctgctgcttantttgcaggcacaacagctactaccat

SEQ ID NO: 5016 - DNA, 515 bp, Zea mays
  misc_feature (2)..(2): n is a, c, g, or t
  misc_feature (25)..(26): n is a, c, g, or t
  misc_feature (28)..(28): n is a, c, g, or t
  misc_feature (40)..(40): n is a, c, g, or t
  misc_feature (45)..(45): n is a, c, g, or t
  misc_feature (80)..(80): n is a, c, g, or t
  misc_feature (82)..(82): n is a, c, g, or t
  misc_feature (90)..(90): n is a, c, g, or t
  misc_feature (93)..(93): n is a, c, g, or t
  misc_feature (95)..(95): n is a, c, g, or t
  misc_feature (100)..(100): n is a, c, g, or t
  misc_feature (104)..(104): n is a, c, g, or t
  misc_feature (106)..(106): n is a, c, g, or t
  misc_feature (117)..(117): n is a, c, g, or t
  misc_feature (124)..(124): n is a, c, g, or t
  misc_feature (129)..(129): n is a, c, g, or t
  misc_feature (131)..(131): n is a, c, g, or t
  misc_feature (133)..(134): n is a, c, g, or t
  misc_feature (137)..(137): n is a, c, g, or t
  misc_feature (143)..(143): n is a, c, g, or t
  misc_feature (145)..(145): n is a, c, g, or t
  misc_feature (148)..(148): n is a, c, g, or t
  misc_feature (160)..(160): n is a, c, g, or t
  misc_feature (175)..(175): n is a, c, g, or t
  misc_feature (185)..(187): n is a, c, g, or t
  misc_feature (189)..(189): n is a, c, g, or t
  misc_feature (196)..(196): n is a, c, g, or t
  misc_feature (198)..(198): n is a, c, g, or t
  misc_feature (203)..(204): n is a, c, g, or t
  misc_feature (212)..(212): n is a, c, g, or t
  misc_feature (214)..(214): n is a, c, g, or t
  misc_feature (219)..(219): n is a, c, g, or t
  misc_feature (232)..(232): n is a, c, g, or t
  misc_feature (235)..(236): n is a, c, g, or t
  misc_feature (249)..(249): n is a, c, g, or t
  misc_feature (256)..(257): n is a, c, g, or t
  misc_feature (264)..(264): n is a, c, g, or t
  misc_feature (293)..(293): n is a, c, g, or t
  misc_feature (373)..(373): n is a, c, g, or t
  misc_feature (429)..(429): n is a, c, g, or t
  misc_feature (448)..(448): n is a, c, g, or t
  misc_feature (473)..(473): n is a, c, g, or t
  misc_feature (494)..(494): n is a, c, g, or t
  Peptide Sequence Number=SeqID_12675
  Probeset Number=SeqID_19419
antgtcctgtatactctccctctcnngnctgccgtgctgngcagntggttgatttgctctgcctcggcctccgcctgacngncttgctgnagntnaacancttncnactgacgctgnggccgcnaccgngncnnttnttgcgngngangcacaacgatangtctctccggagacngacggcagannngnatacctnantatannatcttacngnctaanagaggacatcgcngtnngcatcttacggcngatagcnntgaccgnccaacaaccatatgccctattgctacaancatccttaatgaatctatatctccaaagaatcgcagcacaacaactacaacaacagtttgcttccaacaatcaatcaagnagttgcagcggaaccttgctgcttacctccagcaacaacaatttcttccattcaancaaataactgggggtgaancctggctgcttacttgcaagcaacnacagctactaccattcaaccnacttgtcaagaagccctgctg

SEQ ID NO: 5017 - DNA, 526 bp, Zea mays
  misc_feature (5)..(6): n is a, c, g, or t
  misc_feature (9)..(9): n is a, c, g, or t
  misc_feature (17)..(18): n is a, c, g, or t
  misc_feature (31)..(31): n is a, c, g, or t
  misc_feature (40)..(40): n is a, c, g, or t
  misc_feature (44)..(44): n is a, c, g, or t
  misc_feature (48)..(48): n is a, c, g, or t
  misc_feature (63)..(63): n is a, c, g, or t
  misc_feature (74)..(74): n is a, c, g, or t
  misc_feature (76)..(76): n is a, c, g, or t
  misc_feature (79)..(80): n is a, c, g, or t
  misc_feature (92)..(92): n is a, c, g, or t
  misc_feature (95)..(95): n is a, c, g, or t
  misc_feature (104)..(104): n is a, c, g, or t
  misc_feature (110)..(110): n is a, c, g, or t
  misc_feature (135)..(135): n is a, c, g, or t
  misc_feature (140)..(141): n is a, c, g, or t
  misc_feature (144)..(144): n is a, c, g, or t
  misc_feature (148)..(148): n is a, c, g, or t
  misc_feature (152)..(154): n is a, c, g, or t
  misc_feature (164)..(164): n is a, c, g, or t
  misc_feature (169)..(169): n is a, c, g, or t
  misc_feature (171)..(173): n is a, c, g, or t
  misc_feature (188)..(188): n is a, c, g, or t
  misc_feature (206)..(206): n is a, c, g, or t
  misc_feature (232)..(232): n is a, c, g, or t
  misc_feature (335)..(335): n is a, c, g, or t
  misc_feature (338)..(338): n is a, c, g, or t
  misc_feature (364)..(364): n is a, c, g, or t
  misc_feature (377)..(377): n is a, c, g, or t
  misc_feature (379)..(379): n is a, c, g, or t
  misc_feature (382)..(383): n is a, c, g, or t
  misc_feature (387)..(387): n is a, c, g, or t
  misc_feature (389)..(389): n is a, c, g, or t
  misc_feature (393)..(393): n is a, c, g, or t
  misc_feature (399)..(401): n is a, c, g, or t
  misc_feature (406)..(406): n is a, c, g, or t
  misc_feature (411)..(412): n is a, c, g, or t
  misc_feature (416)..(417): n is a, c, g, or t
  misc_feature (419)..(420): n is a, c, g, or t
  misc_feature (424)..(428): n is a, c, g, or t
  misc_feature (430)..(430): n is a, c, g, or t
  misc_feature (434)..(447): n is a, c, g, or t
  misc_feature (449)..(453): n is a, c, g, or t
  misc_feature (455)..(463): n is a, c, g, or t
  misc_feature (465)..(492): n is a, c, g, or t
  misc_feature (494)..(526): n is a, c, g, or t
  Probeset Number=SeqID_19420
aaacnntanagtcccgnnactgccgcctccnccccacgcntgcngtcntgccgcccaagctcnacccgcttcangntgnngctggttcttgnccncgggaccgntggccnccatcgcgcggatgttctcgctgtntcctnnganatgnctgnnnaggcaatcanctcanannntctagccttctctcngggtgaggaagggtaaangcattgctccgcctgcaaccagtgcntatgagatctgtttcctgcgctgccaagaagggatacggtgggacaaggtttgtgaaattgtgaagaagcagcttgctcttcctgaccacactggaagtttgnggngaatcgaaattctctgaacttggtgnggattcgctggananggnntgananttgngatggnnncttgnggaanncttnnannttannnnngnaggnnnnnnnnnnnnnnannnnngnnnnnnnnnannnnnnnnnnnnnnnnnnnnnnnnnnnngnnnnnnnnnnnnnnnnnnnnnnnnnnnnnnnnn

SEQ ID NO: 5018 - DNA, 552 bp, Zea mays
  misc_feature (11)..(11): n is a, c, g, or t
  misc_feature (23)..(23): n is a, c, g, or t
  misc_feature (81)..(81): n is a, c, g, or t
  misc_feature (101)..(101): n is a, c, g, or t
  misc_feature (115)..(115): n is a, c, g, or t
  misc_feature (129)..(129): n is a, c, g, or t
  misc_feature (140)..(140): n is a, c, g, or t
  misc_feature (152)..(152): n is a, c, g, or t
  misc_feature (183)..(183): n is a, c, g, or t
  misc_feature (333)..(333): n is a, c, g, or t
  misc_feature (398)..(398): n is a, c, g, or t
  misc_feature (436)..(436): n is a, c, g, or t
  misc_feature (440)..(442): n is a, c, g, or t
  misc_feature (445)..(445): n is a, c, g, or t
  misc_feature (456)..(456): n is a, c, g, or t
  misc_feature (494)..(494): n is a, c, g, or t
  misc_feature (502)..(502): n is a, c, g, or t
  misc_feature (506)..(506): n is a, c, g, or t
  misc_feature (508)..(510): n is a, c, g, or t
  misc_feature (530)..(532): n is a, c, g, or t
  misc_feature (541)..(541): n is a, c, g, or t
  misc_feature (545)..(545): n is a, c, g, or t
  misc_feature (549)..(549): n is a, c, g, or t
  misc_feature (551)..(551): n is a, c, g, or t
  Peptide Sequence Number=SeqID_12219
  Probeset Number=SeqID_19421
atcactaatcngtcagtcacagntcacagtcaaacaccgcgaagccgcccccgctcccaaacccgaccgagcaaagcgcanagccccccaaccgcggatcnatccggcagcatcnatggcgcccaaggnggagaaaaagncggcgggcgaanaagcccgccggaggaggagcccgcgaccganaaaggcggagaagggctccgggcagggaaaaaagccgaaggcggagaaacgccctccccgcggggcaggtccgggggccggcgaggggcaagaaagggcaagaagaaagccaagaaagaagcgtggaggacctacaagatctacatttcnttcaaggtgggttcaaggcaggtgcaccccgacatcgggcattctcgtcccaaggccatgtcccnttcatgaatttccttcatcaacgacattcttcgagagntttnnnccnggggaggccgnccaagctcgcccgctacaacaagaagcccaccatcccntttccggngagntnnnagaactccgtccgcttcgtnnnttacccggngagntcgncna

SEQ ID NO: 5019 - DNA, 513 bp, Zea mays
  misc_feature (258)..(258): n is a, c, g, or t
  misc_feature (282)..(282): n is a, c, g, or t
  misc_feature (284)..(284): n is a, c, g, or t
  misc_feature (288)..(288): n is a, c, g, or t
  misc_feature (291)..(291): n is a, c, g, or t
  misc_feature (294)..(294): n is a, c, g, or t
  misc_feature (297)..(297): n is a, c, g, or t
  misc_feature (315)..(315): n is a, c, g, or t
  misc_feature (319)..(319): n is a, c, g, or t
  misc_feature (323)..(323): n is a, c, g, or t
  misc_feature (326)..(326): n is a, c, g, or t
  misc_feature (328)..(329): n is a, c, g, or t
  misc_feature (332)..(333): n is a, c, g, or t
  misc_feature (336)..(338): n is a, c, g, or t
  misc_feature (340)..(340): n is a, c, g, or t
  misc_feature (342)..(344): n is a, c, g, or t
  misc_feature (347)..(347): n is a, c, g, or t
  misc_feature (349)..(360): n is a, c, g, or t
  misc_feature (362)..(362): n is a, c, g, or t
  misc_feature (366)..(371): n is a, c, g, or t
  misc_feature (373)..(377): n is a, c, g, or t
  misc_feature (379)..(380): n is a, c, g, or t
  misc_feature (382)..(385): n is a, c, g, or t
  misc_feature (387)..(388): n is a, c, g, or t
  misc_feature (390)..(513): n is a, c, g, or t
  Probeset Number=SeqID_19422
aagcaagcacgcagcgtcagctcctctccccacctcacgcacgttttctcccagccaccgcacggcagcttccctgctccactcggcatctctgcttctcccagcgccctggctctgctctaccttcacagcgagctcgccctcaagccatggtggctgccgccgccatctccccttggtactcgccgagttcgccctccctctgtgccatgccccctgtacggcgccctctctgctccagtttgtttttccagccgngctcccccatcactctcccatggngnaggnaanagnagnacctccctccatggatgnctcncganatnannganntcnnncngnnnaanannnnnnnnnnnncntttnnnnnngnnnnngnngnnnngnngnnnnnnnnnnnnnnnnnnnnnnnnnnnnnnnnnnnnnnnnnnnnnnnnnnnnnnnnnnnnnnnnnnnnnnnnnnnnnnnnnnnnnnnnnnnnnnnnnnnnnnnnnnnnnnnnnnnnnnnnnnnn

SEQ ID NO: 5020 - DNA, 557 bp, Zea mays
  misc_feature (176)..(176): n is a, c, g, or t
  misc_feature (231)..(231): n is a, c, g, or t
  misc_feature (260)..(260): n is a, c, g, or t
  misc_feature (266)..(266): n is a, c, g, or t
  misc_feature (342)..(342): n is a, c, g, or t
  misc_feature (344)..(347): n is a, c, g, or t
  misc_feature (398)..(398): n is a, c, g, or t
  misc_feature (409)..(409): n is a, c, g, or t
  misc_feature (411)..(411): n is a, c, g, or t
  misc_feature (414)..(414): n is a, c, g, or t
  misc_feature (417)..(417): n is a, c, g, or t
  misc_feature (434)..(434): n is a, c, g, or t
  misc_feature (437)..(437): n is a, c, g, or t
  misc_feature (439)..(439): n is a, c, g, or t
  misc_feature (445)..(445): n is a, c, g, or t
  misc_feature (455)..(456): n is a, c, g, or t
  misc_feature (458)..(458): n is a, c, g, or t
  misc_feature (460)..(460): n is a, c, g, or t
  misc_feature (468)..(468): n is a, c, g, or t
  misc_feature (474)..(474): n is a, c, g, or t
  misc_feature (477)..(477): n is a, c, g, or t
  misc_feature (488)..(489): n is a, c, g, or t
  misc_feature (498)..(501): n is a, c, g, or t
  misc_feature (510)..(511): n is a, c, g, or t
  misc_feature (516)..(516): n is a, c, g, or t
  misc_feature (518)..(518): n is a, c, g, or t
  misc_feature (522)..(523): n is a, c, g, or t
  misc_feature (526)..(526): n is a, c, g, or t
  misc_feature (531)..(531): n is a, c, g, or t
  misc_feature (534)..(534): n is a, c, g, or t
  misc_feature (536)..(536): n is a, c, g, or t
  misc_feature (539)..(542): n is a, c, g, or t
  misc_feature (545)..(552): n is a, c, g, or t
  misc_feature (555)..(555): n is a, c, g, or t
  Peptide Sequence Number=SeqID_12220
  Probeset Number=SeqID_19423
aactccatttattttgcttgatccttgagaaagaagaagaaggaaagacgagagctagaagcgaaagggagaaaaagcagttctttcagctaggcaggagggcacaggaaaggaggagatggcgtcaaagaggattcagaaggagctcaaggaatctgcagaaggaccctcccacncggtggcaggtgcagggtcctggttggtgaagacatgtttccactggcagaaacnaataatggggtccatctgatagcccatanttcttngggggggaggttttcctagttacaatccattttcctcctgattatcctttcaacccaccaaaaggtggcatttcgncnnnnttaaggtggttccatccaaacatcaacagcaacggggagcatttgcctgancatcttgaggnanccnagngggagtccggcactacnaantnctccanggggggctgnntngnccatctgnttcccntgntgactgatccnnaaccccgannnnaccctttgnnccccnanatanntcncatgnacnanacnnnncgnnnnnnnnacnaa

SEQ ID NO: 5021 - DNA, 465 bp, Zea mays
  misc_feature (22)..(22): n is a, c, g, or t
  misc_feature (29)..(30): n is a, c, g, or t
  misc_feature (66)..(66): n is a, c, g, or t
  misc_feature (83)..(83): n is a, c, g, or t
  misc_feature (112)..(112): n is a, c, g, or t
  misc_feature (142)..(142): n is a, c, g, or t
  misc_feature (144)..(144): n is a, c, g, or t
  misc_feature (149)..(149): n is a, c, g, or t
  misc_feature (153)..(153): n is a, c, g, or t
  misc_feature (155)..(155): n is a, c, g, or t
  misc_feature (160)..(160): n is a, c, g, or t
  misc_feature (162)..(162): n is a, c, g, or t
  misc_feature (166)..(166): n is a, c, g, or t
  misc_feature (172)..(172): n is a, c, g, or t
  misc_feature (175)..(175): n is a, c, g, or t
  misc_feature (177)..(178): n is a, c, g, or t
  misc_feature (185)..(185): n is a, c, g, or t
  misc_feature (190)..(190): n is a, c, g, or t
  misc_feature (193)..(193): n is a, c, g, or t
  misc_feature (198)..(199): n is a, c, g, or t
  misc_feature (215)..(215): n is a, c, g, or t
  misc_feature (218)..(218): n is a, c, g, or t
  misc_feature (222)..(222): n is a, c, g, or t
  misc_feature (224)..(224): n is a, c, g, or t
  misc_feature (230)..(230): n is a, c, g, or t
  misc_feature (233)..(233): n is a, c, g, or t
  misc_feature (236)..(237): n is a, c, g, or t
  misc_feature (243)..(243): n is a, c, g, or t
  misc_feature (251)..(251): n is a, c, g, or t
  misc_feature (261)..(261): n is a, c, g, or t
  misc_feature (267)..(267): n is a, c, g, or t
  misc_feature (272)..(274): n is a, c, g, or t
  misc_feature (283)..(283): n is a, c, g, or t
  misc_feature (296)..(296): n is a, c, g, or t
  misc_feature (301)..(301): n is a, c, g, or t
  misc_feature (305)..(305): n is a, c, g, or t
  misc_feature (317)..(317): n is a, c, g, or t
  misc_feature (323)..(323): n is a, c, g, or t
  misc_feature (328)..(328): n is a, c, g, or t
  misc_feature (340)..(340): n is a, c, g, or t
  misc_feature (345)..(345): n is a, c, g, or t
  misc_feature (347)..(347): n is a, c, g, or t
  misc_feature (351)..(351): n is a, c, g, or t
  misc_feature (358)..(358): n is a, c, g, or t
  misc_feature (360)..(360): n is a, c, g, or t
  misc_feature (368)..(368): n is a, c, g, or t
  misc_feature (374)..(374): n is a, c, g, or t
  misc_feature (382)..(383): n is a, c, g, or t
  misc_feature (386)..(386): n is a, c, g, or t
  misc_feature (391)..(391): n is a, c, g, or t
  misc_feature (394)..(396): n is a, c, g, or t
  misc_feature (398)..(399): n is a, c, g, or t
  misc_feature (407)..(407): n is a, c, g, or t
  misc_feature (409)..(409): n is a, c, g, or t
  misc_feature (411)..(412): n is a, c, g, or t
  misc_feature (414)..(415): n is a, c, g, or t
  misc_feature (417)..(417): n is a, c, g, or t
  misc_feature (419)..(420): n is a, c, g, or t
  misc_feature (422)..(426): n is a, c, g, or t
  misc_feature (428)..(432): n is a, c, g, or t
  misc_feature (435)..(436): n is a, c, g, or t
  misc_feature (438)..(439): n is a, c, g, or t
  misc_feature (441)..(442): n is a, c, g, or t
  misc_feature (444)..(465): n is a, c, g, or t
  Peptide Sequence Number=SeqID_12221
  Probeset Number=SeqID_19424
aaaaagcgcttctctcgctagngagttcnngagtataaaccctaaaatgaatgactcgcgtgcctntccttcgctagcggaancgccctcccctcgcccggaggtaaggggnttcaggcaccgagatgctcgccactggctncncttcngaananggtgnangagngcatgncancnnatcgggnagccngangatannataagatggggtgcgngtnggtncnggatcntanggnnatcctncagctttnaggagaaggngagcgncctgnnncacgtccanggattgcagaggngcagnggcntcgaggagatcntcctgnccacntccaagagcagnggcgnancagntcatggngntcctccgnacatcntcccgagnnagnctcgncgnnngnncgaggggntnanngnngngnngnnnnngnnnnntgnngnngnngnnnnnnnnnnnnnnnnnnnnnn

SEQ ID NO: 5022 - DNA, 469 bp, Zea mays
  misc_feature (113)..(113): n is a, c, g, or t
  misc_feature (157)..(157): n is a, c, g, or t
  misc_feature (271)..(271): n is a, c, g, or t
  misc_feature (287)..(287): n is a, c, g, or t
  misc_feature (302)..(302): n is a, c, g, or t
  misc_feature (307)..(307): n is a, c, g, or t
  misc_feature (310)..(310): n is a, c, g, or t
  misc_feature (315)..(315): n is a, c, g, or t
  misc_feature (317)..(318): n is a, c, g, or t
  misc_feature (320)..(320): n is a, c, g, or t
  misc_feature (322)..(322): n is a, c, g, or t
  misc_feature (329)..(330): n is a, c, g, or t
  misc_feature (332)..(333): n is a, c, g, or t
  misc_feature (336)..(339): n is a, c, g, or t
  misc_feature (341)..(343): n is a, c, g, or t
  misc_feature (346)..(346): n is a, c, g, or t
  misc_feature (350)..(352): n is a, c, g, or t
  misc_feature (354)..(356): n is a, c, g, or t
  misc_feature (358)..(359): n is a, c, g, or t
  misc_feature (361)..(469): n is a, c, g, or t
  Probeset Number=SeqID_19425
taaatccccaaatcggcctacgcccacggttccacctcctcgtccacgaggtgaggaaaccctagcgaccgaccatggcgttgctcccgcgcaccgcgcggctggccctcctnttccacccccgcgggcggtactcccgctgcccgcttgctgcggnggccctccccgacgtccccagcggccaatacgggggcgcccccccaccggcgatgtcaagaacggccggagttcgtggtctctaaggtggacgacctgatgaactggggcgcgnaagggctcgatctggnccatgaccttcgggntcgcntgntgcgngnngnanatgatgnncnncgnnnngnnncgntacnnntnnnanngnnnnnnnnnnnnnnnnnnnnnnnnnnnnnnnnnnnnnnnnnnnnnnnnnnnnnnnnnnnnnnnnnnnnnnnnnnnnnnnnnnnnnnnnnnnnnnnnnnnnnnnnnnnnn

SEQ ID NO: 5023 - DNA, 479 bp, Zea mays
  misc_feature (7)..(7): n is a, c, g, or t
  misc_feature (47)..(47): n is a, c, g, or t
  misc_feature (60)..(60): n is a, c, g, or t
  misc_feature (92)..(92): n is a, c, g, or t
  misc_feature (100)..(100): n is a, c, g, or t
  misc_feature (124)..(124): n is a, c, g, or t
  misc_feature (128)..(129): n is a, c, g, or t
  misc_feature (166)..(166): n is a, c, g, or t
  misc_feature (171)..(171): n is a, c, g, or t
  misc_feature (190)..(190): n is a, c, g, or t
  misc_feature (193)..(193): n is a, c, g, or t
  misc_feature (195)..(195): n is a, c, g, or t
  misc_feature (212)..(212): n is a, c, g, or t
  misc_feature (228)..(228): n is a, c, g, or t
  misc_feature (313)..(313): n is a, c, g, or t
  misc_feature (339)..(339): n is a, c, g, or t
  misc_feature (347)..(347): n is a, c, g, or t
  misc_feature (370)..(370): n is a, c, g, or t
  misc_feature (381)..(381): n is a, c, g, or t
  misc_feature (394)..(394): n is a, c, g, or t
  misc_feature (421)..(421): n is a, c, g, or t
  misc_feature (477)..(479): n is a, c, g, or t
  Peptide Sequence Number=SeqID_12222
  Probeset Number=SeqID_19426
atctctnatattagtgcgaccaacctagcaacatggggcgggccctntcgtcgtgccacncgatggacagctcgggcggttttcgcctcgtnatgctccntggtctttctggaagtggtgctanagcnnccattttcccgtgatgctcaggagctcctatagcttnccttnttccgccggacctctcacnagngntgtctgtcggtgtgcgnaaacccaattcttcanccctacaggatccaacaggcaatcgcagctggcatcttacctttatcaccccttgttcctccaacaatcgtcagccctattacancagttacctttggagcatttgttggnacaaaacntcagggcacagcaactacgacancttgtgctagnggaccttgctgcntactctcagcaacatcaggttcttccnttcaaccaactggctgcattgaactctggtgcttatttgcaacaacaactactatnnn

SEQ ID NO: 5024 - DNA, 471 bp, Zea mays
  misc_feature (196)..(196): n is a, c, g, or t
  misc_feature (315)..(315): n is a, c, g, or t
  misc_feature (382)..(382): n is a, c, g, or t
  misc_feature (413)..(413): n is a, c, g, or t
  Peptide Sequence Number=SeqID_12223
  Probeset Number=SeqID_19427
aaaaccctcttcttcccccttcccgtgctcgacccagatcgagggctcgatccgtcggccatggcgctggggagttgggtggtgctgggctacgcgggcgggcgcggaggcgatcatgctgctgctgctgacgctgccgggggctcgagggcctgcgccggggctggatctcccgtggtgcggagcgcgctgaaanccatggaatggtcggtggtgcccttctgcctcttcctgctcatggaatcctactggaagtacgagacgcgccccacctgcgacgacgagcacgcctgcaccccctccgagcacctcggnccaccagaagcccaatcatgaaagtcgcagcggaacgcgctcctcatcgccgccgcgctgctccctnctactggatccctcttctccgtcaccccagnttcgtcgtcagggctcgagcaagatgcaagcagcgcgtcgacaagctcaggaagcgga

SEQ ID NO: 5025 - DNA, 510 bp, Zea mays
  misc_feature (3)..(3): n is a, c, g, or t
  misc_feature (8)..(8): n is a, c, g, or t
  misc_feature (15)..(15): n is a, c, g, or t
  misc_feature (23)..(23): n is a, c, g, or t
  misc_feature (36)..(36): n is a, c, g, or t
  misc_feature (47)..(47): n is a, c, g, or t
  misc_feature (66)..(66): n is a, c, g, or t
  misc_feature (73)..(73): n is a, c, g, or t
  misc_feature (75)..(76): n is a, c, g, or t
  misc_feature (78)..(78): n is a, c, g, or t
  misc_feature (85)..(85): n is a, c, g, or t
  misc_feature (89)..(89): n is a, c, g, or t
  misc_feature (116)..(116): n is a, c, g, or t
  misc_feature (118)..(118): n is a, c, g, or t
  misc_feature (120)..(121): n is a, c, g, or t
  misc_feature (144)..(144): n is a, c, g, or t
  misc_feature (147)..(147): n is a, c, g, or t
  misc_feature (151)..(151): n is a, c, g, or t
  misc_feature (159)..(159): n is a, c, g, or t
  misc_feature (165)..(165): n is a, c, g, or t
  misc_feature (170)..(170): n is a, c, g, or t
  misc_feature (191)..(191): n is a, c, g, or t
  misc_feature (194)..(194): n is a, c, g, or t
  misc_feature (229)..(229): n is a, c, g, or t
  misc_feature (232)..(232): n is a, c, g, or t
  misc_feature (234)..(234): n is a, c, g, or t
  misc_feature (239)..(239): n is a, c, g, or t
  misc_feature (248)..(248): n is a, c, g, or t
  misc_feature (264)..(264): n is a, c, g, or t
  misc_feature (267)..(267): n is a, c, g, or t
  misc_feature (276)..(276): n is a, c, g, or t
  misc_feature (279)..(279): n is a, c, g, or t
  misc_feature (284)..(284): n is a, c, g, or t
  misc_feature (287)..(287): n is a, c, g, or t
  misc_feature (292)..(292): n is a, c, g, or t
  misc_feature (296)..(297): n is a, c, g, or t
  misc_feature (302)..(302): n is a, c, g, or t
  misc_feature (306)..(306): n is a, c, g, or t
  misc_feature (323)..(324): n is a, c, g, or t
  misc_feature (336)..(336): n is a, c, g, or t
  misc_feature (347)..(347): n is a, c, g, or t
  misc_feature (358)..(358): n is a, c, g, or t
  misc_feature (360)..(360): n is a, c, g, or t
  misc_feature (363)..(363): n is a, c, g, or t
  misc_feature (381)..(381): n is a, c, g, or t
  misc_feature (384)..(384): n is a, c, g, or t
  misc_feature (397)..(397): n is a, c, g, or t
  misc_feature (407)..(407): n is a, c, g, or t
  misc_feature (480)..(480): n is a, c, g, or t
  misc_feature (491)..(491): n is a, c, g, or t
  misc_feature (499)..(499): n is a, c, g, or t
  Peptide Sequence Number=SeqID_12224
  Probeset Number=SeqID_19428
agnttgcncatccancaaaccanacactcgcttcgntccaccaccanctcgaaagccatggcaagngccaggngnncncgatacntttngcgccacttgtgtgaggcgaactactntngnngtcgaagagtgccagcgatctgntcnatcngcgaatgncaaggngcccngctcggggcaggtgggcttcnctntggcccagaaatgagtgatctttgacggataagtnctngnatatngagccgaanccctggcggactgtancgncctgaaggnatntacgnttnccgtngggnntaggntccncgttggtatcattgagnnctcgctgcaganggctcgctcgnaagtacaaccngnacnatgatgatctgccgcaantgntatgtacgactgngccctagggntgtcaactgccgcaagaataagtgtggtcacagcaaccagctgagggccaagaagaagatcaagaactgaggngctgctcctantcagtttntggacaatgtg

SEQ ID NO: 5026 - DNA, 490 bp, Zea mays
  misc_feature (264)..(264): n is a, c, g, or t
  misc_feature (267)..(267): n is a, c, g, or t
  misc_feature (270)..(270): n is a, c, g, or t
  misc_feature (339)..(339): n is a, c, g, or t
  misc_feature (374)..(374): n is a, c, g, or t
  misc_feature (408)..(408): n is a, c, g, or t
  misc_feature (411)..(411): n is a, c, g, or t
  misc_feature (420)..(421): n is a, c, g, or t
  misc_feature (424)..(424): n is a, c, g, or t
  misc_feature (428)..(428): n is a, c, g, or t
  misc_feature (430)..(432): n is a, c, g, or t
  misc_feature (436)..(436): n is a, c, g, or t
  misc_feature (440)..(440): n is a, c, g, or t
  misc_feature (442)..(442): n is a, c, g, or t
  misc_feature (445)..(445): n is a, c, g, or t
  misc_feature (447)..(450): n is a, c, g, or t
  misc_feature (456)..(460): n is a, c, g, or t
  misc_feature (462)..(479): n is a, c, g, or t
  misc_feature (481)..(485): n is a, c, g, or t
  misc_feature (487)..(488): n is a, c, g, or t
  misc_feature (490)..(490): n is a, c, g, or t
  Peptide Sequence Number=SeqID_12225
  Probeset Number=SeqID_19429
acccaaacccccgcgaagaggaagaggacagccaaatcctcagtcctcaggctgctcacagttcgtgctaccccctcccaccccggtagtctatctactgccttcgctgctcaacatggcgctccaggcggcgacgtccttcctcccctcggccctctccgcgcgggaagggaggggtcggtgaaggactcggcggtttcttgggtgttcttctcgcggatggcctcaagctggagaccgctgctctgggtctacgccaccaanggnggnggattttggactgaggctactgcttcttttaccctacatcatcttctatgcccattcccatcattaggnctttaggggagcttgcgtgcaccaatttccacggnctacttaaatgtaatggaagcttcttctgtcagnagntttttttannaangganannnccgngagngnatnannnnttttgnnnnnannnnnnnnnnnnnnnnnngnnnnnanngn

SEQ ID NO: 5027 - DNA, 528 bp, Zea mays
  misc_feature (308)..(308): n is a, c, g, or t
  misc_feature (406)..(406): n is a, c, g, or t
  misc_feature (409)..(409): n is a, c, g, or t
  misc_feature (448)..(448): n is a, c, g, or t
  misc_feature (454)..(454): n is a, c, g, or t
  misc_feature (456)..(457): n is a, c, g, or t
  misc_feature (460)..(462): n is a, c, g, or t
  misc_feature (467)..(467): n is a, c, g, or t
  misc_feature (469)..(471): n is a, c, g, or t
  misc_feature (477)..(478): n is a, c, g, or t
  misc_feature (480)..(485): n is a, c, g, or t
  misc_feature (491)..(491): n is a, c, g, or t
  misc_feature (494)..(494): n is a, c, g, or t
  misc_feature (497)..(497): n is a, c, g, or t
  misc_feature (503)..(503): n is a, c, g, or t
  misc_feature (505)..(506): n is a, c, g, or t
  misc_feature (513)..(514): n is a, c, g, or t
  misc_feature (519)..(519): n is a, c, g, or t
  misc_feature (528)..(528): n is a, c, g, or t
  Probeset Number=SeqID_19430
ctaacgctctccgccgccacttctcctccggcatcgacgaggcgaagccccagcgcccgagtccctctccctgctcccacgacccatggcggcggatatggcgtacgcgccgccgatgaaggcgggcaaggccgggttcgaggctggcatgatggatccgcagcacaggatccgcatcacgctctcctccaagagcgtcaagaacctcgagaaaggtctggcggggattctggtgaagggcgccaagggtaagggagctcaaggtcaaggggcccccgtgcggaggccctaccaaggtgctccacatnccccaccaggaagtctcccttggggggagaaggtaccaacaacctggggatcgcttttgagatgaggattcacaagagggtgatcggatctcgtcagnacncccagacgttgtcaagcagaatcacctcgatcactattngaaccngnnggnnnagggntnnngggggnntnnnnnnggacgnttnaanatgggnannccttatnnatttncaaaagggn

SEQ ID NO: 5028 - DNA, 523 bp, Zea mays
  misc_feature (3)..(3): n is a, c, g, or t
  misc_feature (6)..(6): n is a, c, g, or t
  misc_feature (18)..(18): n is a, c, g, or t
  misc_feature (29)..(30): n is a, c, g, or t
  misc_feature (34)..(38): n is a, c, g, or t
  misc_feature (41)..(41): n is a, c, g, or t
  misc_feature (43)..(43): n is a, c, g, or t
  misc_feature (47)..(50): n is a, c, g, or t
  misc_feature (58)..(59): n is a, c, g, or t
  misc_feature (66)..(66): n is a, c, g, or t
  misc_feature (69)..(69): n is a, c, g, or t
  misc_feature (71)..(71): n is a, c, g, or t
  misc_feature (75)..(79): n is a, c, g, or t
  misc_feature (85)..(85): n is a, c, g, or t
  misc_feature (87)..(87): n is a, c, g, or t
  misc_feature (91)..(91): n is a, c, g, or t
  misc_feature (95)..(96): n is a, c, g, or t
  misc_feature (103)..(103): n is a, c, g, or t
  misc_feature (132)..(132): n is a, c, g, or t
  misc_feature (151)..(151): n is a, c, g, or t
  misc_feature (155)..(155): n is a, c, g, or t
  misc_feature (189)..(189): n is a, c, g, or t
  misc_feature (210)..(210): n is a, c, g, or t
  misc_feature (218)..(218): n is a, c, g, or t
  misc_feature (244)..(244): n is a, c, g, or t
  misc_feature (246)..(246): n is a, c, g, or t
  misc_feature (314)..(314): n is a, c, g, or t
  misc_feature (340)..(340): n is a, c, g, or t
  misc_feature (384)..(384): n is a, c, g, or t
  misc_feature (396)..(396): n is a, c, g, or t
  misc_feature (409)..(409): n is a, c, g, or t
  misc_feature (436)..(436): n is a, c, g, or t
  misc_feature (453)..(453): n is a, c, g, or t
  misc_feature (476)..(476): n is a, c, g, or t
  misc_feature (485)..(485): n is a, c, g, or t
  misc_feature (488)..(488): n is a, c, g, or t
  misc_feature (503)..(503): n is a, c, g, or t
  misc_feature (506)..(507): n is a, c, g, or t
  misc_feature (512)..(512): n is a, c, g, or t
  misc_feature (514)..(514): n is a, c, g, or t
  misc_feature (521)..(522): n is a, c, g, or t
  Peptide Sequence Number=SeqID_12226
  Probeset Number=SeqID_19431
atnatngcttcacttcancactaagcagnnaggnnnnnganancagnnnntgagtagnncaagcgnctngnacgnnnnngatcgntngcanttgnnctcgctngcaggtcggctggcttcagtatgctccanctcctcgggcgccgtggtnttgncgtacctgaccgccgtgatctagccgcctccgantgtatatgccgcctgcgtatntatctgcngccgcatcagcagccgcaagcatggnantaccccactcaaccaccgcagctaagcccgtgccagcagttcggatcctgcggcgtcggcagcgtcgncagcccgttcctgggccagtgcgtcnagttcctgaggcaccagtgcagcccggcggcgacgtcctacggntcgtcacagtgncaggcgctgcagnagcagtgctgccaccagatcaggcagntggagccgctgcaccgnttacaggcgacatacggggtggncctgggagnccnttcccgaagcagcantcnnccggngngagcttnng

SEQ ID NO: 5029 - DNA, 307 bp, Zea mays
  misc_feature (223)..(228): n is a, c, g, or t
  misc_feature (231)..(235): n is a, c, g, or t
  misc_feature (250)..(270): n is a, c, g, or t
  misc_feature (275)..(279): n is a, c, g, or t
  misc_feature (283)..(297): n is a, c, g, or t
  misc_feature (301)..(305): n is a, c, g, or t
  misc_feature (307)..(307): n is a, c, g, or t
  Peptide Sequence Number=SeqID_12227
  Probeset Number=SeqID_19432
catcagctgatcaataaggacaagtcaatcgatgataggagtaccagttacaagtttcttgtgtccaatcatagatcacagcagcatgcttccggtaattccataaaagctagtgcgcagtgcgaccttcttgtgcttttgtggaattaccggaagcatgctgctgtgtccaatgattggacacaagaaacttgtaactggtactcctatcatcgattgactnnnnnntannnnntcaaaaaaaaaaaannnnnnnnnnnnnnnnnnnnnggccnnnnngagnnnnnnnnnnnnnnngtgnnnnnan

SEQ ID NO: 5030 - DNA, 307 bp, Zea mays
  misc_feature (1)..(1): n is a, c, g, or t
  misc_feature (3)..(7): n is a, c, g, or t
  misc_feature (11)..(25): n is a, c, g, or t
  misc_feature (29)..(33): n is a, c, g, or t
  misc_feature (38)..(58): n is a, c, g, or t
  misc_feature (73)..(77): n is a, c, g, or t
  misc_feature (80)..(85): n is a, c, g, or t
  Probeset Number=SeqID_19433
ntnnnnncacnnnnnnnnnnnnnnnctcnnnnnggccnnnnnnnnnnnnnnnnnnnnnttttttttttttgannnnntannnnnnagtcaatcgatgataggagtaccagttacaagtttcttgtgtccaatcattggacacagcagcatgcttccggtaattccacaaaagcacaagaaggtcgcactgcgcactagcttttatggaattaccggaagcatgctgctgtgatctatgattggacacaagaaacttgtaactggtactcctatcatcgattgacttgtccttattgatcagctgatg

SEQ ID NO: 5031 - DNA, 514 bp, Zea mays
  misc_feature (7)..(7): n is a, c, g, or t
  misc_feature (23)..(23): n is a, c, g, or t
  misc_feature (28)..(28): n is a, c, g, or t
  misc_feature (31)..(31): n is a, c, g, or t
  misc_feature (36)..(36): n is a, c, g, or t
  misc_feature (39)..(40): n is a, c, g, or t
  misc_feature (85)..(85): n is a, c, g, or t
  misc_feature (95)..(95): n is a, c, g, or t
  misc_feature (118)..(118): n is a, c, g, or t
  misc_feature (123)..(123): n is a, c, g, or t
  misc_feature (134)..(134): n is a, c, g, or t
  misc_feature (136)..(136): n is a, c, g, or t
  misc_feature (146)..(146): n is a, c, g, or t
  misc_feature (157)..(157): n is a, c, g, or t
  misc_feature (167)..(168): n is a, c, g, or t
  misc_feature (182)..(182): n is a, c, g, or t
  misc_feature (200)..(201): n is a, c, g, or t
  misc_feature (203)..(203): n is a, c, g, or t
  misc_feature (240)..(240): n is a, c, g, or t
  misc_feature (260)..(260): n is a, c, g, or t
  misc_feature (273)..(273): n is a, c, g, or t
  misc_feature (296)..(296): n is a, c, g, or t
  misc_feature (332)..(333): n is a, c, g, or t
  misc_feature (346)..(346): n is a, c, g, or t
  misc_feature (350)..(350): n is a, c, g, or t
  misc_feature (354)..(354): n is a, c, g, or t
  misc_feature (393)..(393): n is a, c, g, or t
  misc_feature (409)..(409): n is a, c, g, or t
  misc_feature (417)..(417): n is a, c, g, or t
  misc_feature (421)..(421): n is a, c, g, or t
  misc_feature (429)..(429): n is a, c, g, or t
  misc_feature (440)..(440): n is a, c, g, or t
  misc_feature (443)..(443): n is a, c, g, or t
  misc_feature (445)..(445): n is a, c, g, or t
  misc_feature (464)..(464): n is a, c, g, or t
  misc_feature (491)..(491): n is a, c, g, or t
  misc_feature (496)..(496): n is a, c, g, or t
  misc_feature (509)..(509): n is a, c, g, or t
  Peptide Sequence Number=SeqID_12228
  Probeset Number=SeqID_19434
atcgatnaccgatgtcctcctcnctccnccntttcncgnncctcggctgattctccgccgaggcgtctagctctgcctccaccancttcctgccnggctacgcccccgacttctgcgnattcntggcgctccgncngatcaaggcngccgccaccgncgtagcgaannctcccgcctctccntctccgctggaggaggannancgtcggcaggccgccgttccatgtcgacagagacganccgacagcgccatccgattnctgcgccgctgancatggacgatcgtcgtgcatggncaactttgtcacagctgatcgcgttgcgctgtgtanncggctggtagcanaacnaggntcgcggactccagaatccgactactttgcctactgcgtncagcatggaattcttnttcttcanaagngtgtacgngctgtgcgagnagnantacgtacgtgctgctcatntgtacctccatcctgtccacggatagngtcgnacgaacatccccntccac

SEQ ID NO: 5032 - DNA, 518 bp, Zea mays
  misc_feature (4)..(4): n is a, c, g, or t
  misc_feature (8)..(8): n is a, c, g, or t
  misc_feature (17)..(17): n is a, c, g, or t
  misc_feature (24)..(24): n is a, c, g, or t
  misc_feature (41)..(41): n is a, c, g, or t
  misc_feature (44)..(46): n is a, c, g, or t
  misc_feature (50)..(53): n is a, c, g, or t
  misc_feature (58)..(58): n is a, c, g, or t
  misc_feature (70)..(70): n is a, c, g, or t
  misc_feature (81)..(81): n is a, c, g, or t
  misc_feature (84)..(85): n is a, c, g, or t
  misc_feature (94)..(95): n is a, c, g, or t
  misc_feature (100)..(101): n is a, c, g, or t
  misc_feature (108)..(109): n is a, c, g, or t
  misc_feature (118)..(118): n is a, c, g, or t
  misc_feature (124)..(124): n is a, c, g, or t
  misc_feature (130)..(130): n is a, c, g, or t
  misc_feature (139)..(139): n is a, c, g, or t
  misc_feature (154)..(154): n is a, c, g, or t
  misc_feature (157)..(157): n is a, c, g, or t
  misc_feature (179)..(179): n is a, c, g, or t
  misc_feature (188)..(188): n is a, c, g, or t
  misc_feature (194)..(194): n is a, c, g, or t
  misc_feature (201)..(202): n is a, c, g, or t
  misc_feature (208)..(208): n is a, c, g, or t
  misc_feature (217)..(217): n is a, c, g, or t
  misc_feature (271)..(271): n is a, c, g, or t
  misc_feature (313)..(313): n is a, c, g, or t
  misc_feature (319)..(319): n is a, c, g, or t
  misc_feature (349)..(349): n is a, c, g, or t
  misc_feature (355)..(355): n is a, c, g, or t
  misc_feature (364)..(364): n is a, c, g, or t
  misc_feature (371)..(371): n is a, c, g, or t
  misc_feature (381)..(381): n is a, c, g, or t
  misc_feature (395)..(395): n is a, c, g, or t
  misc_feature (406)..(407): n is a, c, g, or t
  misc_feature (413)..(413): n is a, c, g, or t
  misc_feature (416)..(416): n is a, c, g, or t
  misc_feature (428)..(428): n is a, c, g, or t
  misc_feature (475)..(475): n is a, c, g, or t
  misc_feature (488)..(488): n is a, c, g, or t
  misc_feature (497)..(497): n is a, c, g, or t
  misc_feature (505)..(505): n is a, c, g, or t
  misc_feature (510)..(510): n is a, c, g, or t
  misc_feature (516)..(516): n is a, c, g, or t
  Probeset Number=SeqID_19435
atanattnccactctcntgtctcnaggtgcctttttttttntcnnngtgnnnngggcntaatacgatacntggatgtgaanggnntacgagctnntcacnncaaggcnnggcggccgngcaagnccgctntcccaactnaaaatgcgatcgtcncgncccatccaggtccggggactgnagttccacntgcagncgcgtcnncggggnacctcaaanagggccgctacgcgcagctgtgtaggcacgggtgaccccgtctacctcgtgcgncgtcctggagtacctcgcgggcgaggtgctcgagctcgccgntcaacncgttaagggacaacaagaagacgcgcatcntcccgngccacgtgntcctcgncatccgcaangacgaggagctcgngaagctgctgnncgacgncantatcggccacgnagtggtcctccccaacatccacactgtgctcctccccaagaatgtgncctgagaaggcgngcaaggagnccaagaangtcgntaaggncc

SEQ ID NO: 5033 - DNA, 517 bp, Zea mays
  misc_feature (6)..(6): n is a, c, g, or t
  misc_feature (13)..(13): n is a, c, g, or t
  misc_feature (34)..(34): n is a, c, g, or t
  misc_feature (49)..(49): n is a, c, g, or t
  misc_feature (59)..(59): n is a, c, g, or t
  misc_feature (61)..(65): n is a, c, g, or t
  misc_feature (84)..(84): n is a, c, g, or t
  misc_feature (92)..(93): n is a, c, g, or t
  misc_feature (96)..(96): n is a, c, g, or t
  misc_feature (98)..(98): n is a, c, g, or t
  misc_feature (102)..(103): n is a, c, g, or t
  misc_feature (108)..(109): n is a, c, g, or t
  misc_feature (112)..(113): n is a, c, g, or t
  misc_feature (115)..(115): n is a, c, g, or t
  misc_feature (121)..(121): n is a, c, g, or t
  misc_feature (127)..(129): n is a, c, g, or t
  misc_feature (131)..(131): n is a, c, g, or t
  misc_feature (133)..(134): n is a, c, g, or t
  misc_feature (136)..(136): n is a, c, g, or t
  misc_feature (139)..(139): n is a, c, g, or t
  misc_feature (141)..(141): n is a, c, g, or t
  misc_feature (144)..(144): n is a, c, g, or t
  misc_feature (147)..(147): n is a, c, g, or t
  misc_feature (151)..(152): n is a, c, g, or t
  misc_feature (156)..(156): n is a, c, g, or t
  misc_feature (160)..(160): n is a, c, g, or t
  misc_feature (167)..(167): n is a, c, g, or t
  misc_feature (204)..(204): n is a, c, g, or t
  misc_feature (214)..(214): n is a, c, g, or t
  misc_feature (228)..(228): n is a, c, g, or t
  misc_feature (263)..(263): n is a, c, g, or t
  misc_feature (275)..(275): n is a, c, g, or t
  misc_feature (278)..(278): n is a, c, g, or t
  misc_feature (282)..(282): n is a, c, g, or t
  misc_feature (293)..(293): n is a, c, g, or t
  misc_feature (301)..(301): n is a, c, g, or t
  misc_feature (311)..(311): n is a, c, g, or t
  misc_feature (314)..(315): n is a, c, g, or t
  misc_feature (331)..(331): n is a, c, g, or t
  misc_feature (334)..(334): n is a, c, g, or t
  misc_feature (366)..(366): n is a, c, g, or t
  misc_feature (377)..(377): n is a, c, g, or t
  misc_feature (410)..(410): n is a, c, g, or t
  misc_feature (433)..(434): n is a, c, g, or t
  misc_feature (442)..(442): n is a, c, g, or t
  misc_feature (495)..(495): n is a, c, g, or t
  Peptide Sequence Number=SeqID_12229
  Probeset Number=SeqID_19436
attctngcgatangttgatatcaactgcgagccntattagaggtactgngctagagatntnnnnnggtacctctgtcaggcttngaggtttnnccncnttgnncgccnngcnntntcaggntgcggnnntngnncntcnancantcnacanngctnacgncatgacntctctccggtgacagcgcgcgaagatttgaatacccnactataccancctaccggctactngaggccttcgcagcaagcatcttacggtcggtagnattgaccgtccnacnaccntatgccctatngcagcaancatccttaangannctatatctccgaagantcncagcacaacaactacgacaacagttgcttccnacaatcgatcntgtagttgcagcgaaacttgctgcttacctccngcaacaacaatttcttccattcnntcaactanctggggttgaaccctgctgcttacttgcaggcacaacaggttactaccattcnaccaacttgtcaggagcccctg

SEQ ID NO: 5034 - DNA, 576 bp, Zea mays
  misc_feature (16)..(16): n is a, c, g, or t
  misc_feature (91)..(91): n is a, c, g, or t
  misc_feature (158)..(158): n is a, c, g, or t
  misc_feature (206)..(206): n is a, c, g, or t
  misc_feature (209)..(209): n is a, c, g, or t
  misc_feature (228)..(228): n is a, c, g, or t
  misc_feature (243)..(243): n is a, c, g, or t
  misc_feature (249)..(249): n is a, c, g, or t
  misc_feature (255)..(255): n is a, c, g, or t
  misc_feature (261)..(261): n is a, c, g, or t
  misc_feature (265)..(265): n is a, c, g, or t
  misc_feature (274)..(274): n is a, c, g, or t
  misc_feature (279)..(279): n is a, c, g, or t
  misc_feature (286)..(286): n is a, c, g, or t
  misc_feature (297)..(298): n is a, c, g, or t
  misc_feature (302)..(302): n is a, c, g, or t
  misc_feature (305)..(305): n is a, c, g, or t
  misc_feature (312)..(312): n is a, c, g, or t
  misc_feature (316)..(316): n is a, c, g, or t
  misc_feature (339)..(339): n is a, c, g, or t
  misc_feature (341)..(341): n is a, c, g, or t
  misc_feature (362)..(363): n is a, c, g, or t
  misc_feature (370)..(372): n is a, c, g, or t
  misc_feature (374)..(374): n is a, c, g, or t
  misc_feature (384)..(386): n is a, c, g, or t
  misc_feature (422)..(422): n is a, c, g, or t
  misc_feature (431)..(462): n is a, c, g, or t
  misc_feature (467)..(469): n is a, c, g, or t
  misc_feature (477)..(477): n is a, c, g, or t
  misc_feature (488)..(488): n is a, c, g, or t
  misc_feature (500)..(500): n is a, c, g, or t
  misc_feature (505)..(505): n is a, c, g, or t
  misc_feature (507)..(507): n is a, c, g, or t
  misc_feature (524)..(524): n is a, c, g, or t
  misc_feature (528)..(528): n is a, c, g, or t
  misc_feature (530)..(530): n is a, c, g, or t
  misc_feature (534)..(534): n is a, c, g, or t
  misc_feature (539)..(539): n is a, c, g, or t
  misc_feature (543)..(543): n is a, c, g, or t
  misc_feature (551)..(551): n is a, c, g, or t
  misc_feature (557)..(557): n is a, c, g, or t
  misc_feature (562)..(562): n is a, c, g, or t
  misc_feature (564)..(564): n is a, c, g, or t
  misc_feature (573)..(573): n is a, c, g, or t
  Peptide Sequence Number=SeqID_12230
  Probeset Number=SeqID_19437
atcacctaataaatanttttgagcatttcagaaaacacaccaagcgaagcacatttaagcaacaacctaaacaacaatgggctaccaaganatttaatcccctccttggcgctttcttggcgcttttttggcgagcgcaacaaatggcggttcattanttccacaatggctcacttgctcccaggttccattaattaacccaggtnccncccaccagttactttcaanggggctttcaaaaancccggntggggnaggccnattnggctacaanaaagnaattggnggggagggggnnttanaanaacccantttncccggttgggaaaaaaaaatccntnggggaattttaataaacttgnngaggaannntncatggccccnnnggacccgcctttaaaagtttaaacctttggaaaagnaaaccaaannnnnnnnnnnnnnnnnnnnnnnnnnnnnnnnttttnnntttaaacnaaatggagtgngggaaaaggggngcggnanaaaagttttccgggggncccncnaaanggaancccnttgggggncctttntttcntnattttttgnaaa

SEQ ID NO: 5035 - DNA, 505 bp, Zea mays
  misc_feature (2)..(3): n is a, c, g, or t
  misc_feature (7)..(7): n is a, c, g, or t
  misc_feature (14)..(14): n is a, c, g, or t
  misc_feature (24)..(24): n is a, c, g, or t
  misc_feature (31)..(31): n is a, c, g, or t
  misc_feature (33)..(33): n is a, c, g, or t
  misc_feature (52)..(52): n is a, c, g, or t
  misc_feature (67)..(67): n is a, c, g, or t
  misc_feature (70)..(71): n is a, c, g, or t
  misc_feature (109)..(109): n is a, c, g, or t
  misc_feature (127)..(127): n is a, c, g, or t
  misc_feature (145)..(145): n is a, c, g, or t
  misc_feature (158)..(158): n is a, c, g, or t
  misc_feature (161)..(161): n is a, c, g, or t
  misc_feature (184)..(184): n is a, c, g, or t
  misc_feature (197)..(197): n is a, c, g, or t
  misc_feature (247)..(247): n is a, c, g, or t
  misc_feature (264)..(265): n is a, c, g, or t
  misc_feature (267)..(267): n is a, c, g, or t
  misc_feature (368)..(368): n is a, c, g, or t
  misc_feature (380)..(380): n is a, c, g, or t
  misc_feature (386)..(386): n is a, c, g, or t
  misc_feature (389)..(389): n is a, c, g, or t
  misc_feature (415)..(415): n is a, c, g, or t
  misc_feature (417)..(417): n is a, c, g, or t
  misc_feature (420)..(420): n is a, c, g, or t
  misc_feature (445)..(445): n is a, c, g, or t
  misc_feature (460)..(460): n is a, c, g, or t
  misc_feature (472)..(472): n is a, c, g, or t
  misc_feature (483)..(483): n is a, c, g, or t
  misc_feature (494)..(494): n is a, c, g, or t
  misc_feature (498)..(498): n is a, c, g, or t
  misc_feature (500)..(501): n is a, c, g, or t
  misc_feature (504)..(504): n is a, c, g, or t
  Probeset Number=SeqID_19438
annaacncaagtanggttaggaantcggcgntncagcggtagagagcgcganaggtacagcaggagnagnngtcggccatgacggggcaaggcgtaagccgaacaagcncacgtccgaaggagatcnccgcgaagatcgacgcgncgacgacgaaccnggncggcgaggaaggccgaggcaggngacaccgcgctgnccgcaggacaagggcggccatgcgaagctggcgtgcccgctctgccgcancccggcgcccgacatcnngnccatgcagatccaccacgaggcgcgccaccccaagctccccttcgagccggaagaagctcctcaacctgcactcctccgcccccgctgctggcgccgccgncgacgctgccgncgtcgntgncgaggacaccacctccaagtccctancncgncgtccgcggcagcctcaagaagtangcttgctgggcttgnttggctcgcccnactgcatgtcncgaaattcccntcgntnncant

SEQ ID NO: 5036 - DNA, 521 bp, Zea mays
  misc_feature (2)..(2): n is a, c, g, or t
  misc_feature (14)..(14): n is a, c, g, or t
  misc_feature (102)..(102): n is a, c, g, or t
  misc_feature (108)..(108): n is a, c, g, or t
  misc_feature (161)..(161): n is a, c, g, or t
  misc_feature (186)..(186): n is a, c, g, or t
  misc_feature (189)..(189): n is a, c, g, or t
  misc_feature (194)..(194): n is a, c, g, or t
  misc_feature (200)..(201): n is a, c, g, or t
  misc_feature (205)..(206): n is a, c, g, or t
  misc_feature (208)..(208): n is a, c, g, or t
  misc_feature (210)..(212): n is a, c, g, or t
  misc_feature (214)..(214): n is a, c, g, or t
  misc_feature (219)..(219): n is a, c, g, or t
  misc_feature (224)..(225): n is a, c, g, or t
  misc_feature (228)..(228): n is a, c, g, or t
  misc_feature (231)..(231): n is a, c, g, or t
  misc_feature (234)..(234): n is a, c, g, or t
  misc_feature (239)..(239): n is a, c, g, or t
  misc_feature (242)..(242): n is a, c, g, or t
  misc_feature (245)..(245): n is a, c, g, or t
  misc_feature (253)..(253): n is a, c, g, or t
  misc_feature (257)..(257): n is a, c, g, or t
  misc_feature (261)..(261): n is a, c, g, or t
  misc_feature (264)..(264): n is a, c, g, or t
  misc_feature (278)..(278): n is a, c, g, or t
  misc_feature (280)..(280): n is a, c, g, or t
  misc_feature (289)..(289): n is a, c, g, or t
  misc_feature (311)..(311): n is a, c, g, or t
  misc_feature (313)..(314): n is a, c, g, or t
  misc_feature (316)..(316): n is a, c, g, or t
  misc_feature (323)..(323): n is a, c, g, or t
  misc_feature (325)..(325): n is a, c, g, or t
  misc_feature (327)..(327): n is a, c, g, or t
  misc_feature (332)..(332): n is a, c, g, or t
  misc_feature (334)..(334): n is a, c, g, or t
  misc_feature (338)..(338): n is a, c, g, or t
  misc_feature (342)..(342): n is a, c, g, or t
  misc_feature (346)..(346): n is a, c, g, or t
  misc_feature (348)..(348): n is a, c, g, or t
  misc_feature (358)..(358): n is a, c, g, or t
  misc_feature (367)..(367): n is a, c, g, or t
  misc_feature (369)..(369): n is a, c, g, or t
  misc_feature (372)..(372): n is a, c, g, or t
  misc_feature (374)..(374): n is a, c, g, or t
  misc_feature (376)..(376): n is a, c, g, or t
  misc_feature (381)..(381): n is a, c, g, or t
  misc_feature (388)..(391): n is a, c, g, or t
  misc_feature (401)..(401): n is a, c, g, or t
  misc_feature (404)..(404): n is a, c, g, or t
  misc_feature (406)..(408): n is a, c, g, or t
  misc_feature (420)..(420): n is a, c, g, or t
  misc_feature (423)..(423): n is a, c, g, or t
  misc_feature (426)..(426): n is a, c, g, or t
  misc_feature (428)..(428): n is a, c, g, or t
  misc_feature (439)..(439): n is a, c, g, or t
  misc_feature (442)..(442): n is a, c, g, or t
  misc_feature (451)..(454): n is a, c, g, or t
  misc_feature (456)..(457): n is a, c, g, or t
  misc_feature (461)..(461): n is a, c, g, or t
  misc_feature (464)..(464): n is a, c, g, or t
  misc_feature (468)..(468): n is a, c, g, or t
  misc_feature (471)..(471): n is a, c, g, or t
  misc_feature (473)..(473): n is a, c, g, or t
  misc_feature (482)..(484): n is a, c, g, or t
  misc_feature (488)..(488): n is a, c, g, or t
  misc_feature (494)..(494): n is a, c, g, or t
  misc_feature (507)..(507): n is a, c, g, or t
  misc_feature (513)..(513): n is a, c, g, or t
  misc_feature (519)..(519): n is a, c, g, or t
  Peptide Sequence Number=SeqID_12231
  Probeset Number=SeqID_19439
gncgccgtcttcanaaaaaactattagctttacgcctccatcgagatctccaccaactagaatgaaggttgtcgccgcctagttgctcgccgctttgagcgnaaaagnttccccaaccagtgccgatatcaaacaaatcctcggatctgttggttgtgaanctgaagactctcagattgagctttngcngaagnaagtcnncgcnnangnnntncgcgnccctnnctnccnctnccccnccnctncccccccncccncctnctnttttctcccccccncnccccccccnccccctctttttttcccccctntnntnctttttncntnccttntntccncctncccncnacctcccctnttctctatncnctngncnctccntccctcnnnncgctctcctnccncnnntccccgctcttnttntcncnctcccccgtcnacncccctttcnnnntnnctcnctncccnccntncactacccnnncccncctccncctccctctcccnaatttncccccnct

SEQ ID NO: 5037 - DNA, 521 bp, Zea mays
  misc_feature (4)..(4): n is a, c, g, or t
  misc_feature (20)..(20): n is a, c, g, or t
  misc_feature (34)..(34): n is a, c, g, or t
  misc_feature (37)..(37): n is a, c, g, or t
  misc_feature (46)..(47): n is a, c, g, or t
  misc_feature (60)..(60): n is a, c, g, or t
  misc_feature (64)..(65): n is a, c, g, or t
  misc_feature (74)..(74): n is a, c, g, or t
  misc_feature (76)..(76): n is a, c, g, or t
  misc_feature (97)..(97): n is a, c, g, or t
  misc_feature (106)..(106): n is a, c, g, or t
  misc_feature (109)..(109): n is a, c, g, or t
  misc_feature (122)..(122): n is a, c, g, or t
  misc_feature (208)..(209): n is a, c, g, or t
  misc_feature (221)..(221): n is a, c, g, or t
  misc_feature (223)..(223): n is a, c, g, or t
  misc_feature (229)..(229): n is a, c, g, or t
  misc_feature (235)..(236): n is a, c, g, or t
  misc_feature (243)..(243): n is a, c, g, or t
  misc_feature (249)..(249): n is a, c, g, or t
  misc_feature (252)..(252): n is a, c, g, or t
  misc_feature (257)..(257): n is a, c, g, or t
  misc_feature (259)..(259): n is a, c, g, or t
  misc_feature (262)..(263): n is a, c, g, or t
  misc_feature (265)..(265): n is a, c, g, or t
  misc_feature (267)..(269): n is a, c, g, or t
  misc_feature (274)..(274): n is a, c, g, or t
  misc_feature (276)..(277): n is a, c, g, or t
  misc_feature (283)..(283): n is a, c, g, or t
  misc_feature (291)..(293): n is a, c, g, or t
  misc_feature (298)..(298): n is a, c, g, or t
  misc_feature (305)..(305): n is a, c, g, or t
  misc_feature (310)..(310): n is a, c, g, or t
  misc_feature (312)..(312): n is a, c, g, or t
  misc_feature (314)..(316): n is a, c, g, or t
  misc_feature (319)..(319): n is a, c, g, or t
  misc_feature (327)..(327): n is a, c, g, or t
  misc_feature (333)..(333): n is a, c, g, or t
  misc_feature (335)..(336): n is a, c, g, or t
  misc_feature (341)..(341): n is a, c, g, or t
  misc_feature (343)..(344): n is a, c, g, or t
  misc_feature (347)..(347): n is a, c, g, or t
  misc_feature (350)..(350): n is a, c, g, or t
  misc_feature (357)..(357): n is a, c, g, or t
  misc_feature (359)..(359): n is a, c, g, or t
  misc_feature (361)..(363): n is a, c, g, or t
  misc_feature (368)..(368): n is a, c, g, or t
  misc_feature (370)..(370): n is a, c, g, or t
  misc_feature (376)..(377): n is a, c, g, or t
  misc_feature (380)..(380): n is a, c, g, or t
  misc_feature (383)..(383): n is a, c, g, or t
  misc_feature (386)..(386): n is a, c, g, or t
  misc_feature (388)..(389): n is a, c, g, or t
  misc_feature (391)..(391): n is a, c, g, or t
  misc_feature (394)..(395): n is a, c, g, or t
  misc_feature (400)..(400): n is a, c, g, or t
  misc_feature (403)..(403): n is a, c, g, or t
  misc_feature (406)..(406): n is a, c, g, or t
  misc_feature (408)..(410): n is a, c, g, or t
  misc_feature (412)..(412): n is a, c, g, or t
  misc_feature (416)..(416): n is a, c, g, or t
  misc_feature (418)..(418): n is a, c, g, or t
  misc_feature (422)..(423): n is a, c, g, or t
  misc_feature (425)..(426): n is a, c, g, or t
  misc_feature (432)..(432): n is a, c, g, or t
  misc_feature (436)..(436): n is a, c, g, or t
  misc_feature (440)..(440): n is a, c, g, or t
  misc_feature (448)..(449): n is a, c, g, or t
  misc_feature (454)..(455): n is a, c, g, or t
  misc_feature (457)..(459): n is a, c, g, or t
  misc_feature (463)..(463): n is a, c, g, or t
  misc_feature (466)..(467): n is a, c, g, or t
  misc_feature (469)..(470): n is a, c, g, or t
  misc_feature (474)..(475): n is a, c, g, or t
  misc_feature (479)..(479): n is a, c, g, or t
  misc_feature (488)..(490): n is a, c, g, or t
  misc_feature (493)..(493): n is a, c, g, or t
  misc_feature (516)..(516): n is a, c, g, or t
  misc_feature (520)..(520): n is a, c, g, or t
  Probeset Number=SeqID_19440
gtcncattcattcttcaaanttactccttcattntanaccaaaacnnaaccaaaaagaanacannatataaaancntaaacaacataaaacaatggnaagagttcngtnattattattatgnttcaccattctctttgtatcagtgacctttatggaacatgtttcaagtgtcaccaccgtcaccaccacctctagcacaacagtggnngaactggaggcngngacatncaaggnngtcatgnagctcntantgccncnccnncncnnntgacngnntttagnttgtattnnnccgcntatctcncgtcntnannnatntctccctntcccananncgttntnntgnagnctctctncntnnncgcgngncctctnnttnctnccntnntnccnntcagnttntcncnnngnctcngncgcnntnngatccntctnattntaagttcnnctacnnannnctcngcnnannaatnngttnctctcaccnnntcnctccccttgcccttcctcctccntcant

SEQ ID NO: 5038 - DNA, 489 bp, Zea mays
  Peptide Sequence Number=SeqID_12232
  Probeset Number=SeqID_19441
agagtgaatatcctctagtctttataatctgtgcttcttcttctacagaagccctagccgcaggagggaaaggttcgagagatcgcgaaaatgacgaccagattcaagaagaacaggaagaagcgtggccacgtcagcgccggacacgggcgtgtcggaaagcaccgaaagcatcccggaggtcgtggtaacgcaggaggtatgcaccaccacaggatcctcttcgacaagtaccatcccggttacttcggcaaagtcggtatgcggtacttccacaagcttcgcaacaagttcttctgcccgatcgtcaacctcgacaggctttggtcgttggtccctgaggatgtgaaggcgaaggctacgaaggataaggttccgttgatcgacgtgacgcagcacgggttctttaaggtgttggggaaaggtcatttgcctgagaacaagccttttgtggtgaaggccaagcttatctcgaagactgctgagaag

SEQ ID NO: 5039 - DNA, 537 bp, Zea mays
  misc_feature (9)..(9): n is a, c, g, or t
  misc_feature (12)..(12): n is a, c, g, or t
  misc_feature (15)..(17): n is a, c, g, or t
  misc_feature (27)..(27): n is a, c, g, or t
  misc_feature (31)..(31): n is a, c, g, or t
  misc_feature (37)..(37): n is a, c, g, or t
  misc_feature (46)..(46): n is a, c, g, or t
  misc_feature (58)..(58): n is a, c, g, or t
  misc_feature (62)..(62): n is a, c, g, or t
  misc_feature (136)..(136): n is a, c, g, or t
  misc_feature (140)..(141): n is a, c, g, or t
  misc_feature (143)..(143): n is a, c, g, or t
  misc_feature (149)..(150): n is a, c, g, or t
  misc_feature (152)..(152): n is a, c, g, or t
  misc_feature (154)..(156): n is a, c, g, or t
  misc_feature (159)..(160): n is a, c, g, or t
  misc_feature (165)..(165): n is a, c, g, or t
  misc_feature (168)..(168): n is a, c, g, or t
  misc_feature (171)..(171): n is a, c, g, or t
  misc_feature (173)..(173): n is a, c, g, or t
  misc_feature (175)..(175): n is a, c, g, or t
  misc_feature (177)..(177): n is a, c, g, or t
  misc_feature (181)..(182): n is a, c, g, or t
  misc_feature (186)..(186): n is a, c, g, or t
  misc_feature (197)..(197): n is a, c, g, or t
  misc_feature (202)..(202): n is a, c, g, or t
  misc_feature (210)..(212): n is a, c, g, or t
  misc_feature (215)..(215): n is a, c, g, or t
  misc_feature (219)..(219): n is a, c, g, or t
  misc_feature (221)..(223): n is a, c, g, or t
  misc_feature (225)..(225): n is a, c, g, or t
  misc_feature (229)..(230): n is a, c, g, or t
  misc_feature (233)..(236): n is a, c, g, or t
  misc_feature (238)..(238): n is a, c, g, or t
  misc_feature (240)..(240): n is a, c, g, or t
  misc_feature (242)..(245): n is a, c, g, or t
  misc_feature (249)..(249): n is a, c, g, or t
  misc_feature (252)..(252): n is a, c, g, or t
  misc_feature (255)..(255): n is a, c, g, or t
  misc_feature (257)..(257): n is a, c, g, or t
  misc_feature (264)..(265): n is a, c, g, or t
  misc_feature (270)..(270): n is a, c, g, or t
  misc_feature (279)..(279): n is a, c, g, or t
  misc_feature (282)..(284): n is a, c, g, or t
  misc_feature (303)..(303): n is a, c, g, or t
  misc_feature (306)..(306): n is a, c, g, or t
  misc_feature (308)..(309): n is a, c, g, or t
  misc_feature (311)..(311): n is a, c, g, or t
  misc_feature (316)..(316): n is a, c, g, or t
  misc_feature (319)..(319): n is a, c, g, or t
  misc_feature (331)..(331): n is a, c, g, or t
  misc_feature (333)..(333): n is a, c, g, or t
  misc_feature (335)..(335): n is a, c, g, or t
  misc_feature (337)..(337): n is a, c, g, or t
  misc_feature (339)..(339): n is a, c, g, or t
  misc_feature (343)..(343): n is a, c, g, or t
  misc_feature (349)..(350): n is a, c, g, or t
  misc_feature (352)..(352): n is a, c, g, or t
  misc_feature (358)..(358): n is a, c, g, or t
  misc_feature (362)..(362): n is a, c, g, or t
  misc_feature (366)..(366): n is a, c, g, or t
  misc_feature (373)..(376): n is a, c, g, or t
  misc_feature (378)..(378): n is a, c, g, or t
  misc_feature (385)..(385): n is a, c, g, or t
  misc_feature (389)..(389): n is a, c, g, or t
  misc_feature (391)..(392): n is a, c, g, or t
  misc_feature (394)..(394): n is a, c, g, or t
  misc_feature (396)..(396): n is a, c, g, or t
  misc_feature (398)..(398): n is a, c, g, or t
  misc_feature (400)..(401): n is a, c, g, or t
  misc_feature (403)..(403): n is a, c, g, or t
  misc_feature (405)..(405): n is a, c, g, or t
  misc_feature (409)..(410): n is a, c, g, or t
  misc_feature (414)..(414): n is a, c, g, or t
  misc_feature (419)..(419): n is a, c, g, or t
  misc_feature (426)..(426): n is a, c, g, or t
  misc_feature (428)..(428): n is a, c, g, or t
  misc_feature (430)..(430): n is a, c, g, or t
  misc_feature (432)..(433): n is a, c, g, or t
  misc_feature (444)..(445): n is a, c, g, or t
  misc_feature (447)..(449): n is a, c, g, or t
  misc_feature (451)..(452): n is a, c, g, or t
  misc_feature (455)..(458): n is a, c, g, or t
  misc_feature (461)..(462): n is a, c, g, or t
  misc_feature (467)..(468): n is a, c, g, or t
  misc_feature (475)..(475): n is a, c, g, or t
  misc_feature (481)..(481): n is a, c, g, or t
  misc_feature (483)..(485): n is a, c, g, or t
  misc_feature (488)..(489): n is a, c, g, or t
  misc_feature (493)..(495): n is a, c, g, or t
  misc_feature (502)..(503): n is a, c, g, or t
  misc_feature (505)..(506): n is a, c, g, or t
  misc_feature (508)..(508): n is a, c, g, or t
  misc_feature (510)..(510): n is a, c, g, or t
  misc_feature (516)..(516): n is a, c, g, or t
  misc_feature (519)..(519): n is a, c, g, or t
  misc_feature (521)..(521): n is a, c, g, or t
  misc_feature (523)..(523): n is a, c, g, or t
  misc_feature (529)..(530): n is a, c, g, or t
  misc_feature (533)..(533): n is a, c, g, or t
  misc_feature (537)..(537): n is a, c, g, or t
  Peptide Sequence Number=SeqID_12233
  Probeset Number=SeqID_19442
accgatcanaanatnnntcgcggagantcantcacgnagggatacncacggtccacgncgcngcaggatagcatggctagccagagcatattcgcgcctgctgtaggctccttgttgcttgccggcaggtgtggantatnngntgaacnntntnnnctnncagtngtntantntncntcgnncccnctgcgttaccntggtngccccccnnnctntgtntnnngntccnncgnnnngngncnnnngcgnctnttncngttcccnncgctnagtgtttcnttnnngggccccttattttttttnttntnntnccccnccncgcctttttttntncntntncttntccccnntntttttngccngcgncgtgtannnncnccccccncgcncnngngntncnncncnattnntccntcccnccccccntngntnnctccccccttnntnnntnnttnnnnccnntgatnngcccttngttgcncnnngtnncccnnnccctttnncnntntngtttcnttntntncccccnnttntccn

SEQ ID NO: 5040 - DNA, 520 bp, Zea mays
  misc_feature (221)..(222): n is a, c, g, or t
  misc_feature (224)..(224): n is a, c, g, or t
  misc_feature (229)..(229): n is a, c, g, or t
  misc_feature (235)..(236): n is a, c, g, or t
  misc_feature (239)..(239): n is a, c, g, or t
  misc_feature (246)..(246): n is a, c, g, or t
  misc_feature (253)..(253): n is a, c, g, or t
  misc_feature (261)..(262): n is a, c, g, or t
  misc_feature (265)..(265): n is a, c, g, or t
  misc_feature (277)..(278): n is a, c, g, or t
  misc_feature (291)..(291): n is a, c, g, or t
  misc_feature (293)..(294): n is a, c, g, or t
  misc_feature (296)..(296): n is a, c, g, or t
  misc_feature (298)..(308): n is a, c, g, or t
  misc_feature (310)..(316): n is a, c, g, or t
  misc_feature (319)..(320): n is a, c, g, or t
  misc_feature (322)..(323): n is a, c, g, or t
  misc_feature (327)..(331): n is a, c, g, or t
  misc_feature (336)..(337): n is a, c, g, or t
  misc_feature (339)..(339): n is a, c, g, or t
  misc_feature (342)..(344): n is a, c, g, or t
  misc_feature (347)..(347): n is a, c, g, or t
  misc_feature (352)..(352): n is a, c, g, or t
  misc_feature (354)..(356): n is a, c, g, or t
  misc_feature (359)..(360): n is a, c, g, or t
  misc_feature (374)..(376): n is a, c, g, or t
  misc_feature (378)..(381): n is a, c, g, or t
  misc_feature (383)..(387): n is a, c, g, or t
  misc_feature (389)..(390): n is a, c, g, or t
  misc_feature (392)..(392): n is a, c, g, or t
  misc_feature (394)..(400): n is a, c, g, or t
  misc_feature (405)..(408): n is a, c, g, or t
  misc_feature (412)..(412): n is a, c, g, or t
  misc_feature (415)..(415): n is a, c, g, or t
  misc_feature (417)..(417): n is a, c, g, or t
  misc_feature (421)..(423): n is a, c, g, or t
  misc_feature (426)..(426): n is a, c, g, or t
  misc_feature (429)..(432): n is a, c, g, or t
  misc_feature (435)..(436): n is a, c, g, or t
  misc_feature (439)..(439): n is a, c, g, or t
  misc_feature (441)..(441): n is a, c, g, or t
  misc_feature (447)..(447): n is a, c, g, or t
  misc_feature (451)..(453): n is a, c, g, or t
  misc_feature (455)..(457): n is a, c, g, or t
  misc_feature (461)..(461): n is a, c, g, or t
  misc_feature (463)..(463): n is a, c, g, or t
  misc_feature (465)..(465): n is a, c, g, or t
  misc_feature (467)..(467): n is a, c, g, or t
  misc_feature (471)..(471): n is a, c, g, or t
  misc_feature (473)..(473): n is a, c, g, or t
  misc_feature (475)..(476): n is a, c, g, or t
  misc_feature (478)..(485): n is a, c, g, or t
  misc_feature (488)..(489): n is a, c, g, or t
  misc_feature (492)..(494): n is a, c, g, or t
  misc_feature (497)..(497): n is a, c, g, or t
  misc_feature (499)..(499): n is a, c, g, or t
  misc_feature (501)..(501): n is a, c, g, or t
  misc_feature (503)..(503): n is a, c, g, or t
  misc_feature (505)..(505): n is a, c, g, or t
  misc_feature (507)..(510): n is a, c, g, or t
  misc_feature (512)..(513): n is a, c, g, or t
  misc_feature (516)..(516): n is a, c, g, or t
  misc_feature (520)..(520): n is a, c, g, or t
  Probeset Number=SeqID_19443
gagggacagttgaggctatccacggtgcggagcgtttggcagtggcgcgcccacaccagcgagaaattgccattgatatggcggaggtctcccccgtccgagctcgacaccccacttcccactctcagacgacgctccggcacgcacccaagagacggaatgccagtgaggatgcgaattcgtggtgttctccgcgcctccctgattttgcccctcactcnnanattcntgcgcnntcnacgcccntccccgncaaacccnntcntttttttttccnnccccccccccccncnncntnnnnnnnnnnncnnnnnnnccnncnncccnnnnncccgnngnggnnnggnacccntnnnccnnggggggggggggtnnncnnnntnnnnncnncncnnnnnnnccccnnnntccnccncnaccnnnccnccnnnnccnnccncncccccncccnnncnnncatntncncntccncncnntnnnnnnnnctnnctnnnccncncncncngnnnntnnggngggn

SEQ ID NO: 5041 - DNA, 457 bp, Zea mays
  misc_feature (3)..(3): n is a, c, g, or t
  misc_feature (5)..(5): n is a, c, g, or t
  misc_feature (7)..(7): n is a, c, g, or t
  misc_feature (11)..(11): n is a, c, g, or t
  misc_feature (13)..(13): n is a, c, g, or t
  misc_feature (17)..(18): n is a, c, g, or t
  misc_feature (22)..(23): n is a, c, g, or t
  misc_feature (25)..(26): n is a, c, g, or t
  misc_feature (38)..(38): n is a, c, g, or t
  misc_feature (41)..(41): n is a, c, g, or t
  misc_feature (43)..(43): n is a, c, g, or t
  misc_feature (45)..(46): n is a, c, g, or t
  misc_feature (59)..(59): n is a, c, g, or t
  misc_feature (61)..(61): n is a, c, g, or t
  misc_feature (72)..(73): n is a, c, g, or t
  misc_feature (76)..(76): n is a, c, g, or t
  misc_feature (78)..(78): n is a, c, g, or t
  misc_feature (88)..(88): n is a, c, g, or t
  misc_feature (92)..(92): n is a, c, g, or t
  misc_feature (96)..(97): n is a, c, g, or t
  misc_feature (102)..(102): n is a, c, g, or t
  misc_feature (106)..(106): n is a, c, g, or t
  misc_feature (110)..(110): n is a, c, g, or t
  misc_feature (112)..(112): n is a, c, g, or t
  misc_feature (115)..(115): n is a, c, g, or t
  misc_feature (122)..(122): n is a, c, g, or t
  misc_feature (124)..(125): n is a, c, g, or t
  misc_feature (128)..(128): n is a, c, g, or t
  misc_feature (142)..(142): n is a, c, g, or t
  misc_feature (148)..(148): n is a, c, g, or t
  misc_feature (154)..(154): n is a, c, g, or t
  misc_feature (158)..(158): n is a, c, g, or t
  misc_feature (163)..(163): n is a, c, g, or t
  misc_feature (167)..(167): n is a, c, g, or t
  misc_feature (174)..(174): n is a, c, g, or t
  misc_feature (177)..(177): n is a, c, g, or t
  misc_feature (179)..(179): n is a, c, g, or t
  misc_feature (182)..(182): n is a, c, g, or t
  misc_feature (188)..(188): n is a, c, g, or t
  misc_feature (203)..(203): n is a, c, g, or t
  misc_feature (206)..(206): n is a, c, g, or t
  misc_feature (215)..(215): n is a, c, g, or t
  misc_feature (229)..(229): n is a, c, g, or t
  misc_feature (246)..(246): n is a, c, g, or t
  misc_feature (295)..(295): n is a, c, g, or t
  misc_feature (335)..(335): n is a, c, g, or t
  misc_feature (342)..(342): n is a, c, g, or t
  misc_feature (349)..(349): n is a, c, g, or t
  misc_feature (354)..(354): n is a, c, g, or t
  misc_feature (357)..(357): n is a, c, g, or t
  misc_feature (361)..(362): n is a, c, g, or t
  misc_feature (367)..(367): n is a, c, g, or t
  misc_feature (369)..(369): n is a, c, g, or t
  misc_feature (373)..(374): n is a, c, g, or t
  misc_feature (401)..(401): n is a, c, g, or t
  misc_feature (406)..(406): n is a, c, g, or t
  misc_feature (423)..(423): n is a, c, g, or t
  misc_feature (426)..(426): n is a, c, g, or t
  misc_feature (436)..(436): n is a, c, g, or t
  misc_feature (449)..(449): n is a, c, g, or t
  misc_feature (453)..(453): n is a, c, g, or t
  misc_feature (455)..(455): n is a, c, g, or t
  Peptide Sequence Number=SeqID_12234
  Probeset Number=SeqID_19444
atnantntcanangctnntttnnannattacctttatntantncnnagtgcagaagaancngatcgacaccnngangnggttgctcgntgcnctcnntctcntgantctngntgngagcgcnanntcnacgcatacgacgcnagaagntgcggntgcnagccnccgncgccggnttntntancgccgncggtggatctgccanctncgtctcaantgccacctccgcgngcatctcacaccggcgngtcatctgcctacctccaccatgctcactacagctactcaaccgccgangggctcagagctcatccccagccacacccatgcaccgtgncaacagncgcatcntagcncgngacnngtgcntngaannctgcgaacgatgagagaactcgcgcangctgngtgcagctgcgtcgagntcntgcaaggatnagtgtcactcccnacgntnca

SEQ ID NO: 5042 - DNA, 621 bp, Zea mays
  misc_feature (621)..(621): n is a, c, g, or t
  Probeset Number=SeqID_19445
gcagtgaatccgttgctgtcggagggagtgtcctgtctcaccttccgcgtcgtgtaaggattcatgttgctgccagtcggcactaacctctttctataggtttatattgtacgaattggctgctgtagattgggagctcggatttgtttaggctcctccaccgggagaactaattgtgcgctcgatttgatgcggccagaattttttaccccatttaactcggaagcggatggaaagaagattcagatccagctgacagggttcatggaaaagaacacagtgaagttcatgaaggagctctggagccttctcctcagtgcgcagcagaatgccagtggggtgcctcaacagtttctggatgaaaaggaggctgagatacatcagaaaaaggcataggatgacatgattgcgcaggagatccaaaagaagccaggaaaggagggaatggactcagaactggaaaagaacaaaacgatggatggggatgttggtaactcaagatcctatggtgatccagttgcctctgctttaaacagtacaaatttcaatatcgaggaagaaaaggacaatgatttcaagcgcacctcaagaccaaaaaataagttgtaagcgacagcaacn

SEQ ID NO: 5043 - DNA, 512 bp, Zea mays
  misc_feature (63)..(63): n is a, c, g, or t
  Peptide Sequence Number=SeqID_12235
  Probeset Number=SeqID_19446
acgaccataccgttatcccccagccatcaaggacgaaattgaacgtcaagttctgcaaacagncattatccaacatagtgacagtcccttcttctcgtcagcacttttggtaaaaaagaaggatgaatcatggcaattctgtgttgatttcagacacttgaatgcaattgcagtaaagtctacttatccggtacctgtcattgaagagcttttagatgagttgggtcaagcgtcattgtttactagtctggatctcacagcagggtatcatcagatactgctacaacctgaagacacggcagttcgcagcagcctctccacatttgcggatgaaggcctgcctcagtttatcccttctttagataccacagatgtgggagcctccggcactggttttgaccccttttttacttttcatgataaatctagtaccataaattttatgttagattacttttttccaatttttaactatttagggtcaaagctaaaagatttgaccgacagcaacg

SEQ ID NO: 5044 - DNA, 623 bp, Zea mays
  misc_feature (1)..(23): n is a, c, g, or t
  misc_feature (88)..(88): n is a, c, g, or t
  Peptide Sequence Number=SeqID_12236
  Probeset Number=SeqID_19447
nnnnnnnnnnnnnnnnnnnnnnntactgggtgcgcgtccgaggaggacgtggtgaagctctctccctgggggaacgcgggcgagctcnccgtgttgccgtgctcctgctccgtcatggacgactcggtcaccgacgacgaggccgccgaccgttcgggcgatgccggcgcagcggtggccggggccggtacgacgacggcgtcggcgtcggccgtcgccttcctggctccgtcgcccccgcgcttcgccgccgccgcgggcctgtgcttcttgccgacgccagtcgtcggcgtcgtgccgtgctgctgctgctcctgcttggtgggatccaggcgcttcttgaggtgcgtgtgccagacgttcttgatctcgttgtccgtccgcccgggcagcctggcggcgatggcggaccacctagcaattcagaagagagagagagagcagaagagagagaggcgagagcagcagctgcgacaaaccctagcgtcggcggctgcggctgtggctgagagaaacgagagagaggcgagagccgcagctgcggcaaaccctagcgtcggcggctgcgactgtggctgagagaaacgagagagaggcgagagccgcaactgcggcaaaaccct

SEQ ID NO: 5045 - DNA, 966 bp, Zea mays
  misc_feature (1)..(9): n is a, c, g, or t
  misc_feature (53)..(64): n is a, c, g, or t
  misc_feature (137)..(137): n is a, c, g, or t
  misc_feature (185)..(185): n is a, c, g, or t
  misc_feature (194)..(195): n is a, c, g, or t
  misc_feature (209)..(212): n is a, c, g, or t
  misc_feature (222)..(223): n is a, c, g, or t
  misc_feature (260)..(265): n is a, c, g, or t
  misc_feature (267)..(267): n is a, c, g, or t
  misc_feature (269)..(272): n is a, c, g, or t
  misc_feature (275)..(282): n is a, c, g, or t
  misc_feature (285)..(285): n is a, c, g, or t
  misc_feature (287)..(298): n is a, c, g, or t
  misc_feature (966)..(966): n is a, c, g, or t
  Peptide Sequence Number=SeqID_12237
  Probeset Number=SeqID_19448
nnnnnnnnntgtgatgagaaagtcccatgtcaataatgtgacttcttttgttnnnnnnnnnnnnactttttaaaacatgtgcactgttttgcttattatcaaaatcctgctgagaatgctacgtcgaatactgtagncgctgaaccgcgctggtggcaaggctggaaacaagggtgctgaagctnctcttactnncgtaagttaccctnnnngtcggaaatnntgatttcaaacaaacatagatgcattagcatgtgagnnnnnnangnnnnccnnnnnnnnganannnnnnnnnnnnacgattcggcacgactcggattggtgatgacaaacctactctttttgcaactacaattcttgagaatattctttttggcaaacctgaggcgacaaaggcagaggttgggtctacgactacttccgcaggtgaaatgtaactgctgactgggttatcggctccaaaaatttgagatgttgctccactacaccatcctgctcctgcaaaagcagtaatccaggaacatgaaggatcattgaatctatgcaagagggatgatctgatgaattgatcaaggaaaggtagattcctgcggctcaaactgaatagcgggagaagagccggaggaaacagggaggaggcgcggcgcacggatcgaacggtgctgatttgatggatatagatggacgattcagattggctcgaggcagaacaagttttctcctaaacacatttgctctgatgttgtttgtcaccataactgtagattaaaggagccctagctttcggaggacaacccagatgccttcaaagttcaaaatgacggtgatgaaggcgctgaaccgcgctggtggcaaggctggaaacaagggtgctgaagctgctcttacttcccacaactgtcacggcgtgtgctggggcagtggggctgtcgccaaggacatgcagcttgtgaagcagtgctggan

SEQ ID NO: 5046 - DNA, 582 bp, Zea mays
  Probeset Number=SeqID_19449
attggtgttatggctggcatcccataccgccgtttgttaatttgcttagtttgttagatctaatagagtttgttggatcggatagagtttgttaggatcaggttgttagtcttggatagagtttgaggctgctatctcagccatatatatagccccatcttgccagtgctcccccaactcatatattgttcatccgtgtgctgttcatctgagatactattcattggcgatgctgtttatcagtattactattcaccgcgtgtactgttcacccacgatattgttcaccgatgatactgttcatcacttagtaaccaggttcctggatcgatgggatcgaggaacgagaacgtgatacgcgatacgctactaaaactaggatttaacactactggaacgagattgttcccacgttcctagaacagaacgaacgttcccggaacgaggaacgtggccaagttcccatttcccggttactaaggttcatcaacattactgttcacccggctattgttcacgcgtgaacagccacacctccccaaaccaacagctcgatggcgtcgacagcaacggaattcgagc

SEQ ID NO: 5047 - DNA, 582 bp, Zea mays
  Peptide Sequence Number=SeqID_12238
  Probeset Number=SeqID_19450
gctcgaattccgttgctgtcgacgccatcgagctgttggtttggggaggtgtggctgttcacgcgtgaacaatagccgggtgaacagtaatgttgatgaaccttagtaaccgggaaatgggaacttggccacgttcctcgttccgggaacgttcgttctgttctaggaacgtgggaacaatctcgttccagtagtgttaaatcctagttttagtagcgtatcgcgtatcacgttctcgttcctcgatcccatcgatccaggaacctggttactaagtgatgaacagtatcatcggtgaacaatatcgtgggtgaacagtacacgcggtgaatagtaatactgataaacagcatcgccaatgaatagtatctcagatgaacagcacacggatgaacaatatatgagttgggggagcactggcaagatggggctatatatatggctgagatagcagcctcaaactctatccaagactaacaacctgatcctaacaaactctatccgatccaacaaactctattagatctaacaaactaagcaaattaacaaacggcggtatgggatgccagccataacaccaat

SEQ ID NO: 5048 - DNA, 597 bp, Zea mays
  misc_feature (326)..(326): n is a, c, g, or t
  misc_feature (328)..(328): n is a, c, g, or t
  misc_feature (356)..(356): n is a, c, g, or t
  misc_feature (387)..(387): n is a, c, g, or t
  Probeset Number=SeqID_19451
gtacctccccaaccgaaacttttttgttctcttagatttaagccaatttttcccggccacccccgggaaattgtggggggggttcaaaaaccctggaacccccccattctgggaaaacccccaaccgggttttcccccccgattttgggttgtccaaaaagggtcccagggatttaaaattaactcccctgccgcccaaattcttctagggtaccatctcctccttttgggaatccccaaccacccatggggatactcttgggaaaatattctggaccacccaaatttgatgcagagagagatacctcgatctgcgtggacgcgcngncacccccgggagcggagaaagcgatcgnccgcggcgggaggctgcggaggcgctttggncggtggcggagccgacgggatgagcaccggcgtggctcacctcatcggagcagcagttccccatagccggcgggaccgtccgcccgtcagtcgctcgccggcgaggcggttgagatctcggatgggagagcgcgtggagatgggagttgccgcaagtagccagggccagcgaaaagagcaagtggagtcgcagagacgacacggagaccc

SEQ ID NO: 5049 - DNA, 1215 bp, Zea mays
  misc_feature (1)..(13): n is a, c, g, or t
  misc_feature (695)..(697): n is a, c, g, or t
  misc_feature (1200)..(1215): n is a, c, g, or t
  Peptide Sequence Number=SeqID_12239
  Probeset Number=SeqID_19452
nnnnnnnnnnnnngttcagatctactccattgccaccttcctctcccggccgcttctcatgacgtctccgagcgaaaaccctaaccctaatcctaatacaccatttgagatcgggaagcttttcaggccaacgaatcccatgcccaacgccacccccaaccccatcttccccggcgtcgctggaggcccggcgccatccggcccctactcctaccctccggtgaccccgcccttccaccgcggaccctacatccactacccgcaggacccccacgccatgacccgcccagttgtctccttccccatgccaaacccaaacctcaaccccaacccgaacgctaaccccaacgccgtcgccccgggccccaaccccggcgcgcgcctcatgcagctgctcgggaactccgggccgacacaattcgagaccgccgtctccatgcccccgcccacatcggaattcgcacaactgcagttgctcccagcgatgccatccgcgccgccggccaggatgctgagcagcaccagcagcaaggtgcccagggggcggttacttggcaccggggaacgagcggtgcacgatgttgactcgaggctgcccggggaagcgcagccaccgcagctggaggtaacaccgattaccaagtacacatcggatcccgggctcgtgctgggcagacagatcgctgtgaaccggnnntacatcgtgtatgggctcaagctcggtaacatccgtgtgctgaacatcaacaccgcactccgttcactcctccatggtcacacatagggaggctcgattcatttaactggaaggtctgcgcattcacctccttccgagccgtcaatggaagccagatctccaaacacgcggtcctcacaacgtcgatcgaatccaatctaatccaatccaatccacagcaaacaatggcgtccaacggcagtgatgtggtgatgatgtacgggacacgacgctgctggagccgtccaagcagcccaagtcagcgactttctccgtcaagccatatgaaacctatggatataaatccaagtgatgattggacaaatgtaagtatccctttgatacataataacagctagaaactaattttcgttatatccatcttttttaatgaatgtgctcatggaaacagatggcaatggttggaatatccccacaaatatgtatccttcatttccattgannnnnnnnnnnnnnnn

SEQ ID NO: 5050 - DNA, 610 bp, Zea mays
  misc_feature (1)..(1): n is a, c, g, or t
  Peptide Sequence Number=SeqID_12240
  Probeset Number=SeqID_19453
ngcgtcaataaagtagtagtttataaatatccatataatacgatgcacgtaatattagttataagtatatttgaagtatataaatctaatatagtataacatctcgaaggagtatgctacttgagttttgcattggccgacactgatgttggccaggtttggatggtagtatggcacggatataccagctagctagtactggaattgtacagagatgcttggcttgtccaacttctatagataggtgtcagctcatgtcttgtttgctacagatagatttctctccaggttgtgtggagcagttcaacacattttttttcgacagataaatctcaccagcttcttctgttctcatactaggtgcgttgcatatcaagctgaaaaagccagcttggatattttttctctctcccagtgtcccagctctagtcattcatgataataaaaaaagctatcccaacgtaattttatcaaaacagttttagctttgtgaataacgacgctgctcgtggagctaaacgaaaaaaaaaaaaccaatttactagctagtgaaaaaggttgcaccaaattaaacagggcttaattttagacgacatgcatatgcgataag

SEQ ID NO: 5051 - DNA, 907 bp, Zea mays
  misc_feature (1)..(80): n is a, c, g, or t
  misc_feature (907)..(907): n is a, c, g, or t
  Probeset Number=SeqID_19454
nnnnnnnnnnnnnnnnnnnnnnnnnnnnnnnnnnnnnnnnnnnnnnnnnnnnnnnnnnnnnnnnnnnnnnnnnnnnnnnnctcaaccatgagcaaaaagatctaactcaactagtatagtcatgatgaattacataatcggactatccaaacttttgaccaacatcatgtagtctatcttatctatgtctatcctaaccatattcctcaaccctgatgatatacactaacatcgaatcaatgaggtcaagaccggagaggaaaagatcaacattaacaaggaaggatgtaacagtcaaagcgaatctcgagatgaatcaagacttagatttttcagatgaagtttttcctatctttctgttggggaccttcggcctccgaaggtcctcaaaaacaggatttaacagtatttctggagtataatgtgtgaacaggtatcttcggatccaagtcggcatcacagtagaccagagtaatacgaaggttgatacagcgccgaaggtgtgagcaggaaagcttcggcgcgacaacaaaaagtgaaaccgacttaaagatgaaaaggctatttagacctcgacagattactatagaattattaccaagtgtaaagggcattaatgtaattttgtatgggctgcgacccgtgcctataaataggtgaacagtattcccgtactgttcacgctgacttggcattcacttttgcgtcacgcctgtattctcattccttcaagccgaaggtacatttgtaatttaccattgtttacataagtaatataaatggaaatagattaataataatgtttatagaaattatgttactttctatactttgtatgaatgttctccatcttctatcatgatcatgaaggtgaatctgacataacaaaggagggaattgagaaggn

SEQ ID NO: 5052 - DNA, 751 bp, Zea mays
  misc_feature (1)..(1): n is a, c, g, or t
  Peptide Sequence Number=SeqID_12241
  Probeset Number=SeqID_19455
ngttgctgtcgctccaggactcttaaattcacagatgtatcctatgaagagcacaaatattcacaaggcgccaaggtaattatactagcaagcacgacaacataacagtacacagatgaacacaattataggaaatgccttaaaatctatagaatttactgaatgtatcaggtggcacatatcatagttacagccgaaatgggaaccgcaacaacttgagaccttgagtaaaaatgctcaggccagtgctccgaacaggagtacatgaccactcccccctacagtagaaggcaaaaaaatgtcaacatcagccacaaaatatattgtactacataattgaggactacaaatattttatctgtcctcatagccagtaggtggatctgtgtattctgttgttctttgctcactcattgcaattggacgcacaaacctacggtcaactaactgaagctatcatagaaatattaatacttttcaaaatatcaaatttgagccaaattattttaaaaacatgttgcacatgtaaaacaaacaactaaggaaaggagccatcctgaccacctagcctcaacaaaaattgattaaaatttattaagacaagcaaatcaagttatttccagtagcataccaaacccattggcgcaaccacacatatgatatgtctattatagaaactcaattacatgttgttctgagtgtaactaatggtggcaatgacaaaccagatgcaaatgcatgctgtaggagc

SEQ ID NO: 5053 - DNA, 1364 bp, Zea mays
  misc_feature (6)..(8): n is a, c, g, or t
  misc_feature (782)..(782): n is a, c, g, or t
  misc_feature (784)..(784): n is a, c, g, or t
  misc_feature (1364)..(1364): n is a, c, g, or t
  Probeset Number=SeqID_19456
atgacnnnaatgaagagtagtgtaatagaaaaaaaaaaaaaaaaaaaaaattcctattcgagtgaaagcggcccccaatttctactgtaagcagcaatggcgctctcctgttgcttgctcgccggcgcccgggcggcagcctccccttccttctcatcctccgctgccatccgccggcgggaccaccgtctgctgaccttgtccgtggttccgctttcgctctctcagcgatgtcgccacggcctccgcgtgtgctgcgcctcctccacctcttcctcatctccgccgccggcaactcccgaggagcccgacgactacgagttattggacacagctgggaattgtgaccctctatgctcggctgatgaagttagctcacaatactttgaagctaactacaaaccaaaaaatgaccttctaaaagctttaactatcattggcacagccttgactggagcagccgcaataaatcattcctgggttgctgctaatcaggacattgcaatggtgttggtttttgctattggctatgcaggtatcgtttttgaggaatcactagcatttaacaaaagtggagttgcgttattgatggctgtctgcctatgggttatcagaggcattggggctccctcgactgatgtagctgttcaagagttgagccagtcaacttctgaagttagtgaaattgtgtttttcttgcttggtgcaatgactattgtggaaattgttgatgcacatcaaggttttaagctggtgactgataatatatctactcgaaaccnanaaactcttctgtgggtgattggtattgtaactttcttcctgagttcgatcctcgacaacctgacttccactattgtgatggtatccttgcttcgaaaactagtacctccatcagaatatagaaagtatgctttctgataactcatctgtcatggctacacattatctagtacttctttgactattccgccattttactcatgatgatcttatcctagcaccactgtacatatgtaatatgttcattatacacttgctttgtatacttgaatagctcctaggatcaatattgtgtatagcatctttctactcaagcctagtggttaaggctttcgagtagcacctccaagtcccgggtttgattccccccgggggcgaattttcaggatcaatattgtgtatagcatctttctactcaagcctagtggtatagcatctttatcctgtagcagcttagtagataatggaccatgttcaaccttgcaatatttactctgtgctcttaaaatagcaccatgacatccctgtgctcttgctgtgatcctcactaagtcagggtttgaaactgctcgacagcaacn

SEQ ID NO: 5054 - DNA, 988 bp, Zea mays
  misc_feature (1)..(239): n is a, c, g, or t
  Peptide Sequence Number=SeqID_12242
  Probeset Number=SeqID_19457
nnnnnnnnnnnnnnnnnnnnnnnnnnnnnnnnnnnnnnnnnnnnnnnnnnnnnnnnnnnnnnnnnnnnnnnnnnnnnnnnnnnnnnnnnnnnnnnnnnnnnnnnnnnnnnnnnnnnnnnnnnnnnnnnnnnnnnnnnnnnnnnnnnnnnnnnnnnnnnnnnnnnnnnnnnnnnnnnnnnnnnnnnnnnnnnnnnnnnnnnnnnnnnnnnnnnnnnnnnnnnnnnnnnnnnnnnnnnnnncctaatcaagaacacaagccccaaactaacctaatccgagagcagaagcaaaggactgactgatgatgctccttacgggggggtctcggtgtgggaacgacgcgaccttctctgctctgaaatcttggggagagaatgcttccgaagaggctggagttgcgatttggctctgtggaatggagaggatgagagatctgtgtcaacaccacaggagatggggatgcagcgtttagccaactaggagaggagaggaattgtgcgcaaggtcaagctcctggaagcttcgtgggaaagagtgtgtggaaggatttggttactggaagcttcacgggatggaggggtgaaaggtttcacggaccatcggtgcccgatcggacggctgaaaaatagaggatgacgtggacaggctagttgggctcgtttccgttcggctttaaagatagaaaaatatcacaccattccagtgtagcctgccttctcaatggcatccataagcaagacaagaccctctctgttgtcttgaacattaggagcaaaacctccttcatctccgacattgcatgcatcttgaccatattttgccttaatgatgcccttcaggacatggtaaactgttaccataacaaggatattccaagtgaggatagaagatgaagtgaccagctagcagaagcaaaaatcccaaatatagatgtttacttatataacaaagatgactttcaataaacatgaaatacccgacagcaacg

SEQ ID NO: 5055 - DNA, 264 bp, Zea mays
  Peptide Sequence Number=SeqID_12243
  Probeset Number=SeqID_19458
acacaatcgagataagccatggtagttagagcccccctatattctttctagtgtcttaagtgccaagacttaatcatatatttgaccagggagtttagtgataagaacatgtataatacttaggcctgacaatcacgaaactccctggtcaaatatatgattaagtcttggaacttaagacactagaaagaatataggggggctctaactaccatggagtttagtgattataaggaataagtattatccatgtttttatcaagt

SEQ ID NO: 5056 - DNA, 678 bp, Zea mays
  misc_feature (420)..(420): n is a, c, g, or t
  misc_feature (542)..(542): n is a, c, g, or t
  misc_feature (601)..(678): n is a, c, g, or t
  Probeset Number=SeqID_19459
atatatacctcctcaaggcacgttcaccacagtcctctctttccccggcaccaccaccaccacccaggctaacaggactggaccgagtgttgaacaacactgcagtgagcgacggcaggcatggtgagccgtgaaaatttgcacctggtgctggacccggcgtctctgggcgcgccttgggccgacccgtccgccgcagagatcccgccgcagctcctcgccgcgctgggagagtacctctcctccgcccgcggcgacgtcgagacggaggcggacgacgagttcatgatgcacgagttcaaggtgcggcggtgcgcgcgcgcgcggagccacgactggacggcgtgcccctacgcgcacccgggggaggccgcgcggcggcgggacccgccccccggggcctacgcgggggagccgccntgacagtttttcagcccccttctcggatccctggccccccccttgccccttgtgcctcttcattccccttacgctcccgcgtgacaatttagcggggggcccctcccccccccccgttaacnaccggaacccctgcccgtacaagttttctaccctgcccgaagcttggtttattgtttcnnnnnnnnnnnnnnnnnnnnnnnnnnnnnnnnnnnnnnnnnnnnnnnnnnnnnnnnnnnnnnnnnnnnnnnnnnnnnn

SEQ ID NO: 5057 - DNA, 678 bp, Zea mays
  misc_feature (1)..(78): n is a, c, g, or t
  misc_feature (137)..(137): n is a, c, g, or t
  misc_feature (259)..(259): n is a, c, g, or t
  Peptide Sequence Number=SeqID_12244
  Probeset Number=SeqID_19460
nnnnnnnnnnnnnnnnnnnnnnnnnnnnnnnnnnnnnnnnnnnnnnnnnnnnnnnnnnnnnnnnnnnnnnnnnnnnnngaaacaataaaccaagcttcgggcagggtagaaaacttgtacgggcaggggttccggtngttaacgggggggggggaggggccccccgctaaattgtcacgcgggagcgtaaggggaatgaagaggcacaaggggcaaggggggggccagggatccgagaagggggctgaaaaactgtcanggcggctcccccgcgtaggccccggggggcgggtcccgccgccgcgcggcctcccccgggtgcgcgtaggggcacgccgtccagtcgtggctccgcgcgcgcgcgcaccgccgcaccttgaactcgtgcatcatgaactcgtcgtccgcctccgtctcgacgtcgccgcgggcggaggagaggtactctcccagcgcggcgaggagctgcggcgggatctctgcggcggacgggtcggcccaaggcgcgcccagagacgccgggtccagcaccaggtgcaaattttcacggctcaccatgcctgccgtcgctcactgcagtgttgttcaacactcggtccagtcctgttagcctgggtggtggtggtggtgccggggaaagagaggactgtggtgaacgtgccttgaggaggtatatat

SEQ ID NO: 5058 - DNA, 301 bp, Zea mays
  Peptide Sequence Number=SeqID_12245
  Probeset Number=SeqID_19461
caactcgtaatgcagctcgagctagagagacagacacgcctcacccacaccacaagaacaccaaagccacatcccatccatctccacggtgaggcttgagcgacccgagcaaaaaaaaatcatccgcgaagcagcgacgcaggtttgttctctgatctctctggttcttcttttagcagcagggacgcacagcacaagaaaaggtccggttcaagaggctcttctgttgggttttttttttttttagaatcctcaagagaagagtgttcttgggttaggattttaaaaaaaaaaaaaaaaa

SEQ ID NO: 5059 - DNA, 491 bp, Zea mays
  Probeset Number=SeqID_19462
gaaagctaagggagacgagcagcctaaaaaccctagcccccgaatcagatcccaccgcccgccggaacgcggaaccctgcccccggccggcggtgggatctgattcggggggttgcttgctggagggtttttgttcgtttagtgtctatccttagcttacttattacttttgttagtactctactagcagagtacatgcatagagtcagtggtgtggctgtggcgtggatcagatcattgatttgatcgagctgtacaaatagcgaggcgatacatgtcactgagttgatcagttgacaaggtggtttggaccatgttgaggcacggagaaacttcatccctaagttttagtttgtctggctttgctcgtcattttgtacttgttcttctcacatatttgttgcttagaatttacttcaaactcacgtccttttagcaatataatacacatttgtacatacattatctatactactatatgtttccgttgc

SEQ ID NO: 5060 - DNA, 383 bp, Zea mays
  misc_feature (344)..(344): n is a, c, g, or t
  Peptide Sequence Number=SeqID_12246
  Probeset Number=SeqID_19463
aaaggagggggggagggggggggagagagagagagagagagagagagagagagagagagagagagagacccggcaaatgcgattgtttagtggaatcagttgatcgaaatttacttcaaataacatttgtttgtgttgcgaattgggaaaagagtttttagttaaacgagcttttgatggccctaaagaagttttcccggaagatgtttgtgctgatggaccgtttcctgttagcttcgagggatcctccccatatcgataaacggttgcatagcccgacaatcggaagagttaaactgttaaagatttcaaacatcaaccccatatcgataaactgttgcttngcctgacaatcggaagagtttaaatgttaaagatttgat

SEQ ID NO: 5061 - DNA, 351 bp, Zea mays
  misc_feature (1)..(1): n is a, c, g, or t
  Probeset Number=SeqID_19464
ntttttttttttttttttgcttctcaaagcttccgaataatttacttcataaagaaaaaaaactcttgcaattcattaaactgcatgcaggacacgctcaaatcgccgccaccagagagcgagacgatgcagaaggggaacgtgctcgcggtcctggccaccacgttcttctacctcgccgtggggtgcttcgggtacgccgccttcggcaacgccgcgccgggcaacctgctcaccggcttcggcttctacgagccgtactggctcatcgacttcgccaacgcctgcatcgtgctccacctgcttggtggctaccaggtagtacgaagcaagcagtaaaagtacgtacgt

SEQ ID NO: 5062 - DNA, 629 bp, Zea mays
  misc_feature (1)..(28): n is a, c, g, or t
  misc_feature (302)..(302): n is a, c, g, or t
  misc_feature (629)..(629): n is a, c, g, or t
  Peptide Sequence Number=SeqID_12247
  Probeset Number=SeqID_19465
nnnnnnnnnnnnnnnnnnnnnnnnnnnnggggcccccccctaagaggaggggatagggccccccattggcccactcgcgggcacccgaaaatgtaaaaatttttttggaagttttttgggggccccccccttgcacaaggaaaaacatttcttaagcttttaaaaaagtttctctgggggacaaatcaggaccatacccccctggtgctggcctttggaaagaaccttgaatgtccccttgttgttccacccagggattgaggatgcaccttcagcaccagaggcaggttcttcaaaaacgnccggctgggtgcgtttcaaagtcaccatgcctgagcaggccatcccccacccgacccgccgaggccgggcggcgggcgccgccaggagaagcagcgccagcaatgcgagcctcgtcgtcgccgaatctggctccatctcctcacccccctccgatcggaccccaggagaacaggctgcgagcgagactcggaagtgggagcgtgtgagtgagactgggcggggaggtaggaggcagcagacaagagggcactgcgctcaacgctggctgctgccgactgccgtgccgtgggtgtgggtcggagttggaggcagctcagctctgctcn

SEQ ID NO: 5063 - DNA, 629 bp, Zea mays
  misc_feature (328)..(328): n is a, c, g, or t
  misc_feature (601)..(629): n is a, c, g, or t
  Peptide Sequence Number=SeqID_12248
  Probeset Number=SeqID_19466
agagcagagctgagctgcctccaactccgacccacacccacggcacggcagtcggcagcagccagcgttgagcgcagtgccctcttgtctgctgcctcctacctccccgcccagtctcactcacacgctcccacttccgagtctcgctcgcagcctgttctcctggggtccgatcggaggggggtgaggagatggagccagattcggcgacgacgaggctcgcattgctggcgctgcttctcctggcggcgcccgccgcccggcctcggcgggtcgggtgggggatggcctgctcaggcatggtgactttgaaacgcacccagccggncgtttttgaagaacctgcctctggtgctgaaggtgcatcctcaatccctgggtggaacaacaaggggacattcaaggttctttccaaaggccagcaccaggggggtatggtcctgatttgtcccccagagaaacttttttaaaagcttaagaaatgtttttccttgtgcaaggggggggcccccaaaaaacttccaaaaaaatttttacattttcgggtgcccgcgagtgggccaatggggggccctatcccctcctcttaggggggggcccnnnnnnnnnnnnnnnnnnnnnnnnnnnnn

SEQ ID NO: 5064 - DNA, 1164 bp, Zea mays
  misc_feature (1)..(563): n is a, c, g, or t
  misc_feature (808)..(812): n is a, c, g, or t
  misc_feature (832)..(836): n is a, c, g, or t
  misc_feature (843)..(843): n is a, c, g, or t
  misc_feature (845)..(847): n is a, c, g, or t
  misc_feature (854)..(854): n is a, c, g, or t
  misc_feature (856)..(866): n is a, c, g, or t
  misc_feature (873)..(881): n is a, c, g, or t
  misc_feature (884)..(885): n is a, c, g, or t
  misc_feature (887)..(899): n is a, c, g, or t
  misc_feature (903)..(915): n is a, c, g, or t
  misc_feature (917)..(927): n is a, c, g, or t
  misc_feature (1164)..(1164): n is a, c, g, or t
  Peptide Sequence Number=SeqID_12249
  Probeset Number=SeqID_19467
nnnnnnnnnnnnnnnnnnnnnnnnnnnnnnnnnnnnnnnnnnnnnnnnnnnnnnnnnnnnnnnnnnnnnnnnnnnnnnnnnnnnnnnnnnnnnnnnnnnnnnnnnnnnnnnnnnnnnnnnnnnnnnnnnnnnnnnnnnnnnnnnnnnnnnnnnnnnnnnnnnnnnnnnnnnnnnnnnnnnnnnnnnnnnnnnnnnnnnnnnnnnnnnnnnnnnnnnnnnnnnnnnnnnnnnnnnnnnnnnnnnnnnnnnnnnnnnnnnnnnnnnnnnnnnnnnnnnnnnnnnnnnnnnnnnnnnnnnnnnnnnnnnnnnnnnnnnnnnnnnnnnnnnnnnnnnnnnnnnnnnnnnnnnnnnnnnnnnnnnnnnnnnnnnnnnnnnnnnnnnnnnnnnnnnnnnnnnnnnnnnnnnnnnnnnnnnnnnnnnnnnnnnnnnnnnnnnnnnnnnnnnnnnnnnnnnnnnnnnnnnnnnnnnnnnnnnnnnnnnnnnnnnnnnnnnnnnnnnnnnnnnnnnnnnnnnnnnnnnnnnnnnnnnnnnnnnnnnnnnnnnnnnnnnnnnnnnnnnnnnnnttacatctctttatggggggccattggagttcttgttcgtagtagaaagcaaagacgatccagcttatcgtgccgtctcccgtttgattgtagagtacaaggacaaattggacgcaaaggtcgttgtagctgggttttcaacaacgtgtagccagaaaattcataatcagttaattggtgttgaaaagatgcacaaggacagcaagtatgttctatttctggatgatgatgtcagactgcacccnnnnncagtcggagctctcacaaannnnntggagangnnncctgagntnnnnnnnnnnncgggatnnnnnnnnnacnnannnnnnnnnnnnngggnnnnnnnnnnnnntnnnnnnnnnnnatgccttgttcgatgggatttgcaactggtgggaagactttcttcttgtggggtggctgtatgatggtatatatagtctatttcttgacgggaacattttctctagattttctctgtataaacattaatcacccatagtgttctaacaaggcttcactttagatgcatgctgatgattttaggcaagaccggtacggcattgtcagtggattaagagatggcggttactcagatgan

SEQ ID NO: 5065 - DNA, 714 bp, Zea mays
  misc_feature (601)..(714): n is a, c, g, or t
  Peptide Sequence Number=SeqID_12250
  Probeset Number=SeqID_19468
accaggcaagcaagcgggagccgccaactcgtgcctctcggcagcggcgtctgaactctgaaccgaccgaccgaccgaccgttccgttccgttcaccccaccatggaggcgccgccgggaccggggcccatggagctggacgccccacctcccgccgccgccgccgcggcgattcctcccgccggcaggcgacaagcacaaggacgggggaaggggggagacgctttgtgaccgggccatatcatctccaccacccattcggcggggaaagaacggcgagccccaagcgggaccattcagtttacatgggcagaaaccgggtccgtggggccacaggcttccattttgggatgcggcccttcccaggccttaagggggccctgagaaaccagggaaaagaccctttccccccaattcaagaaaagggtggccttgccaaagaactcgggcgggttaaccaagaaaacccggagaaagcttgcaaaacttttaatgggcggggcccatgggaggccaccccccaagcggtcattctctggccctgagaaagcactgggctttctttcctctgaaaaacgaagcgagggtaccaaaattggtnnnnnnnnnnnnnnnnnnnnnnnnnnnnnnnnnnnnnnnnnnnnnnnnnnnnnnnnnnnnnnnnnnnnnnnnnnnnnnnnnnnnnnnnnnnnnnnnnnnnnnnnnnnnnnnnnn

SEQ ID NO: 5066 - DNA, 714 bp, Zea mays
  misc_feature (1)..(114): n is a, c, g, or t
  Peptide Sequence Number=SeqID_12278
  Probeset Number=SeqID_19469
nnnnnnnnnnnnnnnnnnnnnnnnnnnnnnnnnnnnnnnnnnnnnnnnnnnnnnnnnnnnnnnnnnnnnnnnnnnnnnnnnnnnnnnnnnnnnnnnnnnnnnnnnnnnnnnnnnaccaattttggtaccctcgcttcgtttttcagaggaaagaaagcccagtgctttctcagggccagagaatgaccgcttggggggtggcctcccatgggccccgcccattaaaagttttgcaagctttctccgggttttcttggttaacccgcccgagttctttggcaaggccacccttttcttgaattggggggaaagggtcttttccctggtttctcagggcccccttaaggcctgggaagggccgcatcccaaaatggaagcctgtggccccacggacccggtttctgcccatgtaaactgaatggtcccgcttggggctcgccgttctttccccgccgaatgggtggtggagatgatatggcccggtcacaaagcgtctccccccttcccccgtccttgtgcttgtcgcctgccggcgggaggaatcgccgcggcggcggcggcgggaggtggggcgtccagctccatgggccccggtcccggcggcgcctccatggtggggtgaacggaacggaacggtcggtcggtcggtcggttcagagttcagacgccgctgccgagaggcacgagttggcggctcccgcttgcttgcctggt

SEQ ID NO: 5067 - DNA, 1080 bp, Zea mays
  misc_feature (1)..(16): n is a, c, g, or t
  misc_feature (1080)..(1080): n is a, c, g, or t
  Probeset Number=SeqID_19470
nnnnnnnnnnnnnnnncggcacgttcttttgcgcggcctgtcattcccctggggatcagccttggcgttgcatcatatgggggcgagctgaggagcaaagcggacaacaagaggctttcgatcgatctccctccctatctctctctctctgctatcccttcccctgcttccctcccccctagcttttagtagaaagaggagggccgggacgtggtgacaaggctaggctagcttggggccggcggagatcgatcgtcgtcgtcgacggccatgacatggtgcaacagcttcaacgacgtgcgtgccgtggaggacaacctggccaccgccgccgccgccaagaaacagcagctgcaggcctcctcccacgtcaacctcatcaggacctgcccctcctgcggacaccgcgcgcagtatgacgaacaggtgcagcaggcggcggcgatccaggacctgccggggctgccggcgggcgtgaagttcgatccgacggaccaggagctgctggagcacctggaggggaaggcgaggccggacacccgcaagctgcacccgctcgtcgacgagttcatccccaccatcgagggcgagaacggcatctgctacacgcatccggagagacttcctggtcagtagctagccacgccaacaaagttttttttgagtgctgctgaattacatcatctatcaaaaggaaaaaaaagagaaaataatagctccatctatcatctctctcagatttagggccatgtttggtttggtgcataacttaccacactttgtctaatttttctgcttaaaattagtttttaaattcagacgactaaccttagataaaatatgtcatagttagtcacaaaccaaacatgcaccattcgacaacgaagatatatctttcatgcgcgctagcttatcatagacgatcgactagttgttcttttaaattaccagtcgttttcaattgggtggtcttgcttaaatcaatcggccagggctgctcctagaaattagtgtgccgcattgtcagcacactcacgtcagatatatacatgtaaaactgcatgtctacatgtgcgtttn

SEQ ID NO: 5068 - DNA, 386 bp, Zea mays
  misc_feature (386)..(386): n is a, c, g, or t
  Peptide Sequence Number=SeqID_12279
  Probeset Number=SeqID_19471
gagttcaggggggagccagcgaagacaagacaagccaggccagcggcggaggagagggagagagagagagagagcacgcgacagtaggcaggagggcgaggaggagcttgtagagggttaaggaaggcgaccgccatgggggactccagcggctccgtgtcggtcgacgtcgagcggatcttcttcggcggcaaggagcatcgagtaagaacgaggcatggctctcttttaagtgtatccggaaaaaaggggctgctagctatcttcgtttactttttgagcttctgtgtgttgcatagttggttatgtattcatatggctgtgaacctttcctgtaacaactggacgcatgatgcgtgactgtgccaaaaaaaaaaaaaaaaaan

SEQ ID NO: 5069 - DNA, 627 bp, Zea mays
  misc_feature (23)..(23): n is a, c, g, or t
  misc_feature (51)..(52): n is a, c, g, or t
  misc_feature (439)..(439): n is a, c, g, or t
  misc_feature (478)..(478): n is a, c, g, or t
  misc_feature (509)..(509): n is a, c, g, or t
  misc_feature (530)..(530): n is a, c, g, or t
  misc_feature (532)..(532): n is a, c, g, or t
  misc_feature (543)..(543): n is a, c, g, or t
  misc_feature (548)..(548): n is a, c, g, or t
  misc_feature (553)..(553): n is a, c, g, or t
  misc_feature (557)..(557): n is a, c, g, or t
  misc_feature (586)..(586): n is a, c, g, or t
  misc_feature (599)..(627): n is a, c, g, or t
  Probeset Number=SeqID_19472
gagagagagagagaagagaaagntccttaatcccccccccccccccccccnncaagctgatgaagcgttccctgaagcatggcattctgatgcagcctccgtccctggtgatggccttgcaagcattaggtcgaaagtgtatctaactccaaagctttggtatctccgtctaaatgtcattgaagcccaggatcttataccaaatgacaagactaggttccctgaagtttatgtcaaagcaatgctaggcaaccaagtccaaagaaccagggcattggcaagccggactttggaatccattgtggaatgaggacttgatgctttgttgcagctgagccatttgaagaggcacctaattttggagtgtataggacagggtggcccccaggaaaaggatggaggtaattgggaagggacaatcattgccactgcaccatgntacccccgggaggctgggatcacagggtgcttaacccgnccccagtgggtataaaccccttgagccttgnaagaaagcctggccgatttantncatgggctgcngcccncaacnaatnaaaaaccccactcttttttctaagcccgngcaatctttcatnnnnnnnnnnnnnnnnnnnnnnnnnnnnn

SEQ ID NO: 5070 - DNA, 1138 bp, Zea mays
  misc_feature (434)..(441): n is a, c, g, or t
  misc_feature (451)..(457): n is a, c, g, or t
  misc_feature (1031)..(1033): n is a, c, g, or t
  misc_feature (1135)..(1138): n is a, c, g, or t
  Peptide Sequence Number=SeqID_12280
  Probeset Number=SeqID_19473
cggcacgaggctataaataccccaaccaccccacattcaatggcatcaaagttttccatcttcaacacattacaagagctatagcattcaattctagacacaaccaaagagatcaaatcctctcccaagtccggaatcactccaaatcaaatagtgactagagagagtgacatttgtgtttatttgagctcttgcgcttggattgcttcttttctttctcattcttcttgtgatcaaactcaattgtaaccaaggtaagagacaccaattgtgtggtggtccttgcgggaactttgtgttccgtttgattgagaagagaagcccactcggtctaagtgaccgtttgagagagggaaagcgttgaaagagacccggtctttgtgaccacctcaacagagagtaggtttgcaagaaccgaacctcggtaaaacaannnnnnnngtctcgctcnnnnnnngctcacgatttattttgcgccctctttctcggactcgtttacatttctaacgctaacccggcttttagttgtgcttaagtttacaaattttcagattcgccctattcaccccccctctaggcgactttcaattggtatcaaagccggtgcttcattagagcctaaccgctcgaagtgatgtcgggagatcacgccaagaaggagatggagaccggcgaaaagcccactacaagccacgggagcacttcatcggaagagtcccgcaccaaaaggagggagaagaagaagagctcctccaacaaagggaaggagaagaaatcttcttctcaccacaaagagaagaaggaaaaatcttcttcccacaagccgcatcgaagcggggacaagcaaaagaggatgaggaaagtggtctactacgagaccgacacttcatcaacatcaacctccgactccgatgcgccctccgtaacttctaaacgccaagagcgtaagaagtttagtaagatccccctacactattctcgcatttctaaacatgcacctctactttccgtcccattaggcaaaccaccannnttgatggtgaagattatgctaggtggagtgatttaatgagatttcatctaacctcactccacaaaagtatatgggatgttgttgagtttggtgcacaggtannnn

SEQ ID NO: 5071 - DNA, 1146 bp, Zea mays
  misc_feature (753)..(754): n is a, c, g, or t
  misc_feature (764)..(764): n is a, c, g, or t
  misc_feature (800)..(801): n is a, c, g, or t
  misc_feature (1146)..(1146): n is a, c, g, or t
  Peptide Sequence Number=SeqID_12281
  Probeset Number=SeqID_19474
gcacgagggggcatgcagtggaagcgcagggcctcatcgagaagatcatggaccccacgctcgccggcaccgtcaacccggagtcgctcgccaagttcgccgagaccgccgagaagtgcctcgccgagttcggcagtgaccgcatctccatgggcgacgtgctgtggaacctcgagtatgcgctgcagctgcaggacgccaacccgcccgagggcggcgacagcgacggcaacagcgacggtgccacggcggagggcggcgccatcgtccccgctggcggtgccgtgcccgacgcgtccaccgccgccgccggggagctcttccagcagctcgccgacatgaaggggaggtgatcgatcgattgcactgtatgtggcatggcaatctgactggctcaactcaacagtcgtatcgtcgtagtggatcactcgtctcgtgcatgtcgtcacatcgatgcatgtattgcacgttgaaaattcgaattctagaacacaaattgaaaagagtggttggtgatcagtacgtgtataagtatatatatatgtataatgtatgtacgtgtaacaactagcactgatcgatacattctttcttcaacctgctgtttcttagagacagacagacgacgtgagcgaggtctgcactatagggagctcatcatttcagaaatttcgaatctaataaatatatatgtggcacaaaaaaaaaaaaaaaaaaaatgtgtgtggttgccccagcaaatacactgaaatnnttttggttcntccttccgtcgtactctgcaaaaaaaatgcagtgtnnagagttgcttttgcttgggtggcatgcaagcgtggaacccgtggtgctattctttcatcgatgcgagacttcacgcgtgtcgaaattttcctgaatttttaggggccgttcgcttgtcaggaatgaacgggccggaatttgatctaactcatcaaaaaaccgaacagggtagtgttttttggtttttatacggtctaggtgcagcttttcgtggcaccaccacggccttcgtagctgaagccattagtataggattctctcagctcactggatttcttcagtctgtcacattgtacagcacatagcagcaacgttgcttatatattatgcatttttttcgttcan

SEQ ID NO: 5072 - DNA, 654 bp, Zea mays
  misc_feature (2)..(2): n is a, c, g, or t
  misc_feature (4)..(12): n is a, c, g, or t
  misc_feature (14)..(14): n is a, c, g, or t
  misc_feature (18)..(22): n is a, c, g, or t
  misc_feature (27)..(38): n is a, c, g, or t
  misc_feature (48)..(55): n is a, c, g, or t
  misc_feature (61)..(64): n is a, c, g, or t
  misc_feature (67)..(71): n is a, c, g, or t
  misc_feature (75)..(76): n is a, c, g, or t
  misc_feature (78)..(80): n is a, c, g, or t
  misc_feature (82)..(83): n is a, c, g, or t
  misc_feature (95)..(100): n is a, c, g, or t
  misc_feature (102)..(102): n is a, c, g, or t
  misc_feature (107)..(112): n is a, c, g, or t
  misc_feature (124)..(124): n is a, c, g, or t
  misc_feature (133)..(135): n is a, c, g, or t
  misc_feature (137)..(137): n is a, c, g, or t
  misc_feature (148)..(150): n is a, c, g, or t
  misc_feature (158)..(158): n is a, c, g, or t
  misc_feature (170)..(170): n is a, c, g, or t
  misc_feature (175)..(175): n is a, c, g, or t
  misc_feature (177)..(177): n is a, c, g, or t
  misc_feature (201)..(202): n is a, c, g, or t
  misc_feature (207)..(210): n is a, c, g, or t
  misc_feature (219)..(220): n is a, c, g, or t
  misc_feature (233)..(234): n is a, c, g, or t
  misc_feature (240)..(240): n is a, c, g, or t
  misc_feature (307)..(308): n is a, c, g, or t
  misc_feature (411)..(413): n is a, c, g, or t
  misc_feature (417)..(417): n is a, c, g, or t
  misc_feature (594)..(595): n is a, c, g, or t
  misc_feature (598)..(603): n is a, c, g, or t
  misc_feature (624)..(631): n is a, c, g, or t
  misc_feature (635)..(637): n is a, c, g, or t
  misc_feature (649)..(654): n is a, c, g, or t
  Peptide Sequence Number=SeqID_12282
  Probeset Number=SeqID_19475
gncnnnnnnnnncnagtnnnnngacgnnnnnnnnnnnnggccggcggnnnnnnnnggggcnnnngtnnnnnaagnncnnntnntgctgccacagnnnnnngnacgcnnnnnntggacgtttttntgtacaaannnangcaaggctttnnnagcgccgngtgccggtgccnccacntnaccaaggaggaacggcgggaaatnnaaatnnnnctcaggaanngccgcgacgcgtnncacagncggcacgcggcggcggcggcgcccaaaatgcaggcatcagatcggcgcatcacgctgcaaataaccnncgcacgatgatatatgtgggtgcaactttttttttttgttgttgccctcttccgtccgctttacggtgtacccctacatacataataggagaggaggcccgannngttnaaaagttaggcatttttagttttaatttaatccagataatcagtgcgatatatgtaatgacatgtatatgcatgtgtgtataactactcgcataagcagtaaacagcaatgaaattttttatcatgcacgaatacgaagaatagagtgtacccagcggagggaccgatgctcaaggnntcnnnnnntccattctgtttaaacacaannnnnnnngaannngaggggggaaannnnnn

SEQ ID NO: 5073 - DNA, 371 bp, Zea mays
  misc_feature (271)..(271): n is a, c, g, or t
  misc_feature (298)..(371): n is a, c, g, or t
  Probeset Number=SeqID_19476
tttttttttttttttttgcagaaatgagcaatcacagtccattgcactgaagccaagacatctagaacattactcctacaggataaggaagccacgaaacgaatgccaccatctacttctagtaacactacaacgacgagcagcacgacgggcgctcaagccctctcgcccctgatgcgccgcactcattctctcttgccggtaaggagtggatctccactccataccggtatcctaatcaatagaagatggacgcggatctccactcctnaccggcaagagagaatgagtgcggcgnnnnnnnnnnnnnnnnnnnnnnnnnnnnnnnnnnnnnnnnnnnnnnnnnnnnnnnnnnnnnnnnnnnnnnnnnn

SEQ ID NO: 5074 - DNA, 1048 bp, Zea mays
  misc_feature (1)..(2): n is a, c, g, or t
  misc_feature (10)..(11): n is a, c, g, or t
  misc_feature (18)..(20): n is a, c, g, or t
  misc_feature (27)..(29): n is a, c, g, or t
  misc_feature (32)..(35): n is a, c, g, or t
  misc_feature (79)..(79): n is a, c, g, or t
  misc_feature (112)..(114): n is a, c, g, or t
  misc_feature (160)..(162): n is a, c, g, or t
  misc_feature (174)..(176): n is a, c, g, or t
  misc_feature (1048)..(1048): n is a, c, g, or t
  Peptide Sequence Number=SeqID_12283
  Probeset Number=SeqID_19477
nnatcctganntttttannnactttgnnnggnnnnaactaggcatgtttttgattatagcccatatgtagccgccaggnatgaactaggcctgtttttattatactttgcannngcatgaaatttcagaaccataaccatatgggctataattgaacttnnntcattaacaggnnntaccatatctcccaaaaatacattggtcaaaaaactcaagactgaaagatgttatttgccatgtctcattaacaggacgtaccatatactcacatatttcctgcattgcattgtacacattttcttatatattaacgagtgcaggaacgagttcatcgaggaggcggcggaggaggagctcatgattctagatcctgctcgaaatctttgatcaagatttgttagttgtcgtggcaaaagtagagagtgtaatatttgcccgcaatattttgcttctaccttcaacttggggactacttggctgggagagtgagtgggggaaggacaaaggaaatgcctctcattcaagttttttgctgtaaggagaggtcgtcccggtttggccaaccagtgcaatggtcgagccagccaattccatggtttgttgagctccgttttggctaatgtcagattagctcttcggcatcaatttccgggaggaggacggcgagggggccgcgcagcggcaagagccacaacagaaggagctgttctgggctcccgcgccgcttaccaccaagtcctgggcggacgtcgaggacgactactactactacttcgccaccaccgcgtcgccgcgccccatctggggcactgccggtgagcccgccaaggaagaggacgacgtcgatgatgttgtgcgtgccgcccttcaggaggtactgaagacactttttgagatcatgctctttgaggatgttggtaatcagtgtaggctgcgtcgaccaatattgagcctgataatgaccagcgaacaggtgccttcacttattattttattttaataataagttaataacacttatctttctactttaaaaaaaaaaaaaaan

SEQ ID NO: 5075 - DNA, 1085 bp, Zea mays
  misc_feature (1)..(1): n is a, c, g, or t
  misc_feature (791)..(791): n is a, c, g, or t
  misc_feature (803)..(813): n is a, c, g, or t
  misc_feature (815)..(830): n is a, c, g, or t
  misc_feature (840)..(840): n is a, c, g, or t
  misc_feature (844)..(844): n is a, c, g, or t
  misc_feature (986)..(986): n is a, c, g, or t
  Peptide Sequence Number=SeqID_12284
  Probeset Number=SeqID_19478
ncggccgggaccgtgctaccgccccggccccgccagagacgttcggcctcgctgtgctggtttccgccggccaaggcgaggtcctcaacggcagcgtcgtgagggccgccgtcgccgccgggccgtcatgatctttgccatgaccttcgcgaacgccatcttgctcggccgggcaagatgtgcagccgtagctaccaatggcgtcctcctaacatcctccgccatgggcgggggctataatagccaccgctcggctctgtacctgcggggagagagaactgctgatagtcgcctagaggggggtgaatagggcgaaactgaaatttacaaatataaacacaactacaagccgggttagcgttagaaatataaacgagtccgcaagagagggcgcaaaacaaatcacaagcgaataatgaagtgtgtgacacgcggatttgttttaccgaggttcggttctttcaaacctactccccccaaaaaaaaaaaaaaaaaacccgcggcctcaaccctttccctctctcaaatgatccctcggaccgagggagcttcttcttctcaatcaaacgggaacaaaacttccccgcaagggccaccacacaattggtgcctcttgccttggttacaattcagttttgatcacaagaacaagtgagaaagaaaagaagcaatccaaacgcaagagctcaaaagaacacggcaaatctctctcgctaatcactaaagccttgggtctgaattggagagaaagcgatcaccaaaaggtgtctagaattgaatccctaaaaagnccaagtgtgttnnnnnnnnnnntnnnnnnnnnnnnnnnncggactgtcnggtncccacacgccggactgtccggtgcaccagggaactccagcccagcggctagttccaggtggcactcggagaaagaccatcggactgtccggtgtcagcttttctccaacggctagtttggagttggggcctataaatacttnacccaaccggccatttgaaggtgtgggagcccaagcaacataccaagcaatattgtagacattcccaagtgcttaatagaatcactcggtgattagcgt

SEQ ID NO: 5076 - DNA, 812 bp, Zea mays
  misc_feature (470)..(473): n is a, c, g, or t
  misc_feature (475)..(480): n is a, c, g, or t
  misc_feature (482)..(497): n is a, c, g, or t
  misc_feature (499)..(499): n is a, c, g, or t
  misc_feature (502)..(503): n is a, c, g, or t
  misc_feature (505)..(507): n is a, c, g, or t
  misc_feature (509)..(510): n is a, c, g, or t
  misc_feature (512)..(512): n is a, c, g, or t
  misc_feature (517)..(535): n is a, c, g, or t
  misc_feature (539)..(547): n is a, c, g, or t
  misc_feature (553)..(557): n is a, c, g, or t
  misc_feature (589)..(591): n is a, c, g, or t
  misc_feature (598)..(600): n is a, c, g, or t
  misc_feature (602)..(603): n is a, c, g, or t
  misc_feature (726)..(728): n is a, c, g, or t
  misc_feature (738)..(743): n is a, c, g, or t
  misc_feature (745)..(753): n is a, c, g, or t
  misc_feature (767)..(769): n is a, c, g, or t
  misc_feature (773)..(775): n is a, c, g, or t
  misc_feature (812)..(812): n is a, c, g, or t
  Probeset Number=SeqID_19479
agcctaaagatggcaccttttgaagctctctatggaagaaggtgcaggacaccactcaattggtctcaacctggtgagagagaagtttttggacctgacttagtgactgaagccgaaaggaaggtcaggctaatcaggaagaatctagaagctgctcaggccaggcagaagagctatcatgataaaagaaggaaacctctccagttcgaggtgggaagttttgtatacctcaaggtatcacccaccaagggagtgcagaggtttgggatcaaaggcaagctagcccctcgttacattggaccttatgagatcatagaagcatgtggacccgtggcatacaagctgaagttaccttcaaagatgtctgccattcacagtgtattccatgtatctcagctgaagaagtgtgttcgattgccgaccgagatcatagcagagccagaattggagatagagccagatctatcgtnnnnannnnnntnnnnnnnnnnnnnnnnancanngnnnanncntggtnnnnnnnnnnnnnnnnnnngtgnnnnnnnnntagatnnnnncctctcaccatgacatcttcaacctttcttcnnnacgtcgnnnanncgaccgagcaatgcaagatcttgttgatgggcagatagcaccgccccgccgcatcccggtgggtcctcaccattggggaccgcctcgacgctggaacccacctcaacgccagaacccgcctcnnngttgagcaannnnnntnnnnnnnnngttcccgatacgannnggannncagtcgccagacatcctccatgtggtgccattggctn

SEQ ID NO: 5077 - DNA, 650 bp, Zea mays
  misc_feature (2)..(7): n is a, c, g, or t
  misc_feature (14)..(18): n is a, c, g, or t
  misc_feature (26)..(28): n is a, c, g, or t
  misc_feature (299)..(299): n is a, c, g, or t
  misc_feature (302)..(302): n is a, c, g, or t
  misc_feature (307)..(308): n is a, c, g, or t
  misc_feature (312)..(312): n is a, c, g, or t
  misc_feature (314)..(314): n is a, c, g, or t
  misc_feature (318)..(318): n is a, c, g, or t
  misc_feature (321)..(321): n is a, c, g, or t
  misc_feature (324)..(325): n is a, c, g, or t
  misc_feature (330)..(330): n is a, c, g, or t
  misc_feature (333)..(335): n is a, c, g, or t
  misc_feature (337)..(337): n is a, c, g, or t
  misc_feature (340)..(340): n is a, c, g, or t
  misc_feature (342)..(344): n is a, c, g, or t
  misc_feature (348)..(348): n is a, c, g, or t
  misc_feature (359)..(361): n is a, c, g, or t
  misc_feature (366)..(366): n is a, c, g, or t
  misc_feature (371)..(371): n is a, c, g, or t
  misc_feature (374)..(375): n is a, c, g, or t
  misc_feature (380)..(380): n is a, c, g, or t
  misc_feature (385)..(385): n is a, c, g, or t
  misc_feature (398)..(398): n is a, c, g, or t
  misc_feature (401)..(401): n is a, c, g, or t
  misc_feature (404)..(404): n is a, c, g, or t
  misc_feature (410)..(410): n is a, c, g, or t
  misc_feature (413)..(413): n is a, c, g, or t
  misc_feature (422)..(423): n is a, c, g, or t
  misc_feature (426)..(428): n is a, c, g, or t
  misc_feature (430)..(430): n is a, c, g, or t
  misc_feature (436)..(436): n is a, c, g, or t
  misc_feature (439)..(439): n is a, c, g, or t
  misc_feature (441)..(441): n is a, c, g, or t
  misc_feature (447)..(448): n is a, c, g, or t
  misc_feature (453)..(453): n is a, c, g, or t
  misc_feature (456)..(456): n is a, c, g, or t
  misc_feature (458)..(458): n is a, c, g, or t
  misc_feature (461)..(461): n is a, c, g, or t
  misc_feature (464)..(464): n is a, c, g, or t
  misc_feature (469)..(469): n is a, c, g, or t
  misc_feature (473)..(473): n is a, c, g, or t
  misc_feature (480)..(480): n is a, c, g, or t
  misc_feature (482)..(484): n is a, c, g, or t
  misc_feature (490)..(490): n is a, c, g, or t
  misc_feature (500)..(501): n is a, c, g, or t
  misc_feature (504)..(504): n is a, c, g, or t
  misc_feature (510)..(511): n is a, c, g, or t
  misc_feature (530)..(530): n is a, c, g, or t
  misc_feature (532)..(532): n is a, c, g, or t
  misc_feature (537)..(537): n is a, c, g, or t
  misc_feature (539)..(539): n is a, c, g, or t
  misc_feature (541)..(541): n is a, c, g, or t
  misc_feature (557)..(557): n is a, c, g, or t
  misc_feature (559)..(559): n is a, c, g, or t
  misc_feature (563)..(564): n is a, c, g, or t
  misc_feature (566)..(566): n is a, c, g, or t
  misc_feature (571)..(571): n is a, c, g, or t
  misc_feature (574)..(575): n is a, c, g, or t
  misc_feature (583)..(584): n is a, c, g, or t
  misc_feature (586)..(586): n is a, c, g, or t
  misc_feature (589)..(589): n is a, c, g, or t
  misc_feature (595)..(596): n is a, c, g, or t
  misc_feature (599)..(599): n is a, c, g, or t
  misc_feature (601)..(650): n is a, c, g, or t
  Peptide Sequence Number=SeqID_12285
  Probeset Number=SeqID_19480
tnnnnnnaaggggnnnnnccgattgnnnacccccgaacacattccaatcaaaccaattaccttatttacttttcggtcaatcagactgggacaggcatagttctactggctatcttggtcatatggtccggctataatggtcgaacagttcgcaaacggtcagaagcagcaacctcagaccatcggaccacaacgtaccaaaacaagtgttaggaaacaaaacacttctaagacgtctggacgactcagtagagtcggccctacttttgatcagttgtttgccaaatatatgaagaagntcnttccnncctntncggntcnttnntaccnacnnnanttncnnngggncgatcctgtgnnnaattnttttnctnnattantcatntctccaatcctcnatnccncccctntgnacccccctnnctnnntnctcccnccngntattanntcccnaancnccnacnaaaanaagntaccttntnnntttctnattctcctcnnctncacccnncctctcacttgaacataancnccctncntncaacttaattcctctnancttnncncaccnctnnttttatcnnanccncttttnnttntnnnnnnnnnnnnnnnnnnnnnnnnnnnnnnnnnnnnnnnnnnnnnnnnnn

SEQ ID NO: 5078 - DNA, 650 bp, Zea mays
  misc_feature (1)..(50): n is a, c, g, or t
  misc_feature (52)..(52): n is a, c, g, or t
  misc_feature (55)..(56): n is a, c, g, or t
  misc_feature (62)..(62): n is a, c, g, or t
  misc_feature (65)..(65): n is a, c, g, or t
  misc_feature (67)..(68): n is a, c, g, or t
  misc_feature (76)..(77): n is a, c, g, or t
  misc_feature (80)..(80): n is a, c, g, or t
  misc_feature (85)..(85): n is a, c, g, or t
  misc_feature (87)..(88): n is a, c, g, or t
  misc_feature (92)..(92): n is a, c, g, or t
  misc_feature (94)..(94): n is a, c, g, or t
  misc_feature (110)..(110): n is a, c, g, or t
  misc_feature (112)..(112): n is a, c, g, or t
  misc_feature (114)..(114): n is a, c, g, or t
  misc_feature (119)..(119): n is a, c, g, or t
  misc_feature (121)..(121): n is a, c, g, or t
  misc_feature (140)..(141): n is a, c, g, or t
  misc_feature (147)..(147): n is a, c, g, or t
  misc_feature (150)..(151): n is a, c, g, or t
  misc_feature (161)..(161): n is a, c, g, or t
  misc_feature (167)..(169): n is a, c, g, or t
  misc_feature (171)..(171): n is a, c, g, or t
  misc_feature (178)..(178): n is a, c, g, or t
  misc_feature (182)..(182): n is a, c, g, or t
  misc_feature (187)..(187): n is a, c, g, or t
  misc_feature (190)..(190): n is a, c, g, or t
  misc_feature (193)..(193): n is a, c, g, or t
  misc_feature (195)..(195): n is a, c, g, or t
  misc_feature (198)..(198): n is a, c, g, or t
  misc_feature (203)..(204): n is a, c, g, or t
  misc_feature (210)..(210): n is a, c, g, or t
  misc_feature (212)..(212): n is a, c, g, or t
  misc_feature (215)..(215): n is a, c, g, or t
  misc_feature (221)..(221): n is a, c, g, or t
  misc_feature (223)..(225): n is a, c, g, or t
  misc_feature (228)..(229): n is a, c, g, or t
  misc_feature (238)..(238): n is a, c, g, or t
  misc_feature (241)..(241): n is a, c, g, or t
  misc_feature (247)..(247): n is a, c, g, or t
  misc_feature (250)..(250): n is a, c, g, or t
  misc_feature (253)..(253): n is a, c, g, or t
  misc_feature (266)..(266): n is a, c, g, or t
  misc_feature (271)..(271): n is a, c, g, or t
  misc_feature (276)..(277): n is a, c, g, or t
  misc_feature (280)..(280): n is a, c, g, or t
  misc_feature (285)..(285): n is a, c, g, or t
  misc_feature (290)..(292): n is a, c, g, or t
  misc_feature (303)..(303): n is a, c, g, or t
  misc_feature (307)..(309): n is a, c, g, or t
  misc_feature (311)..(311): n is a, c, g, or t
  misc_feature (314)..(314): n is a, c, g, or t
  misc_feature (316)..(318): n is a, c, g, or t
  misc_feature (321)..(321): n is a, c, g, or t
  misc_feature (326)..(327): n is a, c, g, or t
  misc_feature (330)..(330): n is a, c, g, or t
  misc_feature (333)..(333): n is a, c, g, or t
  misc_feature (337)..(337): n is a, c, g, or t
  misc_feature (339)..(339): n is a, c, g, or t
  misc_feature (343)..(344): n is a, c, g, or t
  misc_feature (349)..(349): n is a, c, g, or t
  misc_feature (352)..(352): n is a, c, g, or t
  misc_feature (623)..(625): n is a, c, g, or t
  misc_feature (633)..(637): n is a, c, g, or t
  misc_feature (644)..(649): n is a, c, g, or t
  Probeset Number=SeqID_19481
nnnnnnnnnnnnnnnnnnnnnnnnnnnnnnnnnnnnnnnnnnnnnnnnnnanaannaaaagnggntnngataaaannagnggtgngnnaagntnagaggaattaagttgnangnagggngnttatgttcaagtgagaggnngggtgnagnngaggagaatnagaaannnanaaggtancttnttttngtnggngnttnggganntaatancnggngggagnannnagnnaggggggtncanaggggnggnatngaggattggaganatgantaatnnagnaaaanaattnnncacaggatcgncccnnngnaantnnngtnggtannaanganccgnanaggnnggaangancttcttcatatatttggcaaacaactgatcaaaagtagggccgactctactgagtcgtccagacgtcttagaagtgttttgtttcctaacacttgttttggtacgttgtggtccgatggtctgaggttgctgcttctgaccgtttgcgaactgttcgaccattatagccggaccatatgaccaagatagccagtagaactatgcctgtcccagtctgattgaccgaaaagtaaataaggtaattggtttgattggaatgtgttcgggggtnnncaatcggnnnnnccccttnnnnnna

SEQ ID NO: 5079 - DNA, 720 bp, Zea mays
  Peptide Sequence Number=SeqID_12286
  Probeset Number=SeqID_19482
cccacgcgtccgcccacgcgtccggttagatctcccttgatccaaacagccccatacgttgccttgaccgattcggcaaccgtgctaatcgatctccgtgcaattccacctcccgaagacccgaactgagtcctccctccaccgacccaaaccctagcgcgcaccctcctccctccccctttcccggcgcgcgggccggcgtcggagatgcgggcgctgcctcccggacggcgggatggcactggcggccgtcgccggaggccaacgagtggttgggtggcggtgccccgcccgcacgcccgctaccgccggcgccctgtgacgcagaccgcgcccgccgcaccctgcgccatgactgatgcccatccgctgctcgtcccccacccgttccctcgcccccccgtgcggtcgctgcgtgcaacacgcgctgctgcgtgtctgccccacactcccccccgcctccgccctgtcggcccccgcgcttcgcgcgtgggccgtaggtttccccccctcacgacccggacggtacccctcccgcctgattccttcccctccccgcgcttcagtagcatcgcggcgcgcgttggccggcctcccgccttcccccccctctcctaccccgcccctttctctctccccccccccctccccctccccctccatcccgtcctcctcccctcctccctcgccccgccccgtcctctcccccctcatctcacc

SEQ ID NO: 5080 - DNA, 603 bp, Zea mays
  misc_feature (340)..(340): n is a, c, g, or t
  misc_feature (356)..(356): n is a, c, g, or t
  misc_feature (603)..(603): n is a, c, g, or t
  Probeset Number=SeqID_19483
acggcgggcgtttgagctgttcgccacctacccctccctccttcctttcatttttctggaagacttcttcggcctcacgcatctcctcctcctcctccaatccaattcacaaacacacacgggcaatcaattagcagaacccgcgccacccccccttcctcggagtcggagcgagtcgaggaacggctcgtctgcctctcccgttctccttcctctcctccccagaagatctgatccatcatcgaggactcgccgggaagaatcaaggatatatagataataaacaaacaaaggttcctccagagcccagaaaggagggaagtcaccggccgtcggcggnggaaggagatgtcggnacggcgcgggctcccggacggggcgtcgcttggcgcgtgggggcctctcgggtcacccttcgtcgggtggccatcgtcatctgcaacaagtacctcatcagcactctagggctttcttctttgccgacgaacgctgacgagctggcaaccctcatgggtggacttcttcacggcttgtacggttggcgcaagcggctggcgctttctcgagcccaagccggaacgaacgggcgggacgtcaatctcn

SEQ ID NO: 5081 - DNA, 603 bp, Zea mays
  misc_feature (1)..(1): n is a, c, g, or t
  misc_feature (248)..(248): n is a, c, g, or t
  misc_feature (264)..(264): n is a, c, g, or t
  Peptide Sequence Number=SeqID_12287
  Probeset Number=SeqID_19484
ngagattgacgtcccgcccgttcgttccggcttgggctcgagaaagcgccagccgcttgcgccaaccgtacaagccgtgaagaagtccacccatgagggttgccagctcgtcagcgttcgtcggcaaagaagaaagccctagagtgctgatgaggtacttgttgcagatgacgatggccacccgacgaagggtgacccgagaggcccccacgcgccaagcgacgccccgtccgggagcccgcgccgtnccgacatctccttccnccgccgacggccggtgacttccctcctttctgggctctggaggaacctttgtttgtttattatctatatatccttgattcttcccggcgagtcctcgatgatggatcagatcttctggggaggagaggaaggagaacgggagaggcagacgagccgttcctcgactcgctccgactccgaggaagggggggtggcgcgggttctgctaattgattgcccgtgtgtgtttgtgaattggattggaggaggaggaggagatgcgtgaggccgaagaagtcttccagaaaaatgaaaggaaggagggaggggtaggtggcgaacagctcaaacgcccgccgt

SEQ ID NO: 5082 - DNA, 540 bp, Zea mays
  Peptide Sequence Number=SeqID_12288
  Probeset Number=SeqID_19485
ctacgtaggcccccccccgatcctcgttcctctccgccccgcttgcgccgcgcctccgcccccgtctcctgtgagatcagctccggcggcacgcggatatgactacttcaaggcgtcttgctgacaggaagagtgcaaagttccagaagaacatcacaaagaggggttctgtgcctgagaccacggtgaaaaagagcaatgactaccctgttggacctatagttcttggattcttcatttttgtggtcattggatcatgtaagcaccgcaccaagcctttactagcctcccttctgttttgaaactatatctcttgcattttcgagatgtttgtactttttattagtcttttaagcttatgctaatttaagtgtcaacacgtcgtaatgcatagctcttcagcttttaagaaccatgtgaccaaccatttatggataatgttttcttcatgaacaggttgtataaatgtagcaagtttgattcattcgggagagttaatttaagtgattctctgtttagttgtcaaaaaaaaaaaaaaaa

SEQ ID NO: 5083 - DNA, 735 bp, Zea mays
  misc_feature (1)..(1): n is a, c, g, or t
  misc_feature (654)..(654): n is a, c, g, or t
  misc_feature (672)..(735): n is a, c, g, or t
  Peptide Sequence Number=SeqID_12289
  Probeset Number=SeqID_19486
nagtcttttccaatgcgttccttcttttgttagccctgtttctagcacttagacgaacatgttagtattcaaaaaatcaatttactaagtctagaaacataccttgttatatgatttgcacttctcactttatttagcacataagaaattaatcaaacgtgttgggcatttaatcaccaaaacattatagaaatggcccaagggcacatttccctttctcaaacccaagagaccctaaaaggattcttaagacgggctcaaaacgagttcggattaaggataaaaaagataagaagcgataatgggatggagttcaggaattcacaaattgaaggttttattgaggaagaggggcagatggcatcaagcatgagttctcttctccctacacatctcaacaaaatggtgtagtggagaggaagaatagaactctactggatatggcaagaaccatgcttgatgagtacaagacaccagaccggttttgggccgagacaattaacatcgcctgctactccatcaaccggttatatcttcactaaatcctcaagaatacatcatatgaactcctcactggtaaaaagcccaatgtttcatattttagagtctttgggagtaaatgctttattctggttaaagaggaaaaaatctaantttgctcctaagttgtannnnnnnnnnnnnnnnnnnnnnnnnnnnnnnnnnnnnnnnnnnnnnnnnnnnnnnnnnnnnnnn

SEQ ID NO: 5084 - DNA, 1322 bp, Zea mays
  misc_feature (1195)..(1198): n is a, c, g, or t
  misc_feature (1211)..(1212): n is a, c, g, or t
  misc_feature (1226)..(1228): n is a, c, g, or t
  misc_feature (1232)..(1232): n is a, c, g, or t
  misc_feature (1234)..(1237): n is a, c, g, or t
  misc_feature (1240)..(1247): n is a, c, g, or t
  misc_feature (1257)..(1259): n is a, c, g, or t
  misc_feature (1269)..(1269): n is a, c, g, or t
  misc_feature (1271)..(1276): n is a, c, g, or t
  misc_feature (1279)..(1280): n is a, c, g, or t
  misc_feature (1283)..(1286): n is a, c, g, or t
  misc_feature (1289)..(1289): n is a, c, g, or t
  misc_feature (1293)..(1298): n is a, c, g, or t
  misc_feature (1301)..(1310): n is a, c, g, or t
  misc_feature (1313)..(1322): n is a, c, g, or t
  Peptide Sequence Number=SeqID_12290
  Probeset Number=SeqID_19487
aattcggcacgaggtctgcagaacggtgattctgaggagttccatgcaaaactttgtcaaactaagatggatcttgtcttggctttgtcaaacactagcaaggagagcacgaaatacatccactctaccatccttaaattacagattctagatcatgctactatggtttgggacctgcgttggaaccttaatcccaatcaaacttcaaaatctcctgtaaccaaggaattttctcacatatctactgtccctaaagggatacagttggagttgttggataaagagtggaacttaattatgttccaagcagaacggaatcttgatctatttgaaccttttctggcatttaggcgtgccctccttaagattttaggttgtgaagaacatcttgtaaaacatttatttcaatctgcttctgcgctccggaagggattaaggttttctttggcagcggcagctttatatgaactcaaagaactttgttttcacagagatgagagcactatgacaaatacctatttgcttgcacggcttgaagacgctaaattgctcagagctcaagggcagcatgatatggctattagtcttggaaaatacatactacagaagctttctgacaagaaaaacctgtcagatgtctatcgattagttggcaagtggctggctgaaacaagatcaagcaactcaagaactatcattgaggactatttaagaccttctatagatctctctgaatttgagaagagtacagataaaaggtacatgtccaggcagtgtcgaacacatttccatctagcacattatacatatagtttgttcagaagctatgaggaaagactctcatctaacgaatggcaagcagctctgcgattaaggaaatacaagactagggagttggagatactgattaaaagactgagaagttcatctaagggtgtgaagactgattactcagtaaaaatccaagagttacagaaacaacttgcacttgacagagaagaagcagagaaaatacaggatgatcgcgataatttcttaaatctagcacttcaaggctaccaacgttccattgttgttggtggcaaatatgacctacaagtggtttttcggttggtctcgttgtggtttagtcttttctcaagggatcaagttgtgaaagcaatgttgaaaaccacaaaagaggtccaaacctacnnnntcataccactggnntatcaaattgcttnnngacntnnnngcnnnnnnnntgctcagggnnnatttaacttncnnnnnncgnnagnnnntcntttnnnnnnaannnnnnnnnnatnnnnnnnnnn

SEQ ID NO: 5085 - DNA, 599 bp, Zea mays
  misc_feature (252)..(254): n is a, c, g, or t
  misc_feature (262)..(266): n is a, c, g, or t
  misc_feature (289)..(310): n is a, c, g, or t
  Peptide Sequence Number=SeqID_12291
  Probeset Number=SeqID_19488
ccggccgggccggggcaaattaaatttgtctataaatttagccatcgtccacacagcttaagattgtaaaatcgttgtgctagcttgtatgtgctgagctttggctccccggcgcaccgctaagcctcaactcgcaggcagccatgccgatgagaatcgagcgtgatctccacatggccatagggaacggagaaactagctacacaaaaaattctaggattcaagagaaagctatgtttcagatgaagtcgnnncttgaggnnnnnactagagcagtatgcacaactcnnnnnnnnnnnnnnnnnnnnnnggccgacttaggagaggggtatattggacccatactgctcatctatagggccccccactgaggggttgttttcgggtgattggcatcatatactcgccattgcaaagaacacgaccgacgacatgactacccacaacttcagttcttcctgaatgacctgccgggaaacgacttcaacaatctcttcctgctcatccagcaggtcaataagtcgatggcaagaaaccacaagggtgaggcagctgaggcactgcctccgtgctatatctctggtttgtcaggctccttc

SEQ ID NO: 5086 - DNA, 730 bp, Zea mays
  misc_feature (10)..(14): n is a, c, g, or t
  misc_feature (25)..(29): n is a, c, g, or t
  misc_feature (34)..(34): n is a, c, g, or t
  misc_feature (44)..(44): n is a, c, g, or t
  misc_feature (46)..(46): n is a, c, g, or t
  misc_feature (709)..(730): n is a, c, g, or t
  Peptide Sequence Number=SeqID_12292
  Probeset Number=SeqID_19489
ccgggtcgannnnncgtccgctccnnnnntgccntccaccacgnancgccaagcgccatatctgcaggaagcaccgggccaggcacgtcgcttcaccaccccaccccaccccaccttccccttacaccaccaccaccgcaagccaagaggcacggccacgcatgggtttgcacgagggctactcggagctggtgctcccgaagcagctgctccacctgctgctgctgctggggtacgtccgccgcttcctcctctgggcgttcgacgccgtgggcctcggcgacctgctggatctcggggacgaccaccaggcgccgccgccgccgcagcagccgcagccgcagcaccggcgggcggagttccgggcggccatgccggcgatggtcatcgaggaggccctccccgtggcgcggttcgacgagctggaggcgcgcgtcgtcgttggcggggactgcgcggtgtgcctcggcggcatcggcggcggcgacgaggtgcggcggctcggcaactgccgccacgccttccaccgcgcctgcctcgaccgctggatggagcacgaccagcgcacctgcccgctctgccgcgcgccgctcgtccccggcgcgctctggcccgccgacgcctccgacctggacttctcctacctcggcgcgcccgtgccctccccgacgctgctgcggccgcacgagctgctgctgctcgcgggccnnnnnnnnnnnnnnnnnnnnnn

SEQ ID NO: 5087 - DNA, 696 bp, Zea mays
  Peptide Sequence Number=SeqID_12293
  Probeset Number=SeqID_19490
gctgtgcatattttctgcgcagattcttccttgcgtctgctaaaggattgtacatcgtccgaaaacccagcatcaggcgacaaaggtaaccgcaagatcatgttgctatagctagctttgttacacgttttctaatattgactaaaccattcttttctctctcttttttattttccattcccaataagagagagtccctcccccattcttgaataaccgttgctagcttataatatccccccccattgatatggttgttccattccccaatttgttttcaggtcggggtgaaggtgccagaacctataaagccgaaggaccaccacccaccgactgatgatgaaggccctctcttcaaccaagtggtcgcaaggccaggagcatataaatatatatgccctccatgctaggacatcttcttggttttggcatatatatagctccgaattccatttcttctgctggtactagatatatacccaatagtaaggtagctagtagagctatgtgagttatgttgtactgttggtgtttcctgatatcaatgtgcatatagttttgatctctttgtaatgggggaaataaaatctacaaaaggccggaagaaacatgctgccattggtctcaacaagtccacgctgataaataaggcagatatattatcacttgttacccaaaaaaaaaagaaaaaaaaaa

SEQ ID NO: 5088 - DNA, 696 bp, Zea mays
  Probeset Number=SeqID_19491
ttttttttttcttttttttttgggtaacaagtgataatatatctgccttatttatcagcgtggacttgttgagaccaatggcagcatgtttcttccggccttttgtagattttatttcccccattacaaagagatcaaaactatatgcacattgatatcaggaaacaccaacagtacaacataactcacatagctctactagctaccttactattgggtatatatctagtaccagcagaagaaatggaattcggagctatatatatgccaaaaccaagaagatgtcctagcatggagggcatatatatttatatgctcctggccttgcgaccacttggttgaagagagggccttcatcatcagtcggtgggtggtggtccttcggctttataggttctggcaccttcaccccgacctgaaaacaaattggggaatggaacaaccatatcaatggggggggatattataagctagcaacggttattcaagaatgggggagggactctctcttattgggaatggaaaataaaaaagagagagaaaagaatggtttagtcaatattagaaaacgtgtaacaaagctagctatagcaacatgatcttgcggttacctttgtcgcctgatgctgggttttcggacgatgtacaatcctttagcagacgcaaggaagaatctgcgcagaaaatatgcacagc

SEQ ID NO: 5089 - DNA, 302 bp, Zea mays
  misc_feature (94)..(94): n is a, c, g, or t
  Peptide Sequence Number=SeqID_12294
  Probeset Number=SeqID_19492
aaagcaaggcatcaatatggtttgttgatccaggccgtcttcgctcgctgaccacccgcctcgctcgtcgagcatatagccatgccgtggcgangcacaggctcagagggatagataggtccagtgcaagcgagcaggagcaggcatcttcatccagggagagggtgggtggcccgtggcccacatcgatgcgatgccggttcacgttgcgctcctcgccgtgccggcggtggccgctgggttcctgcaggcgttccagttcgcgttcctgctgtggccttcaacctggcgctgccgctggc

SEQ ID NO: 5090 - DNA, 555 bp, Zea mays
  Probeset Number=SeqID_19493
cgctctgctggtcgtgaggtcgcccatccccttctggccttctctctcgcatcctcgcgctgccgccgccgccgtcggtcctgcacccctatcttcttctccctcccatactcgtgcggctgccatacaccgctgctaaacatggaatccttacgcctgttcagaacgtcaggtgtttgtatttcggttgcaattgagtgattgggaaacctgattggccagaagtattgtcgggtaaccaatgggaagcaatgaccctagcacaccctccaagtacttaaaacagtggagggtcgttttgggcacatggcgtcgagaagaaaagtagaagcatgatctagttcgattttgattggaagagaaatttaatttgattgaaggtggacaactggacatcagattcgaagatgtgttccgtctttttcctgaagataaatttaatttgatcaaagttgtggatgatattttgtaatggtactactattttataatatatacttatttcatattaaaaaaaaaaaaaaaaaaaaactcgagcccggggcgactctagag

SEQ ID NO: 5091 - DNA, 555 bp, Zea mays
  Peptide Sequence Number=SeqID_12295
  Probeset Number=SeqID_19494
ctctagagtcgccccgggctcgagtttttttttttttttttttttaatatgaaataagtatatattataaaatagtagtaccattacaaaatatcatccacaactttgatcaaattaaatttatcttcaggaaaaagacggaacacatcttcgaatctgatgtccagttgtccaccttcaatcaaattaaatttctcttccaatcaaaatcgaactagatcatgcttctacttttcttctcgacgccatgtgcccaaaacgaccctccactgttttaagtacttggagggtgtgctagggtcattgcttcccattggttacccgacaatacttctggccaatcaggtttcccaatcactcaattgcaaccgaaatacaaacacctgacgttctgaacaggcgtaaggattccatgtttagcagcggtgtatggcagccgcacgagtatgggagggagaagaagataggggtgcaggaccgacggcggcggcggcagcgcgaggatgcgagagagaaggccagaaggggatgggcgacctcacgaccagcagagcg

SEQ ID NO: 5092 - DNA, 331 bp, Zea mays
  misc_feature (1)..(1): n is a, c, g, or t
  Probeset Number=SeqID_19495
ncaggatctgttctataggatcgtaccgttgcatccttgattaataaggaggcaagcacttaagcctggttgatgagtcatgacctgtgggccagagcgtgattaacggctaggattttggctctgatgtcatgacctttgggccagagcgtgattaacggctaggattggctctgatgctttgtcctgttgctgtagaggatcgttcctgtcaggcttgcctggctgggatggcccacaggttgtctgacaggcacttaaattgcatatagtctaaaaaaaaaaaaaaaaaaaaaaaaaaaaaaaaaaaaaacctccgggggggggcccg

SEQ ID NO: 5093 - DNA, 659 bp, Zea mays
  misc_feature (2)..(2): n is a, c, g, or t
  misc_feature (9)..(13): n is a, c, g, or t
  misc_feature (33)..(38): n is a, c, g, or t
  misc_feature (48)..(50): n is a, c, g, or t
  misc_feature (60)..(61): n is a, c, g, or t
  misc_feature (73)..(75): n is a, c, g, or t
  misc_feature (81)..(87): n is a, c, g, or t
  misc_feature (323)..(323): n is a, c, g, or t
  misc_feature (370)..(371): n is a, c, g, or t
  misc_feature (400)..(400): n is a, c, g, or t
  misc_feature (419)..(419): n is a, c, g, or t
  misc_feature (421)..(423): n is a, c, g, or t
  misc_feature (426)..(427): n is a, c, g, or t
  misc_feature (440)..(440): n is a, c, g, or t
  misc_feature (442)..(442): n is a, c, g, or t
  misc_feature (444)..(444): n is a, c, g, or t
  misc_feature (450)..(450): n is a, c, g, or t
  misc_feature (464)..(464): n is a, c, g, or t
  misc_feature (467)..(467): n is a, c, g, or t
  misc_feature (469)..(469): n is a, c, g, or t
  misc_feature (480)..(480): n is a, c, g, or t
  misc_feature (483)..(484): n is a, c, g, or t
  misc_feature (487)..(488): n is a, c, g, or t
  misc_feature (497)..(497): n is a, c, g, or t
  misc_feature (501)..(502): n is a, c, g, or t
  misc_feature (504)..(504): n is a, c, g, or t
  misc_feature (508)..(508): n is a, c, g, or t
  misc_feature (512)..(512): n is a, c, g, or t
  misc_feature (516)..(516): n is a, c, g, or t
  misc_feature (518)..(518): n is a, c, g, or t
  misc_feature (523)..(523): n is a, c, g, or t
  misc_feature (536)..(536): n is a, c, g, or t
  misc_feature (538)..(538): n is a, c, g, or t
  misc_feature (542)..(542): n is a, c, g, or t
  misc_feature (553)..(555): n is a, c, g, or t
  misc_feature (560)..(561): n is a, c, g, or t
  misc_feature (566)..(567): n is a, c, g, or t
  misc_feature (570)..(571): n is a, c, g, or t
  misc_feature (577)..(577): n is a, c, g, or t
  misc_feature (579)..(579): n is a, c, g, or t
  misc_feature (584)..(584): n is a, c, g, or t
  misc_feature (588)..(588): n is a, c, g, or t
  misc_feature (590)..(592): n is a, c, g, or t
  misc_feature (594)..(595): n is a, c, g, or t
  misc_feature (597)..(597): n is a, c, g, or t
  misc_feature (599)..(659): n is a, c, g, or t
  Peptide Sequence Number=SeqID_12296
  Probeset Number=SeqID_19496
gncacgcgnnnnnccacgcgtccgcccacgcgnnnnnncacgcgtccnnncacgcgtccnnccacgcgtccgnnnacgcgnnnnnnnacgcgtatcgcctcgacgaacaaaccacacaccccacctaccccggccggaccggcaggcagcacaacatggacctcgccctcctggagaaggccctgctgggcctgttcgccgcggctgtggtggccatcgccgtggccaagctgagcggcaagcggtaccgcctcccaccggggcccccgggcgcccccgtggttggaaactggctgcaggtgggcgacgacctgaaccaccgnaacctgatggccatggcgaagcggttcggtgacatcttcctgctgcnncatgggcggagcgcaaccctggtggttgntgtcgaccccggagctgcncnnngcnngagctcccccccntnanttgcgntagtcttttgctcncantntttccgcatcnttnnccnnctcccctcntctnncnaatnctcnttcnantcccnactcccctaccgnantagnttaaatatccnnnctccnncactnntannccgatnantctcntctnannntnnancnnnnnnnnnnnnnnnnnnnnnnnnnnnnnnnnnnnnnnnnnnnnnnnnnnnnnnnnnnnnn

SEQ ID NO: 5094 - DNA, 642 bp, Zea mays
  misc_feature (369)..(369): n is a, c, g, or t
  misc_feature (418)..(418): n is a, c, g, or t
  Peptide Sequence Number=SeqID_12297
  Probeset Number=SeqID_19497
attccaccgccgcacacctcctgtcttccttcaccttcgcgctccgccgccgccgtcgattcgtgctgctctcacccctaacctgtccaacatcgccgggggaggggagcagcagaagaaactccccttacctcgggctatcgcctgaagataaagtggggtcttgtaggggagccttaagggggagcaaaagggatagtataggggagagatggaggaattcattttcttctgtccggcttcgccccctggttacgtccccgctactaaccctaggatcattctgtcttttctcgtttcttatccgactcttcttcgttttatgcctatcagttatgaggttgaacgccttcagaagcttctctactnagatagtgtaaatagtagacttgttcgagtttagctgggctgggagaantagtctctggtccgtgttatatctgctagcaataatggctgcgatgaaacgagaagtattgggtgaatgtgaaaggaacataaatagtctcaagaaaagcgggagaaccccgctgcatatgctgctggcgtattcctgacctctgaatgcatcaccaactggcatgattctgctgttagggtcctcttgaaaaaacgaaaggaaaaatcggggcccttaaaaag

SEQ ID NO: 5095 - DNA, 475 bp, Zea mays
  misc_feature (1)..(80): n is a, c, g, or t
  Probeset Number=SeqID_19498
nnnnnnnnnnnnnnnnnnnnnnnnnnnnnnnnnnnnnnnnnnnnnnnnnnnnnnnnnnnnnnnnnnnnnnnnnnnnnnnnaacaggatggggaaaacttgagtgtatagtatagcgctagcttagcacgtcgctgtcaattgcttcgtctgaacgaagcagccggtcaactccgatccatatatatcactacatacggaaggcttaaattcaagccaggaacctcaaacggcaagcatactagcaggcagcataaggtagtaccatgaactgtgagcgagatattcgtttcgagcttctggcacggctctgccccaactctactggagctgatataaggagcgtttgcacagaagccgggatgtatgccattcgtgcccgcaggaaaacggtgacagaaaaggattttctcgatgctgtcaacaaggtcatcaagggctaccagaagttcagtgcaacacccaagtatatggtgt

SEQ ID NO: 5096 - DNA, 427 bp, Zea mays
  misc_feature (425)..(427): n is a, c, g, or t
  Peptide Sequence Number=SeqID_12298
  Probeset Number=SeqID_19499
gccgccgccacgccgaactacaacaaccgcacagtgcccgtgtaagtagccgtagtagatgcatctgcatgcatgcatgcaaatgttatataaggaacaaagtacgtacgtaacgtaacgtgtcgtgtgtgtggctgttgcacggtagggtacacgcactgttctccttcgatctggtcgaggttgtttgtcgaggcacagccgtcgccttccgttacgtcattgttttccgttctctgtcttgtgcttgtgcatgttcggttgaacttgcgcgatcgatctgatgggatcagagacgtgctcctaaataaccggaggtcaccgtcggatatagacgtgctctcctggatgttgtaccaagcgcgtcacgctgctttattagatcaatcaagtactgttgttttcgttcaaaaaaaaaaaaaaannn

SEQ ID NO: 5097 - DNA, 971 bp, Zea mays
  misc_feature (3)..(3): n is a, c, g, or t
  misc_feature (12)..(12): n is a, c, g, or t
  misc_feature (28)..(28): n is a, c, g, or t
  misc_feature (39)..(39): n is a, c, g, or t
  misc_feature (42)..(42): n is a, c, g, or t
  misc_feature (58)..(58): n is a, c, g, or t
  misc_feature (80)..(80): n is a, c, g, or t
  misc_feature (101)..(101): n is a, c, g, or t
  misc_feature (187)..(187): n is a, c, g, or t
  misc_feature (293)..(293): n is a, c, g, or t
  misc_feature (527)..(527): n is a, c, g, or t
  misc_feature (550)..(550): n is a, c, g, or t
  misc_feature (566)..(566): n is a, c, g, or t
  misc_feature (601)..(971): n is a, c, g, or t
  Probeset Number=SeqID_19500
cangggggggcngacatggggttgcgcnaaaaccccccnttnttttccatgcccccgngagggaagggcccgcttttccngttccgattaaagaaatccantttccagagaagtccccagttagttcaaacccactcggttcgtggtaaaagtaacatttggaagaaaccctcatcctctccccatntgagatattccctcgctcgctcaccaagacgcagcggctgctgtcaacaactggctgtccgccaccgcatttaagcttcaccctcccctccggcctctcctccatntaaaactcggatagatctcagtgccagtgcttccctgttctctccatcaagaaacagcaaagatccagtgcagagagagagaagcgccatggctctctgaccaagaaaagaaaagaaagaggtagagagagatctcactcagcccagtctctcacaacacaatgccggcaaccaccaagccgatcttgctcccaagggcgtgggcagcagcgccactcctcctcctgctgctgntcgtcctgcacggaagaggaggncactgcgtcggcatgncaggcggcgcagctgcagatggactcggaggcgcnnnnnnnnnnnnnnnnnnnnnnnnnnnnnnnnnnnnnnnnnnnnnnnnnnnnnnnnnnnnnnnnnnnnnnnnnnnnnnnnnnnnnnnnnnnnnnnnnnnnnnnnnnnnnnnnnnnnnnnnnnnnnnnnnnnnnnnnnnnnnnnnnnnnnnnnnnnnnnnnnnnnnnnnnnnnnnnnnnnnnnnnnnnnnnnnnnnnnnnnnnnnnnnnnnnnnnnnnnnnnnnnnnnnnnnnnnnnnnnnnnnnnnnnnnnnnnnnnnnnnnnnnnnnnnnnnnnnnnnnnnnnnnnnnnnnnnnnnnnnnnnnnnnnnnnnnnnnnnnnnnnnnnnnnnnnnnnnnnnnnnnnnnnnnnnnnnnnnnnnnnnnnnnnnnn

SEQ ID NO: 5098 - DNA, 463 bp, Zea mays
  Peptide Sequence Number=SeqID_12299
  Probeset Number=SeqID_19501
gtcctcttcaaccccgtttcgccgcccctagcccaaatcccccacctactcgccgccggcgccgtctcagcctcatccttctccgctagccatggccgccgcgggtcccgggctctactccgagatcgggaagaaggccagagatctcctatataaggactaccacacggaccgcggcgtgctgcaccaggcggcggtgacgcagctcggcaagtgggagtgcctgctcgtgaccatggcttggggtttcctcttccgcatcctcttctacttcagcctcgtgctcggcagcaagaacaagagaaggtgatcgcgccacggtacggactagggatacgcgagcgcgctcgcgcgcgccgttgtacatttgaatggtgggaactcgcaggccatggtccacggggagaaagtatgcgtgcagaaggaggtgaaggaagacattaattaggtggtggtgattgta

SEQ ID NO: 5099 - DNA, 903 bp, Zea mays
  misc_feature (78)..(78): n is a, c, g, or t
  misc_feature (601)..(903): n is a, c, g, or t
  Peptide Sequence Number=SeqID_12300
  Probeset Number=SeqID_19502
attatgtgcaacattaatatccattagcagaattatttgtgtatgcatcactcctagcagtgtatttgagattagagnccgctataataaaattttgatagggccgtcgcgtgtcgttgcttctatttctatctgatcagatttggtcctgacgctggttttgaatagttatgcccctatatgtatctacagataagatgatcattgttagttatcggattttctgattagtctgcagatacgataaatggtaggactggagttatcggcataaatggttactgttgatgattgtgtcaaggagtttgctagaattgtccgtgagaaactaggacctaagaatgcaatcttcaccaaagcagcagatgccatggatctcagaacgcatagcttggagtttgcgtgtgtccaacagaacatctataatcatttggaatatttgttttttttcagttttatatttttccctgtggaactcatgaagctgaaatagatcgtgtgttgtcaggacagtgtatttttggtgcacagatatttgttacaaaaaaaaaaaaaaaaaaaaaaaaaaaaaaaaaaaaaaaaaaaaaaaaaaaaaaaaaannnnnnnnnnnnnnnnnnnnnnnnnnnnnnnnnnnnnnnnnnnnnnnnnnnnnnnnnnnnnnnnnnnnnnnnnnnnnnnnnnnnnnnnnnnnnnnnnnnnnnnnnnnnnnnnnnnnnnnnnnnnnnnnnnnnnnnnnnnnnnnnnnnnnnnnnnnnnnnnnnnnnnnnnnnnnnnnnnnnnnnnnnnnnnnnnnnnnnnnnnnnnnnnnnnnnnnnnnnnnnnnnnnnnnnnnnnnnnnnnnnnnnnnnnnnnnnnnnnnnnnnnnnnnnnnnnnnnnnnnnnnnnnnnnnnnnnnnnnnnnn

SEQ ID NO: 5100 - DNA, 170 bp, Zea mays
  misc_feature (157)..(157): n is a, c, g, or t
  Peptide Sequence Number=SeqID_12301
  Probeset Number=SeqID_19503
aacatctcccgcaacgcaagcgcaacagaagcatactacgccgctacgcgctgggcggtgccgcacaggcacagctatagatactactccagcagtgttgcatagaaatggacagcggcagcagcctcgtggacgacaccagcggcggcggcgcgtncacggacaagcta

SEQ ID NO: 5101 - DNA, 1077 bp, Zea mays
  misc_feature (5)..(7): n is a, c, g, or t
  misc_feature (349)..(349): n is a, c, g, or t
  misc_feature (468)..(471): n is a, c, g, or t
  misc_feature (507)..(507): n is a, c, g, or t
  misc_feature (518)..(526): n is a, c, g, or t
  misc_feature (530)..(532): n is a, c, g, or t
  misc_feature (534)..(534): n is a, c, g, or t
  misc_feature (545)..(546): n is a, c, g, or t
  misc_feature (568)..(572): n is a, c, g, or t
  misc_feature (585)..(586): n is a, c, g, or t
  misc_feature (589)..(589): n is a, c, g, or t
  misc_feature (599)..(600): n is a, c, g, or t
  misc_feature (625)..(627): n is a, c, g, or t
  misc_feature (634)..(635): n is a, c, g, or t
  misc_feature (1077)..(1077): n is a, c, g, or t
  Probeset Number=SeqID_19504
ccgannntgtggcaccttagccatgaggacagaatcttagttaccagaactttacaagatggttacgttccaacttttaagccaatatatgcaaaatgccacattagtgttctgaattaatgtcctgcacttgtcgacacctttaaccaaacaacatgacgcccatctttgatgcgagatgaagtgaatcattctctacattgcagggtgacatcctggaggacccagcaaatgagccaaaggaagatatgtatatgatgtcgattgctccagaaaatgcgccctcgaaacctgagtatttggagattggtatcattgctggtgttcctgtttcaatcaatggccgagncctctcaccagcatccctcctcgcggagctcaatgaaatcggtggaaagcatgggattgggcgtatcgacatggtggaaaacaggctggtcggcatgaagtcacgtggggtctatgagnnnnccggtggcaccatcatggcagccgcggtacgcgagntggagtccctnnnnnnnnncagnnngncaatgcagtgnnatgagtggtaggacatcattgnnnnnaagtacgctgagnnggnctacgcaggnngctggtttgacccgcttcgtcagtnnnttgacgnnttcatggagaagattaccgcgacgaccactggttcggtgaccctgaagctgtacaaggggtcggtgaacgtcgcgtcccggaagagcccctacagtctgtacagggaagatatctcctcgtttgagaatggggagatctacaaccaggctgacgcggaggggttcatcaggctgtatggtctaccgacacgggtccgggcaatgctggaaaagggtatctgagtagttgtctggttgattgttagaaataaaaatctctttcatgggagtttcctagtgattgcagactgatgggtatttgatgggattgtgttgtacactttctttgagtttgtcccaatgtatttgggtgacaattgagtttaccatgccatgttaccatccgtttatgctatacagtccaatgcaaaatattatgattaatacatcagctggttttctn

SEQ ID NO: 5102 - DNA, 601 bp, Zea mays
  misc_feature (601)..(601): n is a, c, g, or t
  Peptide Sequence Number=SeqID_12302
  Probeset Number=SeqID_19505
taaaagaaactatgatgctgaacctgcacaccataccgagaaagtggagatacagttggtccaaaaagatattcagtctgttgctgatgcacaccatacaattgatgagaattcgaggaagcagcaaccttatgtgtctgatgagaaggaacatttgcagaaaccagtgtctcctgtggacactaacaggacccaaaaagatgttcagaagcttaacagaagagctgtccgccatttggaaaaggagctgatggaggcagtggaacttgatctcaacggcctaccaaaaaatggatttggcgcagtcagatttcccgaagcagaaggcaacaaaacagttcaactaaatgtcaagccaaatgaggccgtgagagatttccatattgaaaaagagaatgatgaagtccttcattgttcacgtttgcctggtggttctgaacacaatgggggacatgcagattcagggctaagagctcagggcctagagaatcaagggcatccagtgagtcctcttagtggtaacactagaaaaaaggctccttacactaagctgaatgctgtaaacataaagaatcctactgagaaacaagcaaacaatggn

SEQ ID NO: 5103 - DNA, 639 bp, Zea mays
  misc_feature (1)..(1): n is a, c, g, or t
  misc_feature (633)..(639): n is a, c, g, or t
  Peptide Sequence Number=SeqID_12303
  Probeset Number=SeqID_19506
ntacctcacccatacatggcaccatctactgcttccctatcccccgcctgctgtgttcactaacccacctccgtcccccgttgcgggtccccctccccgtcagaaggttccccagatttatagcccggagtagcggcggcgacggggcatgcgctcggagcccaaaccagcttacaacgagagcaaggccatccctgatgccttcttccttgagaaggcctccgcggaggcgttcacggagcgagtcgagtcggtattggcctagtgggcgaggtattcaacatcgtcaggcagtggcaaactcagcagcagaagcaggtctaggagttccagaagtagcaaagttttattatttcctggctggagagcagtttacatgaaaagataattgaggcatgcaacaaccttattgcaaagctcaagtaagtgaggtagtcacgaatggctcagttgatgaattccctgaatcacatttcccatatggctcggaaacaacggttgggtggaaatgccccactggagtatgccagctttacaataagatttggctcattgaatgtgaccccatggctttactcggtcacaaacatcttgaagcaagctcagcgaagtaggtaaaggcctccctgaatnnnnnnn

SEQ ID NO: 5104 - DNA, 666 bp, Zea mays
  misc_feature (284)..(284): n is a, c, g, or t
  misc_feature (617)..(666): n is a, c, g, or t
  Peptide Sequence Number=SeqID_12304
  Probeset Number=SeqID_19507
tcgtctccactgctctgctgctcctcgcaccgccgccgccgccgccgcagcgacgtaatggcttccgccgcggtgctccggaacgccggctcccggcgcctcttctcctaccctactctccgcgccgctgcgatatatgtaccttctgcgctacccgatgcgcccgcggcggcggcagcgccggcccagccgccaccgacggccgggaccctcctgggcgaggtctatggccaccttcacgcgcacgaagccccatggtgaacgtcggcaccattggggcacgntcgatcacggcaaaaccactcctcactgctgccatttaccaaggtcctggccgagggcgagaggagggccaaaggccgttgcttttccaacgagatcgacagggcttcccgggaggaagaaggccagaggaatcaccattgcgacagctcaccgtcgaaggaatgagaaccggctaaaaggcattatggcttcccccgtgggatggtcaaggtcacggcccaagattatgtccaagaacatgatccactggagctgctcaaaagggggtaggggggggaagttttcttgggccgggcccaacactccctgaaagggccccgatgccaccaaannnnnnnnnnnnnnnnnnnnnnnnnnnnnnnnnnnnnnnnnnnnnnnnnn

SEQ ID NO: 5105 - DNA, 666 bp, Zea mays
  misc_feature (1)..(50): n is a, c, g, or t
  misc_feature (383)..(383): n is a, c, g, or t
  Probeset Number=SeqID_19508
nnnnnnnnnnnnnnnnnnnnnnnnnnnnnnnnnnnnnnnnnnnnnnnnnntttggtggcatcggggccctttcagggagtgttgggcccggcccaagaaaacttcccccccctacccccttttgagcagctccagtggatcatgttcttggacataatcttgggccgtgaccttgaccatcccacgggggaagccataatgccttttagccggttctcattccttcgacggtgagctgtcgcaatggtgattcctctggccttcttcctcccgggaagccctgtcgatctcgttggaaaagcaacggcctttggccctcctctcgccctcggccaggaccttggtaaatggcagcagtgaggagtggttttgccgtgatcgancgtgccccaatggtgccgacgttcaccatggggcttcgtgcgcgtgaaggtggccatagacctcgcccaggagggtcccggccgtcggtggcggctgggccggcgctgccgccgccgcgggcgcatcgggtagcgcagaaggtacatatatcgcagcggcgcggagagtagggtaggagaagaggcgccgggagccggcgttccggagcaccgcggcggaagccattacgtcgctgcggcggcggcggcggcggtgcgaggagcagcagagcagtggagacga

SEQ ID NO: 5106 - DNA, 632 bp, Zea mays
  misc_feature (514)..(514): n is a, c, g, or t
  misc_feature (601)..(632): n is a, c, g, or t
  Peptide Sequence Number=SeqID_12305
  Probeset Number=SeqID_19509
ctttttttttcctttccctacggcggcggcgctggagcagctaagcagcagcaagatgttcgacggcttcaatctccgcttccgccgccagagcgccacccttggctgcgccatgactttctccatctacctgcccccgtccccggtgtccaaccttcccgtgttgtactggctctcgggtctcacctgcaccgaggataatttcatcataaagtccggcgcccagcacgccgccgctgcccacggcatcgccctcgtggcacctgacacctccccacttatcttctgcatgatggattcatttgatggaactattttaggcctctgattgcggaatacagatcgatttgcttgtcacaaggataaagcagatcccacgatgaggacagtagaagcgtgggcatccaaatgaataaccagggggagagcagtctaaggcaaattttgctagggctggagcagtcacaagagctaggataatcagtcataggtcctgctagccagggtggaccanccataaaacccctaacagtcaagggaaattttgctagggggaggaaatttggggcaccctggcctggacccctggggtgggtgaaannnnnnnnnnnnnnnnnnnnnnnnnnnnnnnn

SEQ ID NO: 5107 - DNA, 1129 bp, Zea mays
  misc_feature (1)..(1): n is a, c, g, or t
  Peptide Sequence Number=SeqID_12306
  Probeset Number=SeqID_19510
ncagtctcctgacgctctatgctaactggatattcacatcacggtttgagttctgatgctttgaaattcttcagatgcatgcgggcagagaatattagaacagatgagtttgggctctctgctgctctgaggtcttgctcagaccttgctgtacttcggctaggtagacaagtacacagtttggtcgtccaatctggttttgcttccaatgactttgtttcaagctcgctgatcttcatgtattctaagtgcggagtgcttggtgacgcaagaaagtccttcgaagaggcagacaagagtagctctgtgccctggaactctatgatgtttggttatgctcaacatgggcaggcacagactgtgaccgacctcttcaatgagatgctggaccttgaggttcctttggatcatgtgacctttgttgccctgattaccgcctacagccatggtggtcttgtagatgaagggtcagaaattctcaatacgatggaaactaggtataaaattccctatgcgaatggagcactatgcatgtggtgttgatctatatgggagggcaggacagcttgataaagcaaaagagcttattgagtctatgccatttcagccagacgccatagtttggatgacccttttaggtgcttgcagaatccatgggaatatggaactagcaagcgatgtggcaaggcatttatttgtggcggaacctcgacagcactccacctacgttcttctctccagcatgtattctggtcttggtatgtggagtgacagagcaacagtgcagaaggtaatgaggaacagggcattaagcaaaattcctggatggagctggattgaggtgaaaaatgaggtgcattcctttaacgcagatgataggtcacacccaaggatggttgaaatctttgatatgttaagaatgctgcttcaggttgcaccgaggctttgctcttctggaggtgaagagattcccatgacaatatccagtgaaacatgacctgcaaccttttgtcttgcacattttttcttaacaacccagtgttatcattgtttttttttttttgaaaagaaatttactgtaggagactcctacagtatttattttattgtttcagacgattactttaca

SEQ ID NO: 5108 - DNA, 478 bp, Zea mays
  Peptide Sequence Number=SeqID_12307
  Probeset Number=SeqID_19511
aataaaagtgaaattccattaccttgctgtctcggtctgtcggccatcgccggttgcgcagcgggcagcggctcacgtcgacggggaagactccggaggccacgggcgttacattctcctgccgtatttttgcgatcaaggccttcggcaacgaagccgtcagcttcgtcccatgcctttgcagcatcaatgtttacgcggagctccgcagcttttcttcttcagtatgcaagttgcacctgccgaaggtttgcttcattgtctatccgtgttgtacctgaaatacattttctcaatccgaaggtaaggtattttgagggccttcggctaagtaggccctcaaaatgcatgatgctcaaatagctcacttacgtaatagttcattctatttcctttcttttttgtgcaatcgacagcttgtgttgaacagttcaagtaaccatatatatgattttcatatgtaaaaaaaaaaaaaaaa

SEQ ID NO: 5109 - DNA, 821 bp, Zea mays
  misc_feature (1)..(80): n is a, c, g, or t
  misc_feature (821)..(821): n is a, c, g, or t
  Probeset Number=SeqID_19512
nnnnnnnnnnnnnnnnnnnnnnnnnnnnnnnnnnnnnnnnnnnnnnnnnnnnnnnnnnnnnnnnnnnnnnnnnnnnnnnnttgtcaattctgaaagaccatagaagtcgtgtggttcctctggttatccgcgtgttggcaccgaaagtaaggaaactgaagctactaggttctcgaaagcacacaggtgccagtcatcgaaaggcaattcttcgtttccttttgcagtttgattcaaatgaacttgagctttttttttctttacttctgaggtccttgatccctggcagcctccagcttaaaatgtttggttctcagccagacaaccttcttggaagtttctctgacattgttggaacttcaacagaaatttgtgtagagaattttacatggaaaaaggcaaatggtttcattcatctggttgaagaaatttttggtacttttgatatgccacatataagcccatttcttaatgttttattaatcattgtcgctcgcttgctggagagttgcatgaggaatcttaccgttactcgaacctatatgatgttccatggataatgttttttggctgaggaattggctcgtcatatttatgtatgcattttcactctctctataaagtgtactagagtaatcttccctagcgaaagggcctatagcctagtggttaaggactttcgaatagcatctccaaatcttgggttagatttctctcgggaacaaatttttaggcttgttaaaaaaatcctctcgctatgtctcatccgcttttgggttatgatgttctgtgcgtcgaaaaaaaaaaaaaaaaaagcggcn

SEQ ID NO: 5110 - DNA, 885 bp, Zea mays
  misc_feature (47)..(48): n is a, c, g, or t
  misc_feature (155)..(156): n is a, c, g, or t
  misc_feature (252)..(255): n is a, c, g, or t
  misc_feature (267)..(268): n is a, c, g, or t
  misc_feature (270)..(272): n is a, c, g, or t
  misc_feature (294)..(298): n is a, c, g, or t
  misc_feature (330)..(330): n is a, c, g, or t
  misc_feature (336)..(336): n is a, c, g, or t
  misc_feature (338)..(338): n is a, c, g, or t
  misc_feature (400)..(400): n is a, c, g, or t
  misc_feature (658)..(658): n is a, c, g, or t
  misc_feature (717)..(717): n is a, c, g, or t
  misc_feature (873)..(885): n is a, c, g, or t
  Peptide Sequence Number=SeqID_12308
  Probeset Number=SeqID_19513
ctccaagtcacacggaggcagccatcacagcctcgcccgactccgcnncccctgttctttgggcatggagctgatcacaaatgtcaccgagtacgagaagctcgcgaaggagaggctgccgaagatggtgtacgactactacgcctccggcgcannagatcagtggacgctcaaggagaaccgggaggccttctccagaattctataatgggatagagtgttcccagcctacatcacgaagatgacggcctnnnnaataaaatcagnntnnnccacgggtactgatcgacgtcnnnnntatcgacatggccacaaacattctgggcttcngcattncnatgcctatcatgatcgctccttcagccgtgcagaaaatgggtcatcctgatggagagcttgntaagatgagagctacagcttctgcatgaacaataatgacattgtcctcatggtctacttccagcgttgaagaggtcaacttagttgggttaggaatacgtttcttccagctctatgtctccaaggacaggaatatcgtactacaactcgtgaaaagggctgagggaaggtatataaccaaaattacctctacatcttcggtgggtgttgtgctattggatagtagtgccattaaagctgatgctgtgcagatggtgtntgagggaatttttgctctggatctagtgcatattaagcaacaatggcctccatctatanagtttgagtccttggattcgtgtttagtaaatttaatcactgggtcagcactgaacgtcatggttcaacagctgcttgtttctgttggcttccctagcaatgctcttgtgctcaagattccaattcagtgtgttgtggatgcacttcataagaaannnnnnnnnnnnn

SEQ ID NO: 5111 - DNA, 428 bp, Zea mays
  misc_feature (358)..(358): n is a, c, g, or t
  misc_feature (367)..(367): n is a, c, g, or t
  misc_feature (371)..(371): n is a, c, g, or t
  Peptide Sequence Number=SeqID_12309
  Probeset Number=SeqID_19514
tacacttcagtcgtacgtacacacgcgtatgcaagtccagattttggctcgagcagggccaccacctccctaccgaggaggcagcccaccagggccaccacctccctaccgaggaggcagccccaacgtaccgccatattcgggtggtggcaatccctggcctaaccctggtggcagccctggctaccagggtcaaggaggcaactccaacttccagtgaacatgaccccgagtactaagttggcacccctgtttcagagtagccttctgcaagagatggtggcgccggtaggcccttagcccagcataaatcgaacccttgttgctatcggattttcatgggaatttgggttttttnccccccccngggnccccctttggggtttgccacttaatgttctatatatagtactcaaaactatgcttgg

SEQ ID NO: 5112 - DNA, 1169 bp, Zea mays
  misc_feature (1)..(6): n is a, c, g, or t
  misc_feature (8)..(8): n is a, c, g, or t
  misc_feature (10)..(10): n is a, c, g, or t
  misc_feature (778)..(1169): n is a, c, g, or t
  Probeset Number=SeqID_19515
nnnnnngntnggcctctgcggctctagtatctccgtcaacctcccgctgtgcaggcccggacgtgggcggcggaattggttttctgggacagaacttcgtgttcgttgagctgatcttcccacgtagacaatctacgtgctaaaaccacaccgtattatggcctctagttctgatgtcattaagcctgaagcgttcgacggcgcaagctttaaacgctggcagattaagactcgcatgtggctcactgacctaaaattattttgggtagtgacgtcggctgttccccaggctgcatcagatgattctgatgatgtagcgaaggccgccgcactagcggagaaggccaaatgggacgaagccaatgaggcatgcttgtctcgtctgctgaacgtcttgtcgaaccgcttatttgacgtatactctggttttacctccgccaagggtctatggactgaacttgagaacgagttctctgaagttgacaatggcaatgagtcattcacaacggaaaactacctcaactataaaatggttgagggaaggtctgttatggagcagctacaggagattcaactccttgttagggacttggtccaatatggctgcatcctaccagacagttttcagttaaatgcaatattgttaagactcttgacctctgttaaattctgtatgacatttagtacacagctccttagtattgacttttagtgaggattattaggcttattacatctgatctaaaaccctgatttggtgagataggactgtcacgtnnnnnnnnnnnnnnnnnnnnnnnnnnnnnnnnnnnnnnnnnnnnnnnnnnnnnnnnnnnnnnnnnnnnnnnnnnnnnnnnnnnnnnnnnnnnnnnnnnnnnnnnnnnnnnnnnnnnnnnnnnnnnnnnnnnnnnnnnnnnnnnnnnnnnnnnnnnnnnnnnnnnnnnnnnnnnnnnnnnnnnnnnnnnnnnnnnnnnnnnnnnnnnnnnnnnnnnnnnnnnnnnnnnnnnnnnnnnnnnnnnnnnnnnnnnnnnnnnnnnnnnnnnnnnnnnnnnnnnnnnnnnnnnnnnnnnnnnnnnnnnnnnnnnnnnnnnnnnnnnnnnnnnnnnnnnnnnnnnnnnnnnnnnnnnnnnnnnnnnnnnnnnnnnnnnnnnnnnnnnnnnnnnnnnnnn

SEQ ID NO: 5113 - DNA, 1483 bp, Zea mays
  misc_feature (1)..(72): n is a, c, g, or t
  misc_feature (1225)..(1226): n is a, c, g, or t
  misc_feature (1244)..(1247): n is a, c, g, or t
  misc_feature (1256)..(1257): n is a, c, g, or t
  misc_feature (1266)..(1267): n is a, c, g, or t
  misc_feature (1269)..(1271): n is a, c, g, or t
  misc_feature (1282)..(1283): n is a, c, g, or t
  misc_feature (1289)..(1291): n is a, c, g, or t
  misc_feature (1293)..(1297): n is a, c, g, or t
  misc_feature (1302)..(1314): n is a, c, g, or t
  misc_feature (1317)..(1326): n is a, c, g, or t
  misc_feature (1331)..(1339): n is a, c, g, or t
  misc_feature (1342)..(1342): n is a, c, g, or t
  misc_feature (1344)..(1344): n is a, c, g, or t
  misc_feature (1346)..(1348): n is a, c, g, or t
  misc_feature (1350)..(1351): n is a, c, g, or t
  misc_feature (1357)..(1365): n is a, c, g, or t
  misc_feature (1368)..(1375): n is a, c, g, or t
  misc_feature (1381)..(1417): n is a, c, g, or t
  misc_feature (1424)..(1432): n is a, c, g, or t
  misc_feature (1436)..(1457): n is a, c, g, or t
  misc_feature (1459)..(1476): n is a, c, g, or t
  misc_feature (1483)..(1483): n is a, c, g, or t
  Peptide Sequence Number=SeqID_12310
  Probeset Number=SeqID_19516
nnnnnnnnnnnnnnnnnnnnnnnnnnnnnnnnnnnnnnnnnnnnnnnnnnnnnnnnnnnnnnnnnnnnnnnnttgcgccgctacggtccaggcgttcttgctgcctccctcgtagactagactctagaccactatatatacagtactcgtccccgttttcttcctcaccaacttctcatcatcagccaagtgtaaagagtgcgaagaagcagtagcaaaaggattccattctcgtgttcttggagtggtccatcgatcgagctccgtgaaagagagagagagagagcaagcaatggcgacagcagggaaggtgatcaagtgcagagccgccgtggcgtgggaggccggcaaaccgctgtccatcgaggaggtggaggtagcgccgccgcaggccatggaggtgcgtatcaagatcctctacaccgcgctctgccacaccgacgtctacttctgggaggccaaggggcaaaccccggtgttcccgaggatcttaggacacgaagcgggagcatcgtggagagcgtcggagagggcgtgaccgagcttgtgccgggtgaccatgtcctcccagtgttcaccggcgagtgcaaggactgtgcccactgcaagtcagaggagagcaacctttgtgatctcctcaggatcaacgtggatcgtggcgtgatgatcggcgatgggcagtctcgcttcaccatcaacgggaagccgattttccacttcgtcgggacctccaccttcagcgagtacaccgtcatccatgttggttgcctcgcgaagatcaaccccgaggcgcccctcgacaaagtttgtgttctcagctgtggcatctctactggacttggcgccacgctcaatgtcgcaaaaccaaagaagggttccacggtggcaattttcggtcttggagctgtaggacttgctgccatggaaggggctaggatggctggggcatcaaggatcattggtgtggatttgaaccctgcaaaatacgaacaaggtacaatagtctgaaaacaaggatgtcttggcaaatgtttttggattgatagaacactgaacctaacaacatgttggcaaatgtttttggattgatagaacactgaacctaacaacatgtactacattattttttagctaagaaatttggatgcacagactttgtgaacccaaaggaccacactaagcccgtgcaagaggtctgttgttcatgtccctcagtaaagatttnntcccttagttcaatcttnnnntatgataannactcactgnncnnngatgctctccnngtgctnnncnnnnntgacnnnnnnnnnnnnngannnnnnnnnncgagnnnnnnnnnccncntnnncnnccatgnnnnnnnnnttnnnnnnnntccatnnnnnnnnnnnnnnnnnnnnnnnnnnnnnnnnnnnnnacaaagnnnnnnnnnggtnnnnnnnnnnnnnnnnnnnnnntnnnnnnnnnnnnnnnnnnccaaagn

SEQ ID NO: 5114 - DNA, 597 bp, Zea mays
  Peptide Sequence Number=SeqID_12311
  Probeset Number=SeqID_19517
acgacgcacgttcctaccaaccgttcacccagtcgcccatattcgtattgctggtatccgctctcccctcccttggtctcatagagcgcagccatctcccgaccgcacaatagccaccccacgtcttgctcaccgtcgggcagaggagccgtgccgcgctcaccatcgctcatgtccaaaccatcggcgtcccggccatgtatcaagattgcgatccgtttccgagcttcgaggaatcgaagatcaagagttggcgaccaagtgatctggttcttcgagttctatgaggctagagatcctgagcatctgtttggtgaaggttgcctttggtgcaatctatgctcaagtaaagaagaaggcgttgaggcggatctccaggagttccaggacttttgacgagttcgaggattaggctagcgaccacccccagtcagctgcctgtggtgggtttatttacgttggctacgtttctattctgtgtactttgattatattatgtaaatgactctagtctttatattattacttactctttattgttaaaaaaaaaaaaaaaatatgatgagtcatttatgtaatcgccgtgtacgtgaaaaa

SEQ ID NO: 5115 - DNA, 494 bp, Zea mays
  Probeset Number=SeqID_19518
ggcccccatttctctcccactccctttttgcctcacacggtcgcaccatgacaaaaccgtcggagccgtcgagcctcgctaaggtcgcacctcgccggagtactgcacaacacgccagcaccgtcgccctggcagatcgcgatttgtttccgcgctccgaggagtcgacgatcaagcgtcggcgaccaagtgatcaagctctctgagttctatgaggctgaagatcctgagtatcggtttggtgaaggttgcctttggtgcaatctatgctcaggtaaagaagaaggcgtcgaggcgaatctctaggagttccaggacttcgacgagttcgaggattaggctagcgaccacccccagtcagctgcctgtggtgggtttatttacgttggctacgtttctattctgtgtactttgattatattatgtaaatgactctagtctttatattattacttactctttacaaaaaaaaaaaaaaaaaaaaaaaaaaaaaa

SEQ ID NO: 5116 - DNA, 494 bp, Zea mays
  Peptide Sequence Number=SeqID_12312
  Probeset Number=SeqID_19519
ttttttttttttttttttttttttttttttgtaaagagtaagtaataatataaagactagagtcatttacataatataatcaaagtacacagaatagaaacgtagccaacgtaaataaacccaccacaggcagctgactgggggtggtcgctagcctaatcctcgaactcgtcgaagtcctggaactcctagagattcgcctcgacgccttcttctttacctgagcatagattgcaccaaaggcaaccttcaccaaaccgatactcaggatcttcagcctcatagaactcagagagcttgatcacttggtcgccgacgcttgatcgtcgactcctcggagcgcggaaacaaatcgcgatctgccagggcgacggtgctggcgtgttgtgcagtactccggcgaggtgcgaccttagcgaggctcgacggctccgacggttttgtcatggtgcgaccgtgtgaggcaaaaagggagtgggagagaaatgggggcc

SEQ ID NO: 5117 - DNA, 940 bp, Zea mays
  misc_feature (1)..(1): n is a, c, g, or t
  misc_feature (286)..(286): n is a, c, g, or t
  misc_feature (296)..(296): n is a, c, g, or t
  misc_feature (418)..(418): n is a, c, g, or t
  Probeset Number=SeqID_19520
ntataaattatttgtggggggagatataaccgcgcgacgataaaagtggtctgtcatagatatatacggtgcaatcaaataatggcgataaaacaagcgacaccggggagactctaaaagggcgcgggaatactattaagaattacacataaaagcggaaattagggagggcggcggagaggagtataagggggagataaaatataacgggcacgctggtggggtagggcaggggggtgggagggggtggatagagggggggaatagggggagggggggggagggngccccgacanaggtgtgttaatacgactccctatagggggaaatggggaacgggccccccctctttaaaagatcgaggttcttttgcaccccaaggttgaggatgttttgcaactgcggatcaaagtgcggnttcgggtcaaggtgcaagtgcggcaaaaagtaccctgacctggaggaaacgagcaccgccgggcaggcccccgttgtcctcggggtggccccggaaaaaaaggccgcgcccgagtttgtttaggccccggcggagtccggcgagagccgcccaccggctgcagcttcggtggcaactgcaaatgcgacccctgcaactggtgatcccatcgattggcggccatggatatgattattatttatttagcttgtggtgggggttgaacaataataaacgaggcccagctggctgccatacataggtattgtgtggtgtgtgtgaaaaaaaaaaaaacaaagtttttcagtttggtatttctttttgcaagtttggggtcagtttttggggtcaagtacgtacgtgtgtttacctgcatgttggttgatccgattgcatttgctgtaaccatatattaattggtccccgatgatatgatttgattctaaaaaaaaaaaaaaaaaaaactcgagcctgcagcccggg

SEQ ID NO: 5118 - DNA, 1462 bp, Zea mays
  misc_feature (1)..(25): n is a, c, g, or t
  misc_feature (32)..(32): n is a, c, g, or t
  misc_feature (1419)..(1454): n is a, c, g, or t
  misc_feature (1456)..(1462): n is a, c, g, or t
  Peptide Sequence Number=SeqID_12313
  Probeset Number=SeqID_19521
nnnnnnnnnnnnnnnnnnnnnnnnntattatncactccttcgtcatccatgcgtcccctccccgccgcggccatggccaccgcgacgctgcccctccgcctcctcccctccaaaacgctgactctctccactctcccctccctgcgccgctccctctccgtcgccgctttggagccccggcgctggcgcctccgagccgccgccgaggaggcgcctgaggccgtggaggttgagttcgtggagcccgagacggaggctgaggagaaactatatatacacacagagactgaaaggtgccaatgtcaatgatcagatcatattaaacaaggtgctactggtgtcaactagagaaaaagcttacattgggatgccagtggtgaccaatgctgctgttcacgcagtggttgaagaacagggacgggatgataaagttatagtgttcaagtatgctcgatgccacgatcacgcagtgcttgcgtagtgatgctggcaatttcacggcttccggttatttactactagccttttaggccgtgctcaggagagtgtgcatatggtcgtacaaaacactgttttatgctgtagattgcaatatttatagagtgaagtttgaaataaaaaaaaaaaaaaaaaaaaaaaaagacgttcactccttcgtcatccatgcgtcccctccccgccgcggccatggccaccgcgacgctgcccctccgcctcctcccctccaaaacgctgactctctccactctcccctccctgcgccgctccctctccgtcgccgctttggagccccggcgctggcgcctccgagccgccgccgaggaggcgcctgaggccgtggaggttgagttcgtggagcccgagacggaggctgaggagaaacccgcggtaccggagcccatcgaggctcagctggccgccgcgggggccgggaaggacgcggacatcttcgctgttgtcatgattggttcaagacagtacatagtgatgccgggcaggtatatatacacacagagactgaaaggtgccaatgtcaatgatcagatcatattaaacaaggtgctactggtgtcaactagagaaaaagcttacattgggatgccagtggtgaccaatgctgctgttcacgcagtggttgaagaacagggacgggatgataaagttatagtgttcaagtacaagaagaagaagaagtaccagaggaaacttggtcacagacagccaaacacaaggttaagaatcacaggcataagtggatatgaagagtaccctgctgacccaatacttgaccctgctgcagctttaagctaaactagtcgacaattgattggacggcaccaatcatggattctgacgtgcgagtagcgacggcaccgcagaggcgcgatacgacgcggcgcgtcacgctcagtcgcacgnnnnnnnnnnnnnnnnnnnnnnnnnnnnnnnnnnnntnnnnnnn

SEQ ID NO: 5119 - DNA, 458 bp, Zea mays
  misc_feature (4)..(15): n is a, c, g, or t
  misc_feature (77)..(79): n is a, c, g, or t
  misc_feature (421)..(422): n is a, c, g, or t
  Peptide Sequence Number=SeqID_12314
  Probeset Number=SeqID_19522
ccgnnnnnnnnnnnnccgggtgcgacctgcgacaggtgcggcgtggcagcgggtgtgcgggcgcgggcaccggcgcnnncgatccgggcttatacaatggagttggaagccgaagttcagaaactgaaggaacaaaatgaagaattgcagaagaagcaggaacaaataatggagatgcagcaaaaccaggtcccggaattgatcagcaatccatatgcacaaaagaaacggtgcctgcggagaacattgacaggtccctggtaaccgagttgttgacgagtcgggcttgacaggatatttaacattatggcacctgtacatataccttgaggatttggagaacccaaatttccggtgtatattagcgaccaacagagtcgaatgtacctgtgcataacttccttatgctgacactatgccnnctcgattcatttatgcaggtctgttagatttattgc

SEQ ID NO: 5120 - DNA, 572 bp, Zea mays
  Probeset Number=SeqID_19523
gctcgaattccgttgctgtcgtcgcttgcttccgtcggacgcctccatgtgtgtcctgacgaagaaacatcacggtccggatcggggagtttggactctcctgagggggccgagtgaccgagggcgagtcgtcgatgggcatggcggaagaaggcgaactcggctccgctcgacgtcactgacgaccacgagcacacgaaggaaggggtcgcgctcacaaagcgttgccgtcggtggactccgagccagcaccgcaacaaccatcgccgtcgtgggtgttcttcatcgccgcatccgtcgtccgacagtccaattggcgacgccagtctccgatcgggttttcccccatcgacggtccttcttggaccacactccttagatccatcacatatgcaccacatcctcaatgacaactacttcaaggttgctttgtttgtacttagtctgtcatttgtttgggttttcgggtccctacatgaataactgaagtgcacaagcatcatatccatagatccatggaatggatttctgtttttggttctgatgaaacgcaagctttgtccttgatggaa

SEQ ID NO: 5121 - DNA, 559 bp, Zea mays
  Peptide Sequence Number=SeqID_12315
  Probeset Number=SeqID_19524
ctaggcccgcctcacgcgcaccgcctcggtgccatgccctgtgggccccacgcgcagcgcccgcacagcgctctctcaactactatcctatggaccccagcgcccgtacagccagctattgcgcctggcccagcacccgacccaccagaccacacgtaccataggatgtgtttggtttcaggtcaagtaggatgaggcgggggcgacaccgttcccttgattttttgggatcacgtcgccacaaaaaacaaactccggtgcttacctcgctcacacgtgactctcatccaaacattataaatattgtggccgcccccttcaatccctccttttacatccgactaaacacacccttaatgttagaaataaacaataattatataaaagtagcgcagggcgagcaatcgaacccacgtcctctgctccagaaatttaggggtaaccaacagagccacacgtatattagagcaagcactcgaactcatgccccctgctccagaaatttggggctaaccagcagaccagcatagacattagtgtttagattgaaacaataatt

SEQ ID NO: 5122 - DNA, 713 bp, Zea mays
  misc_feature (1)..(10): n is a, c, g, or t
  Probeset Number=SeqID_19525
nnnnnnnnnngcggagtaggtcgcctgacgaactaccgagacgtgcgtctcgcttctcccttcctcagctgctggcccgctgcctgcagccattgcccgctcctcgaggtcaaatggcccctgcccccgctctcaccgccacatccgtcctgaagcgttcccacctacccggcgtccacctcgttggcctgtcgccggcagccgggggcggaccgcgatctcggtgctttctccagcgatcccgccgccccgcgtttcatggcagcaaggattcctgggagcgggttgctaagagggctccctccttggactgaagtgcccagctgcttccccttcggagaaaggaacaacctttctggcgaagcgacggcgggcggtttcgcctttttccaaaaaagggggggcgggaggaacccaaagggacacatctacttgtggaaaaaacttttgaaaacaacgcggccacacttcccacgtgatttcccccaataaaaggtcgggccgggcgcaataaaaaaactcccccccgacccttgtggcgcaaaaatcgcccatgccgcggttaacgtgcgctcccccccactcccccacctttatgcgcccgtcaccatatactgggacttactacgcaccgcgtctcctctggacggcaacacatagcagtaacactccccgagacattgtttaatatcaatattatataaacactcccg

SEQ ID NO: 5123 - DNA, 540 bp, Zea mays
  Peptide Sequence Number=SeqID_12316
  Probeset Number=SeqID_19526
cgtgctgtcggtttatcccctctctccagttctccagctcacaagtttcctggcctcgcttgtatctttgagcgcctcaactctgcagcacgtatatcctgtaataagctctatcttgcatacactagctctagagtctttcaagatgagcaaacagatctgagctccaggtatgaggacaagagcatccgctaattcgtaaatcatagttgcggacttgtggtacaagatctctctacagcctcttcggtgctggaagcggtggtacattagccaatggtaaaaaccagccaaagaagtggagaaataccgttgccctaatgctgggagaagggggtctggatttctgccgacgaggtgggcgacagagaaggaagaagggatggaggaagactggaagaggagggagctgcatgcgggctctcttgatggggcgccgctattcagtgctagacagtttggttgtgagagacagggcgcgatggacgtcccggccgtggcggaccctggaacggagcgaggcgaaggcgcgctgatcca

SEQ ID NO: 5124 - DNA, 540 bp, Zea mays
  Probeset Number=SeqID_19527
tggatcagcgcgccttcgcctcgctccgttccagggtccgccacggccgggacgtccatcgcgccctgtctctcacaaccaaactgtctagcactgaatagcggcgccccatcaagagagcccgcatgcagctccctcctcttccagtcttcctccatcccttcttccttctctgtcgcccacctcgtcggcagaaatccagacccccttctcccagcattagggcaacggtatttctccacttctttggctggtttttaccattggctaatgtaccaccgcttccagcaccgaagaggctgtagagagatcttgtaccacaagtccgcaactatgatttacgaattagcggatgctcttgtcctcatacctggagctcagatctgtttgctcatcttgaaagactctagagctagtgtatgcaagatagagcttattacaggatatacgtgctgcagagttgaggcgctcaaagatacaagcgaggccaggaaacttgtgagctggagaactggagagaggggataaaccgacagcacg

SEQ ID NO: 5125 - DNA, 710 bp, Zea mays
  misc_feature (601)..(710): n is a, c, g, or t
  Peptide Sequence Number=SeqID_12317
  Probeset Number=SeqID_19528
gtgtgcttggtgttgctatttctggcatggctgttttggaggcgcggctgcaggtcgacccccctccgtgaccgtcatccgtcgcgccccccgccaccaccgcactcccatccagatgggagtgcgcaagagagctttcggcattccggtctcgctcgaccaaccggatccccgtgagagtccccacccacaccccgagggcggcgtcgggtcgtcggggacagctgatttcacaagacgagccggcgagccggccggcatttcgtcgtcggatggcgccggcctcctcctcgtccgccggcgtcgcgtgcctcgtcctgctcctgctcctgctcctcgccggcgcctccgcggcgcacggctcgttccaggctaggcgtgctctgtcagatgaccatgggagcggtatagtggcgcgatggcggaagttgctcgccgacgctgcgactcccgcgattaactctcttggggtggctcgcgccgagaactccccggagcgaccccttcgccaacctctacgggaacagtgcgggttggaacattagcgacgtccaccattgtgattttggtgacggaaccctgggatacccctcttcccctnnnnnnnnnnnnnnnnnnnnnnnnnnnnnnnnnnnnnnnnnnnnnnnnnnnnnnnnnnnnnnnnnnnnnnnnnnnnnnnnnnnnnnnnnnnnnnnnnnnnnnnnnnnnnn

SEQ ID NO: 5126 - DNA, 496 bp, Zea mays
  misc_feature (12)..(12): n is a, c, g, or t
  misc_feature (44)..(45): n is a, c, g, or t
  misc_feature (47)..(47): n is a, c, g, or t
  misc_feature (58)..(58): n is a, c, g, or t
  misc_feature (74)..(74): n is a, c, g, or t
  misc_feature (86)..(86): n is a, c, g, or t
  misc_feature (99)..(99): n is a, c, g, or t
  misc_feature (109)..(109): n is a, c, g, or t
  misc_feature (120)..(120): n is a, c, g, or t
  misc_feature (125)..(125): n is a, c, g, or t
  misc_feature (130)..(130): n is a, c, g, or t
  misc_feature (141)..(141): n is a, c, g, or t
  misc_feature (152)..(152): n is a, c, g, or t
  misc_feature (167)..(167): n is a, c, g, or t
  misc_feature (173)..(173): n is a, c, g, or t
  misc_feature (184)..(185): n is a, c, g, or t
  misc_feature (207)..(207): n is a, c, g, or t
  misc_feature (209)..(209): n is a, c, g, or t
  misc_feature (218)..(222): n is a, c, g, or t
  misc_feature (224)..(224): n is a, c, g, or t
  misc_feature (226)..(226): n is a, c, g, or t
  misc_feature (230)..(230): n is a, c, g, or t
  misc_feature (236)..(236): n is a, c, g, or t
  misc_feature (242)..(242): n is a, c, g, or t
  misc_feature (259)..(259): n is a, c, g, or t
  misc_feature (262)..(262): n is a, c, g, or t
  misc_feature (276)..(277): n is a, c, g, or t
  misc_feature (283)..(283): n is a, c, g, or t
  misc_feature (298)..(300): n is a, c, g, or t
  misc_feature (328)..(328): n is a, c, g, or t
  misc_feature (337)..(339): n is a, c, g, or t
  misc_feature (349)..(349): n is a, c, g, or t
  misc_feature (368)..(368): n is a, c, g, or t
  misc_feature (380)..(380): n is a, c, g, or t
  misc_feature (405)..(405): n is a, c, g, or t
  misc_feature (412)..(412): n is a, c, g, or t
  misc_feature (414)..(414): n is a, c, g, or t
  misc_feature (435)..(435): n is a, c, g, or t
  Probeset Number=SeqID_19529
acgcgctctacnccgttctgtcctcgttgtctgttccgcaggtnntngcctccgtaanttcgtggccgactganaatcgctccacnatggccgtcaagncctattccgnaaggtcagtgnagagnactcngctacgagganaactgttgcantctcgcggccggttntcgtcntttcatgcaanngcacgctccaatacctacgtgnangtgagaatnnnnnancntctnggagangatgantataaagaacaggttgnttnatatctcacaaaannttggantggtgggtttgaaannngcatcaatacattgtttttgactgaaangtgccgtgnnntgatgctaantctcaagtacttctttganagaaatgtcacnattaactatccgtttgagaaggttnctctgantncccgcttccgtgtagagcacnctctcagacgttatgaatctgggagaagagcgctgcattgctggtagactatgcgaagcta

SEQ ID NO: 5127 - DNA, 781 bp, Zea mays
  misc_feature (1)..(3): n is a, c, g, or t
  misc_feature (781)..(781): n is a, c, g, or t
  Peptide Sequence Number=SeqID_12318
  Probeset Number=SeqID_19530
nnngcacacacaaaaaaaagagagatggaaaaaggaagaagaaattgttgagtttgtgatccaaattctgaagaaggcggccaagttggcgagcgaagcggaggcccgtcgccgggaggcttgggccggagcgcagcgagatatctatctttgtaagccgcaggagatatctatctctctattgtaaatctcctgagaagttgccggccggcgcccgtggttttttccccttcactttggaggggttttccacgttaaatccgtgtcttctctgtgattgatcctattttgtgtcgcatttatttacaacagaaatctcgtggaaacagaggcggaagaagtgctgaaatggatgcagcgggcgagtgctgtcggactgaacattggcagccaaaaaggaatcttggtaaaaagaaaactcaatggcaagagaaacactacagtatcagatgaaggtcgtgtgcttgctttgcttcgtccacgagtgggaaagggagagataaaatatggaattcgagaagaaacgagcgtcgaagcatagctaaaaaaaacaagcacaaaaaaacagagccggggacgtccggacgtcagagcacacagaaagcggtagaagaacttgcagtggcgattcggcagaatgacgaacacacgagagagatccccgtggtttgcgcttgcgcgcgcacagagtagccgaaacaaatggcggtagagacgctattagaaaaatccacaagagcagagcgtgggggacgaggacgaagggaagaaaggttaggan

SEQ ID NO: 5128 - DNA, 769 bp, Zea mays
  misc_feature (1)..(10): n is a, c, g, or t
  misc_feature (760)..(769): n is a, c, g, or t
  Probeset Number=SeqID_19531
nnnnnnnnnntttttttttcttataaagcattatttcattatcttgtccgcaaccacaagaattgaaatatctatttgagtttaatgacgactttaacggatagaaaggatgaaacaatctgatggtaactgaatcaacataattcatcagtaataataaagtaacaatatatttcctacataatcattggcttaatttccccctttaaattaatgttatgatgcctgagatctttctcctccttatggtttgtatttgcatagtagtgtcaccattgtcttctagtacttgttgagaacatcaagtcctttttgagtttgaatttgaccatccaatattttaatgacacctttacctctaaaaatcattattccttgtgtggtagccattttctcctcctcgtcgtagacaatttcttgtgtagaggtcgtatcgtggattttctatcaacaatctcccaaacttgtcccctatagatgaggtgtttggtggctttccatccattgatactagtgtcaatggtagtgatatcaatgctttggggcctctctatgactgcacttgtcgtatccctagtgtcatgattattcttgaattttgtgctcttttccttctgtaaggtgacctctttatccttctcatacttttcttgtagattggagaggagattaaaccttcgctttccctttatgatggaatcatgttgttcaaaggtctgcttaggatttttgctagaggccatgaagtcattgctacaannnnnnnnnn

SEQ ID NO: 5129 - DNA, 769 bp, Zea mays
  misc_feature (1)..(10): n is a, c, g, or t
  misc_feature (760)..(769): n is a, c, g, or t
  Peptide Sequence Number=SeqID_12319
  Probeset Number=SeqID_19532
nnnnnnnnnnttgtagcaatgacttcatggcctctagcaaaaatcctaagcagacctttgaacaacatgattccatcataaagggaaagcgaaggtttaatctcctctccaatctacaagaaaagtatgagaaggataaagaggtcaccttacagaaggaaaagagcacaaaattcaagaataatcatgacactagggatacgacaagtgcagtcatagagaggccccaaagcattgatatcactaccattgacactagtatcaatggatggaaagccaccaaacacctcatctataggggacaagtttgggagattgttgatagaaaatccacgatacgacctctacacaagaaattgtctacgacgaggaggagaaaatggctaccacacaaggaataatgatttttagaggtaaaggtgtcattaaaatattggatggtcaaattcaaactcaaaaaggacttgatgttctcaacaagtactagaagacaatggtgacactactatgcaaatacaaaccataaggaggagaaagatctcaggcatcataacattaatttaaagggggaaattaagccaatgattatgtaggaaatatattgttactttattattactgatgaattatgttgattcagttaccatcagattgtttcatcctttctatccgttaaagtcgtcattaaactcaaatagatatttcaattcttgtggttgcggacaagataatgaaataatgctttataagaaaaaaaaannnnnnnnnn

SEQ ID NO: 5130 - DNA, 872 bp, Zea mays
  misc_feature (872)..(872): n is a, c, g, or t
  Peptide Sequence Number=SeqID_12320
  Probeset Number=SeqID_19533
ctaaccgatgctgaccgggaaaagcttgagcagtgtgacagcaaatacgcccgctacttgtgcaagctaatgggcgtttattttgattaccacagggacgcttacttcataaaaggagcgtatcttcacgatccaacgacggttattgctgcggtgaacccatcgctgctgacttacacagaaggcgttgtgagggtacagacagtcgggatcaccaagggccttactgttttcgacaacaccaagaaaagagaagatacttgtcttcctagccactgcgggtctgcctgcaccgcgtcgcgtcgccactgcaccgacccgccacagccccgctagcctgattccaccgtcaccctagatatactgtatgactcgtggtccccagcgatgactgtcagttctatctgtatcagcatattatctatgctgtccagctcgccagaaaaggttacatattttctctacatcaccttgttgaattggtgggtcttgcttttgactgcaatacattaccgattgcagcaacgcccagctgataatgatcgctatgtcaagaactgtcgcaatgggaggtctccgaaagagaccaggtggtggttccatgatgacaccgtgtgatcggtgttccgattattgttgtcctgtatgcatttagttgccagactatgggagatggacttatttcgaacgacccatttgaccagaaattaacatgctcttgtggtttgtagatgaatgtgcatcagcgtcaggcctgtactttctgattcttacaccgtcgatgatatatagaataatgtttgtatcttgtcaatttacggaacagacatgaaattcaatgcaggtcactggtttctgaatcaaaaaaaaan

SEQ ID NO: 5131 - DNA, 1646 bp, Zea mays
  misc_feature (1)..(4): n is a, c, g, or t
  misc_feature (801)..(802): n is a, c, g, or t
  misc_feature (805)..(805): n is a, c, g, or t
  misc_feature (823)..(823): n is a, c, g, or t
  misc_feature (840)..(840): n is a, c, g, or t
  misc_feature (842)..(846): n is a, c, g, or t
  misc_feature (848)..(848): n is a, c, g, or t
  misc_feature (854)..(854): n is a, c, g, or t
  misc_feature (862)..(862): n is a, c, g, or t
  misc_feature (867)..(869): n is a, c, g, or t
  misc_feature (871)..(871): n is a, c, g, or t
  misc_feature (873)..(873): n is a, c, g, or t
  misc_feature (875)..(875): n is a, c, g, or t
  misc_feature (883)..(883): n is a, c, g, or t
  misc_feature (887)..(889): n is a, c, g, or t
  misc_feature (891)..(892): n is a, c, g, or t
  misc_feature (899)..(899): n is a, c, g, or t
  misc_feature (907)..(923): n is a, c, g, or t
  misc_feature (925)..(982): n is a, c, g, or t
  misc_feature (990)..(992): n is a, c, g, or t
  misc_feature (995)..(995): n is a, c, g, or t
  misc_feature (999)..(999): n is a, c, g, or t
  misc_feature (1001)..(1004): n is a, c, g, or t
  misc_feature (1007)..(1009): n is a, c, g, or t
  misc_feature (1014)..(1014): n is a, c, g, or t
  misc_feature (1054)..(1057): n is a, c, g, or t
  misc_feature (1078)..(1081): n is a, c, g, or t
  misc_feature (1084)..(1085): n is a, c, g, or t
  misc_feature (1112)..(1112): n is a, c, g, or t
  misc_feature (1122)..(1122): n is a, c, g, or t
  misc_feature (1124)..(1124): n is a, c, g, or t
  misc_feature (1219)..(1221): n is a, c, g, or t
  misc_feature (1241)..(1248): n is a, c, g, or t
  misc_feature (1646)..(1646): n is a, c, g, or t
  Peptide Sequence Number=SeqID_12321
  Probeset Number=SeqID_19534
nnnncgggattttccattcccatcccgcaacgcacgcagctcgctcgaccagaacacctcggagcagcagcagcggcggccggcggagaccgtgtcatggcgatggagggctacgaccgcgagttctggcagttcggcgaccagctgcgcctccagacggccaccttctccggcctctccctcggcgactccatctggtcccccgccgacaacaccgccccccgcgcccgcaacgccgacctcttctccccctccccggcgcccgacaacaacagcgccgggttcgccgccgccaagatgaacggcaacggcctcaacgggcccggcctcatcggctccggcaagctcgccttcggcgccaccaccaccagcaaggccgaccgctacaacaacgtcagcctccccgacgccaagccctacgccaacgccaacgccaacggcatgtacggtgccaagcccaacaacaccaacatgaacaacggcttcgggctcaacaagatggctgccggcggcgggggctacggcaacttcaacggcggcaacgagggggtgaagagctacttcaacaagtccatcggcaggccggccagcaacaacagcagcagcaacaacttcaacggctacggcggcaagaagggcgccgcggacggcaagaagaagcacgccaagaacgagcgaggggacaacaaccacggcgccgcgtcggagaagcggttcaagacgctgccggcgtccgaggcgctgccccggaacgagcccatcggcggctacatcttcgtctgcaacaacgacactatggannagnacctcaagaggcagctcntcgggttgccatccagntnnnnngnttcagngagggcantcagnnnangncngcccctcntccnnnannactactncacccacnnnnnnnnnnnnnnnnntnnnnnnnnnnnnnnnnnnnnnnnnnnnnnnnnnnnnnnnnnnnnnnnnnnnnnnnnnnaatgcccnnnacngtcncnnnnccnnntcccngtgcgagtggcaacgcggaagatctacgatccactggagnnnnacgccttgcgccccatccttnnnnacnncgacgggcccaagtttcggctcgagcnctccgtcgcngngaccctcgcccttctcgacatcttcgctgacaaggatgacgcctgagccttccttgccgtcccctcgccgccagtgcccatccattaatgcacannnaataaaatggctggagggannnnnnnnattacatgagtgggctgccatatcctccacctttgtttgatatgatatgatatgattcagggctatgtatgaggcacgcgtcccattatttttgttttattacgaatgaatgaaggcccaaacaataataacggatggatgggcatgtatatcgtcatgggcatgtcccccgacgagacgggagtataccccggtggagtagtattatattaataattaatatagtatgtccccctttgtttgatactactaagggctatgtatttaggcacgcgtcccattgttttgtttttataacacttgtgcgatggttgcagacgactagccctcgtttttttggtaaaatgtctgtattattattattcaggttcccctgacatggataaaaaccatctgtn

SEQ ID NO: 5132 - DNA, 1250 bp, Zea mays
  misc_feature (1)..(1): n is a, c, g, or t
  misc_feature (1200)..(1250): n is a, c, g, or t
  Peptide Sequence Number=SeqID_12322
  Probeset Number=SeqID_19535
ncacgaggggcaacgccgccgctgtggaggatgtggaccacgacttgcacatctttacggagagggagcggaggaagaagatgaagaacatgttcagcaccctacacgcgctcctcccgcagctccccgacaaggctgacaaggccaccatagtcggggaggctgtaacctacatcaagactctggaaggcaccgtccagaagctggagaagctgaagctggagcgcaagcgcgcgctggcagcgcagcagcagctgatggctggtgccggcagcaaccgcgcgtcgtccgcgcgccatcccgcaccagcgccgtcgtcaccgtcgtcgtcgtcgagggaggcggacatggtccacggttggcatgcgcagcaggccgccgcgaacaaggccctggcagcggaggccggggcgggcggctcctcctctgccgccgcctcgctgccccgtggcgcggtgcccttccccgcgcccgcggcggggttccagacgtggtccgggcagaacgtcgtggtgagcgtggccagcaacgaggcgtacatcaacctgcactccccgcggcagccggcgggcaccctgaccaaggcgctgttcgtgctggagaggcaccgcatcgacgtcgtcacgacgaccatctccacccaggacggcttccacatgtacggcatccatgcacgcgtcaattcggcttccgcttcggctcgctttccggagaatctgtgtgctgaagacaggttcaagctggcggtgtcggagatgctgcagctgatcaacatctgagctaggccaacgcgctcatgctcgccaatgcaacaaatcgctctgctccttggacatggagttgagctatggtgctatgctgctgccgtcgtcgtttcgtgttaagtttggtcgtcgtccaactcttttagtttgtttctcttgttagtgccaagtttggtcgtcgtcggttgaactcttttatttctcaagacagctggttagtggttcctagcgtatggtaagtactgtttgaggtttaacccgtcgtggatgtagttgtatgatcgggtttcatgtgtgagagttctaaccataatcactagacatcgtagaacaaaaaaaaaaaaaaaaaacagacggagtggcccggtactcaagacagctggtcagtggtgccaagcacgtggtaagctctgtcaaaggtttaacccgctctggnnnnnnnnnnnnnnnnnnnnnnnnnnnnnnnnnnnnnnnnnnnnnnnnnnn

SEQ ID NO: 5133 - DNA, 960 bp, Zea mays
  misc_feature (1)..(15): n is a, c, g, or t
  misc_feature (756)..(960): n is a, c, g, or t
  Peptide Sequence Number=SeqID_12323
  Probeset Number=SeqID_19536
nnnnnnnnnnnnnnnaaacccaaaccaactccacgcgcaccagaccgcgcccatccgcagctggagcccgaccgacgcggctcagctcagcagtcggcgtcgtctcgtctcccccgctcccccctccaccgcctcgatcccgcccgcggccgcgcgatcggatccggccagatcccgcgccggcggccatggagaacctgatctcgctcgtcaacaagctgcagcgcgcctgcacggcgctcggcgaccacggcgaggagagcgccctccccaccctctgggactcgctgccgtccatcgccgtcgtcggcggccagagttcgggcaaatcttcagtgctggagagcgttgttggaaaggatttcctacccaggggttcaggcattgtcacccgtcgcccgctggttctgcaactccataggattgatggagacagagagtatgcagagttcatgcatgtccccaggaagagattcaccgatttcgccatggtgaggaaggagatagctgatgaaactgacagacaaaccggccatggaaagggaatatcatctgtccccatccatttaagcatattttctccatacgttgtgaatctgactcttattgatcttcctgggcttactaaagttgctgttgagggtcagccggagagtattgttcaggaaattgaaaacatggtccgttcattcatcgaaaagcccaactgcatcattttggctgtttcgccagccaatcaggaccttgcgacttctnnnnnnnnnnnnnnnnnnnnnnnnnnnnnnnnnnnnnnnnnnnnnnnnnnnnnnnnnnnnnnnnnnnnnnnnnnnnnnnnnnnnnnnnnnnnnnnnnnnnnnnnnnnnnnnnnnnnnnnnnnnnnnnnnnnnnnnnnnnnnnnnnnnnnnnnnnnnnnnnnnnnnnnnnnnnnnnnnnnnnnnnnnnnnnnnnnnnnnnnnnnnn

SEQ ID NO: 5134 - DNA, 867 bp, Zea mays
  misc_feature (1)..(86): n is a, c, g, or t
  misc_feature (95)..(95): n is a, c, g, or t
  misc_feature (97)..(102): n is a, c, g, or t
  misc_feature (105)..(110): n is a, c, g, or t
  misc_feature (116)..(118): n is a, c, g, or t
  misc_feature (226)..(229): n is a, c, g, or t
  misc_feature (260)..(261): n is a, c, g, or t
  misc_feature (300)..(301): n is a, c, g, or t
  misc_feature (307)..(307): n is a, c, g, or t
  misc_feature (333)..(335): n is a, c, g, or t
  misc_feature (358)..(361): n is a, c, g, or t
  misc_feature (364)..(364): n is a, c, g, or t
  misc_feature (378)..(379): n is a, c, g, or t
  misc_feature (396)..(397): n is a, c, g, or t
  misc_feature (410)..(410): n is a, c, g, or t
  misc_feature (412)..(412): n is a, c, g, or t
  misc_feature (432)..(434): n is a, c, g, or t
  misc_feature (439)..(440): n is a, c, g, or t
  misc_feature (522)..(524): n is a, c, g, or t
  misc_feature (580)..(583): n is a, c, g, or t
  misc_feature (677)..(679): n is a, c, g, or t
  misc_feature (681)..(690): n is a, c, g, or t
  misc_feature (703)..(703): n is a, c, g, or t
  misc_feature (705)..(705): n is a, c, g, or t
  misc_feature (712)..(721): n is a, c, g, or t
  misc_feature (725)..(725): n is a, c, g, or t
  misc_feature (735)..(737): n is a, c, g, or t
  misc_feature (741)..(743): n is a, c, g, or t
  misc_feature (746)..(748): n is a, c, g, or t
  misc_feature (755)..(759): n is a, c, g, or t
  misc_feature (764)..(785): n is a, c, g, or t
  misc_feature (788)..(788): n is a, c, g, or t
  misc_feature (790)..(810): n is a, c, g, or t
  misc_feature (812)..(816): n is a, c, g, or t
  misc_feature (820)..(827): n is a, c, g, or t
  misc_feature (829)..(842): n is a, c, g, or t
  misc_feature (845)..(852): n is a, c, g, or t
  misc_feature (855)..(864): n is a, c, g, or t
  misc_feature (867)..(867): n is a, c, g, or t
  Peptide Sequence Number=SeqID_12324
  Probeset Number=SeqID_19537
nnnnnnnnnnnnnnnnnnnnnnnnnnnnnnnnnnnnnnnnnnnnnnnnnnnnnnnnnnnnnnnnnnnnnnnnnnnnnnnnnnnnnntgctctcgncnnnnnntannnnnngaatcnnnggcccgacgccgcggcgggaggtatctcgctttcgatcaggattttggtcggggcgtcgttctccggtgcttatctcatttctatttatcggtgcctcgggttcacgnnnnaattcgctgctgcgtggggctttggagattnnagccaattttatcattgttcctgcgtggagaaaaagcannatggtntaaaagcagatggaactggcaaaacnnnacagaatgaactgacatgtagtnnnngcnccgaacgtccgatnntgggtgtttggtggagnntgtaatcatgctngnatcccccgcacgctaactcnnntcaannatggggcgtctattttcctcttaatgaaaacctgtctcgatcctggtcacattttcgctacctttttcttcaaagaaagaannntttctccaggtagattaaagtgcaactcccatagtaacatttttgtctacattgtnnnngaagatcatcccaaaaaaaaaaaaaaaaaaaaaaaaaaaaaaaaaaaaaaaaaaaaaaaaaaaaaaaaaaaaaaaaaaaaaaaaaaaaaaaaannnannnnnnnnnnaaaaaaaaaaaananaaaaaannnnnnnnnnaaanaaaaaaaaannnaaannnaannnaaaaaannnnnggggnnnnnnnnnnnnnnnnnnnnnnttntnnnnnnnnnnnnnnnnnnnnnannnnntttnnnnnnnngnnnnnnnnnnnnnnaannnnnnnnggnnnnnnnnnnaan

SEQ ID NO: 5135 - DNA, 515 bp, Zea mays
  Probeset Number=SeqID_19538
tctgagtccgctcttagtggcggttctcgatgtcatctggaatctgtacaaaggtgatatttgtgtagcgaaagcgccatgcccgatgtgcggggaggtgtcctaccttcgcaccatcgtctctgcttgcctgatggttgcatatgtgtagtcttctttgttggtcaggtcctcaggaattcggttgttgttgttctgctcgcgtcaagtctgttcatgttgtgtttgctttctttccctgcttgttgctgaagcacttgctacgttgtgcttgttgctgtttctaatatgtgttctactacaaaattatgtaacgagtcgtttggatcccttcattttagaggaattggaattcactcaataaagtaacttatttagtttggaatttgacattccatcactttctaaagttcagatataagtctatctcaaattcatgggtggaggatgagaaatgattttattcattagtagaatttgtttctactctgtaatttacatgtcactcttcgtct

SEQ ID NO: 5136 - DNA, 454 bp, Zea mays
  Peptide Sequence Number=SeqID_12325
  Probeset Number=SeqID_19539
ttttttttttttttttttttgtaaacagcttatatattacattcataattataaaatattacacacattgtccagcaaaacattacatttcaaatgtcttcaaaataacagctaatcttctcttaaaactacttcgacagcttcgtttaatagttgatcaacaactttatccataataacttcgaccattttctattcgtcatcctcctttgctttggggttcgccaatggctcggcgggctctgggggaggagatagtaaggcttcaatgcgcgcggctcagtgggccttattgctcggtggggggttgggatgaaagggtcgatcagcctcaaccagggcttctcagacgggcctccgatgctacaatgcgcgtggcttggaggttgaagacggtggcggaagtcgaatcgtctgtccgtctcctggtccatcacctggtcgccctcgtgcc

SEQ ID NO: 5137 - DNA, 514 bp, Zea mays
  misc_feature (320)..(320): n is a, c, g, or t
  misc_feature (339)..(339): n is a, c, g, or t
  misc_feature (406)..(406): n is a, c, g, or t
  misc_feature (467)..(514): n is a, c, g, or t
  Probeset Number=SeqID_19540
ccccccccccccccctctctcttttcccctcccttttccagcacggggagcgacctggcgccgccgccacgatgcagaagcactacccgccctggcgggtaagaagaaggaagggaatgcggcaaagtacatcacgaggaccaaggcggtcaactacctgcaagttagcctcgcaatctttaggaagctatgcattctaaagggtgtctttccacgtcagccaaagaaaaaaggtgggaaggggaaccacaagacctactaccacacaaagggatattgcatttcctcgcctcatggaccccttggatcggagaagttcnggggagaattaagggtccntccgaaggaaggttaaaaaagggtggtggcttaaaaaaaacaggggatcttgcagaacagggttggntggaatcgggccaccaaacttacaagctttggataagggctggtccccttggaaagggatnnnnnnnnnnnnnnnnnnnnnnnnnnnnnnnnnnnnnnnnnnnnnnnn

SEQ ID NO: 5138 - DNA, 486 bp, Zea mays
  Peptide Sequence Number=SeqID_12326
  Probeset Number=SeqID_19541
gtttttttgcgcgaaaaaggtgaggaatcctcttgtgtcctggccgttggccgtcgctgcgtcgttccagatttggggaaggaaatccggcaccgagattcgagtcgaaaagatccgcggtatcgctcggccttcaaatacttcggcaacgtcgccggttcagcctttgtctaggtctatgaatgccgagcgatacagtggatctagaagaaatgcagatgctctaagatcggggctcctgaacaaaagagagatgcaatcagccgattagagagatgtataatcggatacaaatcacacatttagctgaagaataagggttacaatcaaatccacttcaatcgacaaaaaatgcttcaaaaatcgacggaaacctcgatgtatttcaagttggattacctggaacttctcgggaaagcattggctcttgaatcgggctccaatgctcggagattgaaggagctcagttggattggagcggcgctg

SEQ ID NO: 5139 - DNA, 943 bp, Zea mays
  misc_feature (1)..(170): n is a, c, g, or t
  Probeset Number=SeqID_19542
nnnnnnnnnnnnnnnnnnnnnnnnnnnnnnnnnnnnnnnnnnnnnnnnnnnnnnnnnnnnnnnnnnnnnnnnnnnnnnnnnnnnnnnnnnnnnnnnnnnnnnnnnnnnnnnnnnnnnnnnnnnnnnnnnnnnnnnnnnnnnnnnnnnnnnnnnnnnnnnnnnnnnnnnnnttcttttcgggtttgtattctgaatatatcggaaattgagaaagctgattggctgtttcagaatagaggcgggtatgacgagaagctagtgggcttggctgctgaaatggtgatatttggagatatacatccaagcggggtattctgtccgaatgcagtagttggtcctgatggtaaaatattcaacatgtgcacctcaacccttggttgtggagatggatgtatgtggctacctactctccttattagctttggtgtttggtgcatttctagaatacttgaagtgcttccttcggcaaagaaacctttgctttttgggaagtatagtagggttctcaatcgccttcagggcattctggatccagcattcttgaagcctgttcaacctgtctccatatgcccgtgcaccaagagcgtcccagtcgtgagactgcctgatggaagccaacgtatcagcgtggaagctgtgctggagatgctgatggaagttgaggccaccatctacggtgtgaggcacgctggagtctatggcagggagaagaaaagcctgaaatctgttctggaccgctataagctccggctctccgaggtggcatctcaggagtaggatttccttcatattagatcgacataataataataaaataaaaagctgaactctccagctatggtcacagatttctgtatgtctcttatctataagctatggtaataatgttatgctacatggtatgggcttgtgaaccgagactaataaaaaaaaaaaaaaaaaa

SEQ ID NO: 5140 - DNA, 663 bp, Zea mays
  misc_feature (1)..(1): n is a, c, g, or t
  Peptide Sequence Number=SeqID_12327
  Probeset Number=SeqID_19543
nattgatatggatgatgattggtggaaaagagctagagcggtaagtgacatataagtttggaatgcacatgtaatttattggatcccatttaccagagtggcatcgagggatggaaccaaatactcctaaagagaagttcaatcgagttcactcatctattcgtaatgtcatcgagcgctcatttggggtattgaaaatgaaatggcagatcctttataagatgccgggctattccacgctcacacaaaaaaaaattattgctgccaccatggttattcataacttcattcatgaacatgcaagtgaggatgaggattttgcaaattttgatcgggatccaaattttgttgctcctatcccagaaagatccaacaaatatgcggtatctcagcatgcctctgatggatcaccattggaatcaagctttgtgcccatggatgcatttcgtgatagtttggctacatctattgccttagcgtggaactagaaaaaataattagcattgtatactatgagatattttgttttagcgtatggccatgcaacattttatatttcaaacttctctcaattatcattttagttcatatacatgacgaaaataagtgtagagaaatttttttactcaaaaaaagaaaaaaaaaactcgagggggggcccgg

SEQ ID NO: 5141 - DNA, 1022 bp, Zea mays
  misc_feature (601)..(1022): n is a, c, g, or t
  Peptide Sequence Number=SeqID_12328
  Probeset Number=SeqID_19544
tgtagcagcagtacggtccgaatccgggtcgaccacggacgccacggtccgccacgcgtccgggacggtggctcttttttcttgtttctttctttcgatctgcgagccgtccaggtccagtactatcctttccgtgaaggaactcttgcagccggcccctctggtttcctcgaattcttgttccccggtccctcctcctgtccccgcgtagatccgtccgtccgaggagcacaccgtccccaccccccatgtttacccaccagttcctctgacggccgccgtgctccgatgaagctgagcgtgctccgtatccgccgctcccactccttctccgtcgccttcctctactggttctacgtcttctcatgaacgcatcgccccctctccaactgctgaatcttcgccgtctctccctctctcttttctctctgaaaaagtctttcgaaatccatctctagggttccttgttttttccccaatcctcccccccaacccaaccccccacaaaaacagaattcatttccaacaagtaccagcaatcccattgtcgttcctataacgcccggaagtctctaatcctccggaatcagctaaacaatcnnnnnnnnnnnnnnnnnnnnnnnnnnnnnnnnnnnnnnnnnnnnnnnnnnnnnnnnnnnnnnnnnnnnnnnnnnnnnnnnnnnnnnnnnnnnnnnnnnnnnnnnnnnnnnnnnnnnnnnnnnnnnnnnnnnnnnnnnnnnnnnnnnnnnnnnnnnnnnnnnnnnnnnnnnnnnnnnnnnnnnnnnnnnnnnnnnnnnnnnnnnnnnnnnnnnnnnnnnnnnnnnnnnnnnnnnnnnnnnnnnnnnnnnnnnnnnnnnnnnnnnnnnnnnnnnnnnnnnnnnnnnnnnnnnnnnnnnnnnnnnnnnnnnnnnnnnnnnnnnnnnnnnnnnnnnnnnnnnnnnnnnnnnnnnnnnnnnnnnnnnnnnnnnnnnnnnnnnnnnnnnnnnnnnnnnnnnnnnnnnnnnnnnnnnnnnnnnnnnnnn

SEQ ID NO: 5142 - DNA, 1038 bp, Zea mays
  misc_feature (10)..(10): n is a, c, g, or t
  misc_feature (14)..(15): n is a, c, g, or t
  misc_feature (34)..(34): n is a, c, g, or t
  misc_feature (43)..(43): n is a, c, g, or t
  misc_feature (52)..(53): n is a, c, g, or t
  misc_feature (66)..(66): n is a, c, g, or t
  misc_feature (69)..(70): n is a, c, g, or t
  misc_feature (74)..(74): n is a, c, g, or t
  misc_feature (81)..(81): n is a, c, g, or t
  misc_feature (85)..(86): n is a, c, g, or t
  misc_feature (90)..(90): n is a, c, g, or t
  misc_feature (112)..(112): n is a, c, g, or t
  misc_feature (226)..(226): n is a, c, g, or t
  misc_feature (333)..(333): n is a, c, g, or t
  misc_feature (342)..(342): n is a, c, g, or t
  misc_feature (509)..(509): n is a, c, g, or t
  misc_feature (527)..(527): n is a, c, g, or t
  misc_feature (537)..(537): n is a, c, g, or t
  misc_feature (539)..(539): n is a, c, g, or t
  misc_feature (541)..(541): n is a, c, g, or t
  misc_feature (546)..(547): n is a, c, g, or t
  misc_feature (549)..(549): n is a, c, g, or t
  misc_feature (552)..(552): n is a, c, g, or t
  misc_feature (558)..(559): n is a, c, g, or t
  misc_feature (569)..(571): n is a, c, g, or t
  misc_feature (576)..(576): n is a, c, g, or t
  misc_feature (587)..(587): n is a, c, g, or t
  misc_feature (591)..(591): n is a, c, g, or t
  misc_feature (609)..(609): n is a, c, g, or t
  misc_feature (619)..(619): n is a, c, g, or t
  misc_feature (626)..(626): n is a, c, g, or t
  misc_feature (641)..(641): n is a, c, g, or t
  misc_feature (649)..(649): n is a, c, g, or t
  misc_feature (654)..(654): n is a, c, g, or t
  misc_feature (656)..(656): n is a, c, g, or t
  misc_feature (664)..(664): n is a, c, g, or t
  misc_feature (666)..(666): n is a, c, g, or t
  misc_feature (670)..(670): n is a, c, g, or t
  misc_feature (674)..(676): n is a, c, g, or t
  misc_feature (678)..(679): n is a, c, g, or t
  misc_feature (686)..(686): n is a, c, g, or t
  misc_feature (690)..(690): n is a, c, g, or t
  misc_feature (692)..(692): n is a, c, g, or t
  misc_feature (694)..(694): n is a, c, g, or t
  misc_feature (701)..(702): n is a, c, g, or t
  misc_feature (711)..(712): n is a, c, g, or t
  misc_feature (723)..(723): n is a, c, g, or t
  misc_feature (727)..(727): n is a, c, g, or t
  misc_feature (731)..(731): n is a, c, g, or t
  misc_feature (733)..(733): n is a, c, g, or t
  misc_feature (742)..(742): n is a, c, g, or t
  misc_feature (744)..(744): n is a, c, g, or t
  misc_feature (751)..(751): n is a, c, g, or t
  misc_feature (756)..(756): n is a, c, g, or t
  misc_feature (759)..(759): n is a, c, g, or t
  misc_feature (767)..(768): n is a, c, g, or t
  misc_feature (771)..(771): n is a, c, g, or t
  misc_feature (774)..(775): n is a, c, g, or t
  misc_feature (779)..(779): n is a, c, g, or t
  misc_feature (785)..(785): n is a, c, g, or t
  misc_feature (789)..(789): n is a, c, g, or t
  misc_feature (792)..(792): n is a, c, g, or t
  misc_feature (800)..(800): n is a, c, g, or t
  misc_feature (806)..(806): n is a, c, g, or t
  misc_feature (810)..(811): n is a, c, g, or t
  misc_feature (817)..(817): n is a, c, g, or t
  misc_feature (822)..(822): n is a, c, g, or t
  misc_feature (831)..(831): n is a, c, g, or t
  misc_feature (833)..(834): n is a, c, g, or t
  misc_feature (838)..(839): n is a, c, g, or t
  misc_feature (844)..(845): n is a, c, g, or t
  misc_feature (847)..(847): n is a, c, g, or t
  misc_feature (854)..(854): n is a, c, g, or t
  misc_feature (857)..(857): n is a, c, g, or t
  misc_feature (865)..(865): n is a, c, g, or t
  misc_feature (867)..(867): n is a, c, g, or t
  misc_feature (869)..(870): n is a, c, g, or t
  misc_feature (872)..(873): n is a, c, g, or t
  misc_feature (879)..(880): n is a, c, g, or t
  misc_feature (885)..(885): n is a, c, g, or t
  misc_feature (890)..(890): n is a, c, g, or t
  misc_feature (892)..(893): n is a, c, g, or t
  misc_feature (897)..(899): n is a, c, g, or t
  misc_feature (901)..(902): n is a, c, g, or t
  misc_feature (913)..(913): n is a, c, g, or t
  misc_feature (916)..(916): n is a, c, g, or t
  misc_feature (918)..(921): n is a, c, g, or t
  misc_feature (929)..(929): n is a, c, g, or t
  misc_feature (932)..(933): n is a, c, g, or t
  misc_feature (941)..(941): n is a, c, g, or t
  misc_feature (944)..(944): n is a, c, g, or t
  misc_feature (951)..(952): n is a, c, g, or t
  misc_feature (954)..(954): n is a, c, g, or t
  misc_feature (959)..(959): n is a, c, g, or t
  misc_feature (966)..(967): n is a, c, g, or t
  misc_feature (974)..(974): n is a, c, g, or t
  misc_feature (980)..(980): n is a, c, g, or t
  misc_feature (991)..(991): n is a, c, g, or t
  misc_feature (994)..(994): n is a, c, g, or t
  misc_feature (1000)..(1000): n is a, c, g, or t
  misc_feature (1004)..(1004): n is a, c, g, or t
  misc_feature (1010)..(1010): n is a, c, g, or t
  misc_feature (1016)..(1016): n is a, c, g, or t
  misc_feature (1020)..(1020): n is a, c, g, or t
  misc_feature (1029)..(1031): n is a, c, g, or t
  misc_feature (1033)..(1036): n is a, c, g, or t
  misc_feature (1038)..(1038): n is a, c, g, or t
  Probeset Number=SeqID_19545
ccctgtgggntttnnttccccacacagagagagnaaagatagntatttcccnnccccccccccccnacnnatcnaggaggntcanntgantggaggagatggaccgcaaggnatgtcgggatcctcgccatggacatctacttcccgccctcctgcgtgcagcaggaggcacttgaggcccatgatagggcgggcaaagggaagtacaccattgggcttgggcaanattgcatggccttttgcaccagggtgggaggatggcatctcaatgagttttgacggttggtcaattctctgctgaaaaaatacaagattggatcccaagttaatcgnccgctttgnaggttggaaagtgaaacagttatagacaaaagtaaatccatcaaaacttggctgatgcagaccttgggggaaagtggtaacacggcctttgaagggggtgactccagcaatgctggttatggcgggacagcagcccctactgaattgtgtgaattggctccaaaagnatctccggggatggccgntatggtcctngncntttgnncnganagcgcnnttttatggcnnnaaggnccagctcgccnaaanaggaaggttgcctgccgnttatagaaantgcctcnttggtccctaaatgnttccaatnttccntntcgaagancnaaancatnnnannttttctncaanangngcctccnngttcttatnnaatttttttanaaancccncngatccttgncnaagcggnaaatntcnctggtttnnttnganngggngaaaantatnatnccccaaantcttgnttanncctcgnacggnacttctttngnnttcnntggcnnancagaaancanttcctttncnanncnngataanngaaanaaaantnngggnnngnnaaaatacattnttncnnnncctcttcnagnnatggtaantanatattcnntncggtncccctcnntcacctncatacnttacaataatnccncttgtnctanaatatnaatttncttnactcatacnnncnnnnan

SEQ ID NO: 5143 - DNA, 498 bp, Zea mays
  misc_feature (1)..(1): n is a, c, g, or t
  misc_feature (12)..(12): n is a, c, g, or t
  misc_feature (14)..(14): n is a, c, g, or t
  misc_feature (17)..(17): n is a, c, g, or t
  misc_feature (100)..(100): n is a, c, g, or t
  Peptide Sequence Number=SeqID_12329
  Probeset Number=SeqID_19546
nctagccaggtngngangctcccatcaaagcacccgctttggggaagtcttcgtttagggcaaaagcacccaattccccccttgtggttggtaggagaanttaattgactggggattcggcctccaaaggcttcccgggagggccttatggattaatcccctcccaatttcctatcctgggcagcagacgcctctgaaaaatggaaccggtaagcttgtggtgactaaatggataatccccctggaagcatcacctacccccaaaccccacctgttgtcaggatggtttgttacgtattttattacttgcaacaccataacgtgattgatgcttggtcatagaatcagctgaagtacttgccctaaactcttccagttctttagtgagaagttggcctgctcttgcatttcttgctcccaaccgctgagcgcaaattagaacagccctgcacatcttgtatcctatttgatgtagtagcagatgaatcggtgttgaat

SEQ ID NO: 5144 - DNA, 1072 bp, Zea mays
  misc_feature (1)..(1): n is a, c, g, or t
  misc_feature (8)..(31): n is a, c, g, or t
  misc_feature (40)..(40): n is a, c, g, or t
  misc_feature (42)..(61): n is a, c, g, or t
  misc_feature (69)..(70): n is a, c, g, or t
  misc_feature (87)..(89): n is a, c, g, or t
  misc_feature (99)..(106): n is a, c, g, or t
  misc_feature (108)..(117): n is a, c, g, or t
  misc_feature (135)..(141): n is a, c, g, or t
  misc_feature (146)..(147): n is a, c, g, or t
  misc_feature (152)..(158): n is a, c, g, or t
  misc_feature (164)..(165): n is a, c, g, or t
  misc_feature (167)..(167): n is a, c, g, or t
  misc_feature (179)..(179): n is a, c, g, or t
  misc_feature (194)..(194): n is a, c, g, or t
  misc_feature (198)..(198): n is a, c, g, or t
  misc_feature (207)..(209): n is a, c, g, or t
  misc_feature (217)..(217): n is a, c, g, or t
  misc_feature (227)..(227): n is a, c, g, or t
  misc_feature (229)..(230): n is a, c, g, or t
  misc_feature (249)..(252): n is a, c, g, or t
  misc_feature (1070)..(1072): n is a, c, g, or t
  Peptide Sequence Number=SeqID_12330
  Probeset Number=SeqID_19547
ntacccannnnnnnnnnnnnnnnnnnnnnnngccaagggngnnnnnnnnnnnnnnnnnnnncaaaaagnnagctaccgcgacaaccnnngggacgccannnnnnnngnnnnnnnnnncctgttgctgcagggctnnnnnnntgaannaaggnnnnnnntttttnncnctttatttgaantgactgacgcggctngccntttttacgnnntttgagcnggaccttgcngnncgcccccgccgcgcaaggnnnnaaggagccaccatgagcctgcccaatcccgccgacctgatcagccagatggcgatccgcctcaaggcgcacctggaacaccgcgccatcagcgagccgcgttttatcggcattcgtactggtggcgtgtgggtggcccaggcgctcttggaagaactgggcagcgactcgcccctcggcaccctggacgtgtccttctaccgcgacgacttcagccagaacggcctgcacccgcaagtgcgtccttcggccctgccgttcgagatcgaaggccagcacctggtgctgatcgatgacgtcctgatgagcggtcgcaccatccgcgccgccatgaacgagctgttcgactacggccgcccggccagcgtgacgctggtctgcctgctggacctggatgccggcgaattgccgatcagcccggacgtcgtcggcgccaccctgtccctggaagcccaccagcgggtaaaattgtccggtcccacgccgctcgaactcgaactgcaagaccttgccctttaaaccgccttgtaaagagtccccgcgatgacgcctctagatgccaagcgcccgctgcagctcaatgctcagggccagctgcaacacttcctgtccctcgacggcttgccccgcgaactgctcaccgaaatcctcgacacggccgactcgttcctcgaagtcggcggtcgggcggtgaaaaaagtcccgctgttgcgcggcaagaccatctgcaacgtgttcttcgagaactcgacccgcacccgtaccacctttgagctggcggcccagcgcctgtcggctgacgtgatcacgctgaacgtnnn

SEQ ID NO: 5145 - DNA, 679 bp, Zea mays
  misc_feature (395)..(397): n is a, c, g, or t
  misc_feature (400)..(405): n is a, c, g, or t
  misc_feature (412)..(417): n is a, c, g, or t
  misc_feature (419)..(429): n is a, c, g, or t
  misc_feature (440)..(448): n is a, c, g, or t
  misc_feature (451)..(507): n is a, c, g, or t
  misc_feature (516)..(599): n is a, c, g, or t
  misc_feature (602)..(612): n is a, c, g, or t
  misc_feature (615)..(627): n is a, c, g, or t
  misc_feature (629)..(640): n is a, c, g, or t
  misc_feature (643)..(653): n is a, c, g, or t
  misc_feature (655)..(675): n is a, c, g, or t
  misc_feature (677)..(679): n is a, c, g, or t
  Peptide Sequence Number=SeqID_12331
  Probeset Number=SeqID_19548
ttttttttttttttttgagaaaggagccaattcttgttatcacctttagatacatagttggcaattacaaacaatgaaactgtttaaaatcgttcacccatggtattcgtaacagcaataggtggattctgaagagatgaaccgtggtgttgttagaagtcctgcttcgttctgtattcttctattgtgcatcaacatctgggtgacacaatgccaaagccgctggtgacaaggtggtgaggacaatgatctccatgttttgatggttggaaggcagatcgatgaccaaaggggtcggtcgcccttgggaaccggctcgcacacataacgtgatgcgggtggatcggttccttgagcagactcgctaggtgggctctcagtcgcaacagtgagtnnncgnnnnnnttgcatnnnnnncnnnnnnnnnnntttgacgttcnnnnnnnnnctnnnnnnnnnnnnnnnnnnnnnnnnnnnnnnnnnnnnnnnnnnnnnnnnnnnnnnnnntggaaaagnnnnnnnnnnnnnnnnnnnnnnnnnnnnnnnnnnnnnnnnnnnnnnnnnnnnnnnnnnnnnnnnnnnnnnnnnnnnnnnnnnnnaannnnnnnnnnnaannnnnnnnnnnnngnnnnnnnnnnnnaannnnnnnnnnntnnnnnnnnnnnnnnnnnnnnntnnn

SEQ ID NO: 5146 - DNA, 679 bp, Zea mays
  misc_feature (1)..(3): n is a, c, g, or t
  misc_feature (5)..(25): n is a, c, g, or t
  misc_feature (27)..(37): n is a, c, g, or t
  misc_feature (40)..(51): n is a, c, g, or t
  misc_feature (53)..(65): n is a, c, g, or t
  misc_feature (68)..(78): n is a, c, g, or t
  misc_feature (81)..(164): n is a, c, g, or t
  misc_feature (173)..(229): n is a, c, g, or t
  misc_feature (232)..(240): n is a, c, g, or t
  misc_feature (251)..(261): n is a, c, g, or t
  misc_feature (263)..(268): n is a, c, g, or t
  misc_feature (275)..(280): n is a, c, g, or t
  misc_feature (283)..(285): n is a, c, g, or t
  Peptide Sequence Number=SeqID_12332
  Probeset Number=SeqID_19549
nnnannnnnnnnnnnnnnnnnnnnnannnnnnnnnnnttnnnnnnnnnnnncnnnnnnnnnnnnnttnnnnnnnnnnnttnnnnnnnnnnnnnnnnnnnnnnnnnnnnnnnnnnnnnnnnnnnnnnnnnnnnnnnnnnnnnnnnnnnnnnnnnnnnnnnnnnnncttttccannnnnnnnnnnnnnnnnnnnnnnnnnnnnnnnnnnnnnnnnnnnnnnnnnnnnnnnnagnnnnnnnnngaacgtcaaannnnnnnnnnngnnnnnnatgcaannnnnncgnnnactcactgttgcgactgagagcccacctagcgagtctgctcaaggaaccgatccacccgcatcacgttatgtgtgcgagccggttcccaagggcgaccgacccctttggtcatcgatctgccttccaaccatcaaaacatggagatcattgtcctcaccaccttgtcaccagcggctttggcattgtgtcacccagatgttgatgcacaatagaagaatacagaacgaagcaggacttctaacaacaccacggttcatctcttcagaatccacctattgctgttacgaataccatgggtgaacgattttaaacagtttcattgtttgtaattgccaactatgtatctaaaggtgataacaagaattggctcctttctcaaaaaaaaaaaaaaaa

SEQ ID NO: 5147 - DNA, 584 bp, Zea mays
  Probeset Number=SeqID_19550
tgggtgccgggccccccctcgagtggttttttttttttttctttgggctcaaatctgtgatcagaaaacgtttacagaaggcggagcaagggcgcagagcactgcagacgcatccatagggcctcaggaccaaaataacatcacagaaaagctagaataatcagatccatgcttcaaaaccctccaaatctcgatccccgttacatattatccatttcttacaagcatacatcacgtgaagtggggatcgaataaaaaaaaaaggggaagaaaatcatgacagagatggccatgcagccaagtggctgcagaaatgtccatgcggccaaatggtagaataaagaataaaaattcagagagagatttggaagaacagaaaacacagttttagagttaatattaggggcagcttccatcgttcagagaaccgaagtgcttgccacaccaaacaaaaagagacatgcgaagagagaggaatagcatggcatgcatgcagcgcacagtgcactgcctcgtgccgtggcagccggtaggcgcgctcggcatctgtttgtggcggctggagggagcacaaatcctcgtgc

SEQ ID NO: 5148 - DNA, 584 bp, Zea mays
  Peptide Sequence Number=SeqID_12333
  Probeset Number=SeqID_19551
gcacgaggatttgtgctccctccagccgccacaaacagatgccgagcgcgcctaccggctgccacggcacgaggcagtgcactgtgcgctgcatgcatgccatgctattcctctctcttcgcatgtctctttttgtttggtgtggcaagcacttcggttctctgaacgatggaagctgcccctaatattaactctaaaactgtgttttctgttcttccaaatctctctctgaatttttattctttattctaccatttggccgcatggacatttctgcagccacttggctgcatggccatctctgtcatgattttcttccccttttttttttattcgatccccacttcacgtgatgtatgcttgtaagaaatggataatatgtaacggggatcgagatttggagggttttgaagcatggatctgattattctagcttttctgtgatgttattttggtcctgaggccctatggatgcgtctgcagtgctctgcgcccttgctccgccttctgtaaacgttttctgatcacagatttgagcccaaagaaaaaaaaaaaaaaccactcgagggggggcccggcaccca

SEQ ID NO: 5149 - DNA, 874 bp, Zea mays
  misc_feature (1)..(6): n is a, c, g, or t
  misc_feature (15)..(18): n is a, c, g, or t
  misc_feature (23)..(26): n is a, c, g, or t
  misc_feature (33)..(36): n is a, c, g, or t
  misc_feature (38)..(41): n is a, c, g, or t
  misc_feature (43)..(47): n is a, c, g, or t
  misc_feature (471)..(471): n is a, c, g, or t
  misc_feature (611)..(611): n is a, c, g, or t
  Probeset Number=SeqID_19552
nnnnnncggggcggnnnncgacnnnncctctcnnnntnnnngnnnnnaaaaaaagaataatctctccactttccttcaggatccagcccgcaccaccgcacgtctcctcctctctcaacaccggccaccgtaacaggaataatccagctcgtgattgaagaatccgatgacgacgccatgcctgggcgccgcggccttaagcgccagctggacggcgccctccctgacgggggcgtttctcgatctgacgctcgcctgggcctgcctctgcctcgccgcgctcgccgccgtcgccgcgcgcctcctcgcgctcctcggcctcccgctcccctgcacctgcgcgcgcccgcacctgccctgcctcctcgccttcctggcgcgctaccctccccgcgccgtcggatcccttcacgccgccctccgcgcccgcttccccttcgccggccccaccgacgacgaggcacgcctcanaaaaagtgtgccaggaagagggccgaggaggagtcatcgcatgtgcgcgaggaggaaaggggattttccgtcgcctgcgtgtaagtcccatcgccgagctgcagaatgcacgctctagaaaagagcgcaccgcccgcggnggttcgggggcccggaggaggccatggtcccatgcaccctggcgccttgcagaaaggaaaaagccggcagcttgaaaattgagggggggaaagggaatggcccaaaccgcttgagggagggggtggcccctttctaaaagggaccaagggcaagggaagcctcgcgggaaatcgtggcccctgtggggaacggaaaaaggccccccgttttccacaaagggggtggaagccctaaccggcccttggtccctattaaagggcaa

SEQ ID NO: 5150 - DNA, 286 bp, Zea mays
  Peptide Sequence Number=SeqID_12334
  Probeset Number=SeqID_19553
ttttttttttttttttgacaattaatggatcgatctgcttctgcttttgtatagcagtgtgtaaagtaattacacttgcttccactttctcgcccgccacatttaatggtttaaagttattaccttgagtaaaaaaaaagaatcaataaacgcctagtcctgcagccatatcaacgtcagcgccgtccatgtcgccgtcctccgggatttcctggccgtaaacctcgtgctcctcctcgtccatggcgccgcgtgagctccctcgcttccccgatggcccgatctc

SEQ ID NO: 5151 - DNA, 645 bp, Zea mays
  misc_feature (1)..(3): n is a, c, g, or t
  misc_feature (6)..(6): n is a, c, g, or t
  misc_feature (536)..(536): n is a, c, g, or t
  misc_feature (538)..(540): n is a, c, g, or t
  misc_feature (551)..(553): n is a, c, g, or t
  misc_feature (556)..(567): n is a, c, g, or t
  misc_feature (573)..(645): n is a, c, g, or t
  Probeset Number=SeqID_19554
nnnatntttgcgcttggggcaatgacgcagctagtgaggttataccgaggcgcgtcaattgctggttgaaaactatttccaaaccccctctttggcccttatgggccactgagaatttctggaagggctccctctcttcggagaggggaaagccctacaattccagctcacgtttctcatcccgttcccgatcccctttgcctgtttcttttctcctcgtcgccggagacttggagcctcgcagccgccccacttcccatcctcttgccccctcatccccaggagagccagccagccagccaggaataatcctcttctccgcgcggcgacccgacgcggcggccaggcgacgtcgctgtccactccgccggcgggttcctgccgcctgattccgccaggcttcgattcggccgttcgccgccgccggaggtcggggagaggcagctaccgaccagccgtccacgccgcgggcgacggggttcccgctcccgtcaggaacgccgccgaaaacattggcttccataacttcgcccggngnnngagttggcctnnnaannnnnnnnnnnnagatgnnnnnnnnnnnnnnnnnnnnnnnnnnnnnnnnnnnnnnnnnnnnnnnnnnnnnnnnnnnnnnnnnnnnnnnnn

SEQ ID NO: 5152 - DNA, 645 bp, Zea mays
  misc_feature (1)..(73): n is a, c, g, or t
  misc_feature (79)..(90): n is a, c, g, or t
  misc_feature (93)..(95): n is a, c, g, or t
  misc_feature (106)..(108): n is a, c, g, or t
  misc_feature (110)..(110): n is a, c, g, or t
  misc_feature (640)..(640): n is a, c, g, or t
  misc_feature (643)..(645): n is a, c, g, or t
  Peptide Sequence Number=SeqID_12335
  Probeset Number=SeqID_19555
nnnnnnnnnnnnnnnnnnnnnnnnnnnnnnnnnnnnnnnnnnnnnnnnnnnnnnnnnnnnnnnnnnnnnnnnncatctnnnnnnnnnnnnttnnnaggccaactcnnncnccgggcgaagttatggaagccaatgttttcggcggcgttcctgacgggagcgggaaccccgtcgcccgcggcgtggacggctggtcggtagctgcctctccccgacctccggcggcggcgaacggccgaatcgaagcctggcggaatcaggcggcaggaacccgccggcggagtggacagcgacgtcgcctggccgccgcgtcgggtcgccgcgcggagaagaggattattcctggctggctggctggctctcctggggatgagggggcaagaggatgggaagtggggcggctgcgaggctccaagtctccggcgacgaggagaaaagaaacaggcaaaggggatcgggaacgggatgagaaacgtgagctggaattgtagggctttcccctctccgaagagagggagcccttccagaaattctcagtggcccataagggccaaagagggggtttggaaatagttttcaaccagcaattgacgcgcctcggtataacctcactagctgcgtcattgccccaagcgcaaanatnnn

SEQ ID NO: 5153 - DNA, 886 bp, Zea mays
  misc_feature (1)..(18): n is a, c, g, or t
  Peptide Sequence Number=SeqID_12336
  Probeset Number=SeqID_19556
nnnnnnnnnnnnnnnnnnacggtttttttttttttttttggtgtagcatataaggggctgacattgatatcaattatcattgtcccacaattggttttctttcctagccatccccatctttgtcgtagctaggtattccctgccaacaagaacaaatgacatggggaatccactacagtcctccgctctaccaactgagctaaggtcggtttttatacttacttggccttgaaatatttataactatgacatacaccacaaacactcatactgcaacttgtgtaacacacaaaaaagtaggaaaccttgccctacgtatgtattctttttcttcctcttatttcttctacatctttgctcaagaacgacggctggctcccttgggtgcctcgatatggtgtagactatcttggagttctatagtaatctctgcaaaagtcagacacgcatcaggatctttgtcctagcaccgtcgaatcagcttggtcaatcttgggtgcacgctgcccggaatgtccaagcgcaatcccaacagtttgatcgtcccaaaatcacgtctccctgagttatattttaagccaaaaaaagccagtcaagtaaattttgcaaagctgagtgtgaagaatatggaagttagtaggttgacgacagaggtagtttgtttcagtagtgatagcctaataattaaggcagtttgtttcaatagaacattgacatcttgctcgtccctccacccattcctcatgaacacgaagtaagcgttgggtgccctcttgggcttgttgggtccttgccggtattgatcccaagccaaggtattgtttcaatgttgtatcagtgtgctccaagccaaggtattgttcccaagcaccatatacatctctcc

SEQ ID NO: 5154 - DNA, 617 bp, Zea mays
  misc_feature (616)..(617): n is a, c, g, or t
  Peptide Sequence Number=SeqID_12337
  Probeset Number=SeqID_19557
aaactagctgttagcctacctttcccctcccagccgtgggacgcaccaccctcagcctcccagctgccgcacacgtggaggctccacgcgaccacgcggcagcggcacgccggcacgcgcgccgcccggcgcccctcagcctcgcgccctcgccggccacgcgcctcagtcttgcgctctcgccgcgttaagccggtcagccttgcgggttgcggtctcgccgccgacgccgggcgccgggattgccggctgcccgccttgccggagacgggagacgccatgtccttgctgctcctgcccctctgtcgaacctccgcggaccgcgccgttccctggttgtcgtaggacgtcggcaggagtccctccgccgtcacccgtcagacgcgccaccgcggcgccgcctccccaggctcccctgctctgctccacagcttcagtgctccgtggtgcgatatcacctgtccatgctgaagcaagagctggaagactcttccagtaatcatgggtgcatgtgcctcttcatcttgtgggcgaccccaccatggcaggaaccagaaatcagcaaaggtcgcggcaattcctggtactccggcagcgcaggtaggtcgtggtgctnn

SEQ ID NO: 5155 - DNA, 264 bp, Zea mays
  Probeset Number=SeqID_19558
cccgcattcggctcgagccccgatattttcctttcagctcaacgcgattgctttgatgaggagaaggatactacagcgtgatgtggagatagaggttgaagcagttgacagcatcaggaacattcataggttcgttgtgggagtccacgaccatccatagggctcaattgctccgagtgccagtattccacagtacctcccaccagttacttcaatgggcttcgaacatccagccgtgcaagcctaaaggcgacaactagcgct

SEQ ID NO: 5156 - DNA, 762 bp, Zea mays
  misc_feature (13)..(19): n is a, c, g, or t
  misc_feature (601)..(762): n is a, c, g, or t
  Peptide Sequence Number=SeqID_12338
  Probeset Number=SeqID_19559
ctcgactgtgaannnnnnngacgacgagctgggcaggatccaagctaataggtacagtatgggacagcgaccagcacaacggacgaactaagtcgcgaggtcggccgacgagggaattcaaggaacactacggtcagtcagcgagctggcaagttcggatagggactgctgacgtgaggaccatgacgaatatgaaatcgatgaccgaccaagatatgattggtgagttgagcgactccgatgatttgacggcagtcgcgacagcgaacaggaggacgtgcgcagagaaacagcacggcacggtatcaagcgccattggtcggacgagttcggacaccagcacacgcagcgttttaccatgcccaacacgcgcgtcacggacttgatatcgactgcgagcagtttcgcgcgcacgacaacgcgatggaggcgaactgaacagggagcttcacggcaggacacgcaggaataacgaaacgcgatgcgcgcgacgcaaagaattcgaccggcgagcagagaggctgggcaactcctggacgagcagagcgcgcagggcgagcagcaacgcgcccgccccccaagctgagggtgcgacgcggcnnnnnnnnnnnnnnnnnnnnnnnnnnnnnnnnnnnnnnnnnnnnnnnnnnnnnnnnnnnnnnnnnnnnnnnnnnnnnnnnnnnnnnnnnnnnnnnnnnnnnnnnnnnnnnnnnnnnnnnnnnnnnnnnnnnnnnnnnnnnnnnnnnnnnnnnnnnnnnnnnn

SEQ ID NO: 5157 - DNA, 1765 bp, Zea mays
  misc_feature (1)..(20): n is a, c, g, or t
  misc_feature (24)..(27): n is a, c, g, or t
  misc_feature (118)..(122): n is a, c, g, or t
  misc_feature (1156)..(1158): n is a, c, g, or t
  misc_feature (1164)..(1166): n is a, c, g, or t
  misc_feature (1308)..(1310): n is a, c, g, or t
  misc_feature (1343)..(1345): n is a, c, g, or t
  misc_feature (1348)..(1350): n is a, c, g, or t
  misc_feature (1385)..(1386): n is a, c, g, or t
  misc_feature (1548)..(1550): n is a, c, g, or t
  misc_feature (1552)..(1552): n is a, c, g, or t
  misc_feature (1765)..(1765): n is a, c, g, or t
  Probeset Number=SeqID_19560
nnnnnnnnnnnnnnnnnnnnctgnnnntgacctgggtaggcagttccatgctatttctatcaagcacagatgccatgatgcactctgtgtgagcagtgcacttgttagtatgtatgcnnnnnaaaggaagcatcgagaatgctcagtgtgtctttgagaggcaaacagatagagatttgctgtcatggaactcaatgctatcagggtacgcacaacatggttacagccaaaaggcccttgatgtatttcgacagatggaagttgagggcattgatatggatggtcttacattcctttctgtgattatgggatgcgctcatgctggtcttgttgaagaaggtcagcaatactttgatttgatggtcagagactacgggatcactccaacgatggatcattatgcatgcatggttgatctctatagccgcgcaggcaagctggatgaaacaatgagcctcattgaaggcatgccattcccagcaggtccaacaatatggcgcgcattgctaggagcctgtagagttcacaagaatgttgagcttggaaagttggctgcggagaagctgctgtcacttgaacctcttgactcagctacgtacgtacttctctccaacatttattcggctgcagggaagtggaaagagaaggatgaagtgaggaagctaatggacactaaaaaggttaggaaagaagctggatgcagctggattcagatcaagaacaaagttcatttctttatagcttcagacaagtcgcatcctttatcagaacaaatatatgcaaagctcagggcaatgacagctaagttaaagcaagaaggttattgtcctgatacaagctttgtgcctcatgatgtggcagaagaccagaaagaagctatgctggcaatgcacagtgagcgcctagccctcgcatttggtttgatagctacaccaccagcggcaccccttcacattttcaagaacctgcgggtgtccggggacggccacacagtgatgaaaatggtctctgaaattgaggatagggagattgtaatgcgagattgctgcaggttccaccacttcaaatcaggggtctgctcttgtggcgatttctggtgaatggattttgaaaaaaaatggttgtgcattcaataaaaaaaaaaaaaagcggttgnnnaatatnnntggtaagttggcttctagatgttttaagatctttcgtatatgaggttggatgttattcctaacagaaaaggagtgagttagctcttggctcagccaaaggacatggcattcctcaagtacgtcaacaagtggaaggattacnnnggtggcggtctgccagcggtgggaggataactnnngcnnntgggtgtcagggtttgcagtagctaagttatttannatgtgtttggtttgaggtcaaagtggtacaaggcgggggcgacactgtcccttcaattttttaagatcacgccgctaaaaaaactactttggtgtttacgtcgttcctacgtgactctcatctaaaccctatagaaactgtgaccgtcccattttatccttnnntntacttggttaggtcgtcacagtggttcgccatactcgtcgcattagctaatgaaaactgtactagaacctagttttcttccctttgctactgaaatgaacactggttcacaaatgaaaagcttttgctactgaagtgaactgtgccactctttttccacctttgcgttccatgtgtttaacactggttcacaaatgaaaagcctttgctactn

SEQ ID NO: 5158 - DNA, 965 bp, Zea mays
  misc_feature (1)..(9): n is a, c, g, or t
  misc_feature (961)..(963): n is a, c, g, or t
  misc_feature (965)..(965): n is a, c, g, or t
  Peptide Sequence Number=SeqID_12339
  Probeset Number=SeqID_19561
nnnnnnnnngaggctcctatctggtataggacggagctgagcttctagcaacgtacagtgtatccgccatgagtcctttcggggcggtgatcacgccagaaaccctcaagtacatgtccaagtaccagggacgtgagatcacgcaggtggactgcgcacgggaggcgatgaggctgatccacgcggaagacaagaacctcaaggccgaggactcagcgtgggagctgaagaagaagttcggcaacggcgtgagcaccatggtcctcgtctacaacgccaccggggccagcctgagcctggtggacgacgggaaagactggatgggctccgtctacagctcgccgatcccggacaccttccacaacgggcagtggatcgccttcctccacgtcaagcccggctcgctggcgcagggcagccaggccgccagggtgttccgcggcagggacgtcgatggccggactcgggacttcgtcgtcgcctggtacatcccgtgggacaacataccgacacgagtacgtacgtctcacctgtgttttgatattgtaatactagtagtatacacttgattgtctcgccatcgtcgtctcacacacatttggcatgcttgcaggcttacactgaaattggcagtgaaaactacttcaagactcggtggagtagtgtcaaaacgagtctaggacattcaaggagagtgacccgtgccaaggacgagaactgtgcgtcaacggttagcatcggtggctacactacagccttctgcatcgcagtcctacaacaccagttcgagccgctgccggaagagcgcgaataatccagctcgatcgagtttgcgcgttattacctcctaatttaaataagctgtgcacgcaaacgtaagactgtattagtatttatatatgtattacatgtatgtcgtctattacaatacttatgtgcagtacataaaaatgatcttttnnntn

SEQ ID NO: 5159 - DNA, 793 bp, Zea mays
  misc_feature (1)..(12): n is a, c, g, or t
  misc_feature (721)..(793): n is a, c, g, or t
  Peptide Sequence Number=SeqID_12340
  Probeset Number=SeqID_19562
nnnnnnnnnnnngcaacccaccaccctcaggtcaggcctcgctcagatctctccgcccgcgtcccccctcccaccccaaaccctcgtgcccgcctctctcgtcaacgccgcccgacgagagcgatggcggcctcgccggccccggccgcggcgctcctcgtcctcctcgccctcgcggcggccggcggcgtggcggccgacggctccgaccaccggtacaagatgcgcgaagcccgtccccctcgacgcccacaaggtccggcccatttcacaatccccagtggaaacattatcgatattctcgaccctggcctttctggctctccctgacaaaaggtgaaaggagaaagagccgaggccccctttggggggagggttcctccaaacggggcaaatcggcgtaaaacgtagactggcgcccattaccgtaggcttcgatttctccccggggcacccgcaagccctgctccacccccccacggcccacgttctctcctccccagacaaaaggaccttaaattaacccaggggcctgctgcgcataccggcagccgcgccaccaaaacccgacccccggtatcaaccaaagcgtattaactgcatcctactgcgagaaaacaaacaccgatagcaccaaactcccgcccgaaccaaccgcaccgcgtctgctcccccttcacacaccaacacgccagcacagagcgcggcggcagagaacgannnnnnnnnnnnnnnnnnnnnnnnnnnnnnnnnnnnnnnnnnnnnnnnnnnnnnnnnnnnnnnnnnnnnnnnn

SEQ ID NO: 5160 - DNA, 793 bp, Zea mays
  misc_feature (1)..(181): n is a, c, g, or t
  misc_feature (782)..(793): n is a, c, g, or t
  Probeset Number=SeqID_19563
nnnnnnnnnnnnnnnnnnnnnnnnnnnnnnnnnnnnnnnnnnnnnnnnnnnnnnnnnnnnnnnnnnnnnnnnnnnnnnnnnnnnnnnnnnnnnnnnnnnnnnnnnnnnnnnnnnnnnnnnnnnnnnnnnnnnnnnnnnnnnnnnnnnnnnnnnnnnnnnnnnnnnnnnnnnnnnnnnnnnncgcagtaggatgcagttaatacgctttggttgataccgggggtcgggttttggtggcgcggctgccggtatgcgcagcaggcccctgggttaatttaaggtccttttgtctggggaggagagaacgtgggccgtgggggggtggagcagggcttgcgggtgccccggggagaaatcgaagcctacggtaatgggcgccagtctacgttttacgccgatttgccccgtttggaggaaccctccccccaaagggggcctcggctctttctcctttcaccttttgtcagggagagccagaaaggccagggtcgagaatatcgataatgtttccactggggattgtgaaatgggccggaccttgtgggcgtcgagggggacgggcttcgcgcatcttgtaccggtggtcggagccgtcggccgccacgccgccggccgccgcgagggcgaggaggacgaggagcgccgcggccggggccggcgaggccgccatcgctctcgtcgggcggcgttgacgagagaggcgggcacgagggtttggggtgggaggggggacgcgggcggagagatctgagcgaggcctgacctgagggtggtgggttgcnnnnnnnnnnnn

SEQ ID NO: 5161 - DNA, 593 bp, Zea mays
  Peptide Sequence Number=SeqID_12341
  Probeset Number=SeqID_19564
atacgtacaaggcagttggtagggatatgctgatattttggaaacgagtagacaaagagcagtatgagttgagaaaaaaagaggaaagagaagctgctgaagctttaaaacgtgaggaggagcttcgtgaagccaaaagacaacaacagaggctaaactttctgctgtcacaaacggagctttatagtcatttcatgcagaacaaggctggtggctcagcgccacctgatgaggaagatgtccctgatgaagatgaggaagaagatcctgaagaagctcaattgaaaagagaggccttgagggcagctcagcatgccgtctctcaacaaaagatgaagactaatgcatttgatagtgaaattgtgaggcttcgtcaaacttctgattctgctcttccaactgatgattcatctagcatggatcctagtaagattgatctattacacccttcaacaatgcctgagaagtcatctgtgcagacaccagagttgtttaagggtgtattaaaagaatatcagttaaaaggcttacaatggctggttaattgttatgaacaggggttgaatggcattcttgctgatgagatgggtctt

SEQ ID NO: 5162 - DNA, 497 bp, Zea mays
  Peptide Sequence Number=SeqID_12342
  Probeset Number=SeqID_19565
acaagtagccccgcgcgccacctcgctgccggccgccggcacacagatagagaaagagagagagactgagagagagagggaggggaagcgaagagaccagaacaagagcgaagatggtcggactcctccccgagaccaatgccgcggcggagacggacgtcctcctcgacgcctgggacttcaagggccggccgagcagcaacgaccgagccctggccgagctgccctcccccgacgcgcacctctctccatcacgccgagccgagccctgtcaggacggtacagctacagcggcaagcagccgacgacacctctctccatcacgccagcgacagcgccgatgagccactgaagaaggacgggtcgttctttgatttcctcggcgtcgggcgaactgcatgcggtagtagctgacaagtattcagggttagagttcatcgacattgatggttacagtgttctcatcatcatgtggtgattcatcagtcaaataaggc

SEQ ID NO: 5163 - DNA, 1198 bp, Zea mays
  misc_feature (490)..(490): n is a, c, g, or t
  misc_feature (534)..(534): n is a, c, g, or t
  misc_feature (553)..(553): n is a, c, g, or t
  misc_feature (685)..(1198): n is a, c, g, or t
  Probeset Number=SeqID_19566
cagcctcaagtccagggtttccttcatctacttcgcgggaccggcgctggagcagcggatcgcgccgctggcgcagctgctggcggagggcgaggagagcctgtacagggagttcacgtggggcgagtacaagacggccgcgtacaagacgaggctcggcgacaacaggctggcccagtttcagaggcacaccagctttacaggacgacaacagcaacaaccatgacgaaccaggacgagcgagctgctcccgagttgcgggctgcgggggcgcggcacaggaagaacaactagggacgagacgatgatgatgtgtacagctggggagcgaccactccagtagctagatttttttttgtggtggtggactggtggtgggtagctgggtgcagggagcagggtttccgcaagttgctaatatggcctgttttggtgcatgcggtggggttacttgcctaaaatttcggtaatgctggagctggacgggcantgagccgcgcgccactagttggggttaaccgaagggggaggagnacttaccttttcagccaangtccaatccatcctctctgtctccttgccagaaactgggcgcgggggcttgcttctgcttccccctcctcattcttccaagaagggagatcccccccgcgcgtgccaaaagagaggctttttatctttttgnnnnnnnnnnnnnnnnnnnnnnnnnnnnnnnnnnnnnnnnnnnnnnnnnnnnnnnnnnnnnnnnnnnnnnnnnnnnnnnnnnnnnnnnnnnnnnnnnnnnnnnnnnnnnnnnnnnnnnnnnnnnnnnnnnnnnnnnnnnnnnnnnnnnnnnnnnnnnnnnnnnnnnnnnnnnnnnnnnnnnnnnnnnnnnnnnnnnnnnnnnnnnnnnnnnnnnnnnnnnnnnnnnnnnnnnnnnnnnnnnnnnnnnnnnnnnnnnnnnnnnnnnnnnnnnnnnnnnnnnnnnnnnnnnnnnnnnnnnnnnnnnnnnnnnnnnnnnnnnnnnnnnnnnnnnnnnnnnnnnnnnnnnnnnnnnnnnnnnnnnnnnnnnnnnnnnnnnnnnnnnnnnnnnnnnnnnnnnnnnnnnnnnnnnnnnnnnnnnnnnnnnnnnnnnnnnnnnnnnnnnnnnnnnnnnnnnnnnnnnnnnnnnnnnnnnnnnnnnnnnnnnnnnnnnnnnnnnnnnnnnnnnnnnnnnnnn

SEQ ID NO: 5164 - DNA, 237 bp, Zea mays
  misc_feature (75)..(75): n is a, c, g, or t
  misc_feature (81)..(81): n is a, c, g, or t
  Peptide Sequence Number=SeqID_12343
  Probeset Number=SeqID_19567
acaaattgagagagagggagaagggggtgggggttacgtaacacggcgattcaggaggggatagcatcgtcatcncaaaangcaggctctcctgctccccgcgcgggccgccgccgacgccggcattgcttcggcagcgtgcggtttctgcctccgcgtgtgcgtcgcaggagagcctgcatttttgcggtgacgatccttttccccaaattaccgactttgattatactgtgcgat

SEQ ID NO: 5165 - DNA, 796 bp, Zea mays
  misc_feature (1)..(12): n is a, c, g, or t
  misc_feature (642)..(642): n is a, c, g, or t
  misc_feature (674)..(675): n is a, c, g, or t
  misc_feature (679)..(680): n is a, c, g, or t
  misc_feature (698)..(702): n is a, c, g, or t
  misc_feature (704)..(707): n is a, c, g, or t
  misc_feature (724)..(726): n is a, c, g, or t
  misc_feature (728)..(728): n is a, c, g, or t
  misc_feature (734)..(741): n is a, c, g, or t
  misc_feature (743)..(784): n is a, c, g, or t
  misc_feature (789)..(793): n is a, c, g, or t
  misc_feature (796)..(796): n is a, c, g, or t
  Probeset Number=SeqID_19568
nnnnnnnnnnnncgggagcggaggcgcaaaacccaaattcggctcgagggctccggcgctatgggcggcgcctccaagctgctctcctccctcctcctcacttcctccccgctccgcctccgacccgctactgccgccgccgccgcgctgttcctatccccgcccgcggcggcctcgcgccgcctgttcctgctctcctcgccctccccgcaccgtaccctctccacctcgtcctcttcccccttccgcacggctccagctcggcatgcccggcgccaccgctccgagcgcctttccccgagtggtcccgcctcgtcgaccggcttgccgccaccgggtacggctccggcgtgcccttttccgctgacgatctcgcgagccctcgtgtccggatgcgtcctgtcggacggggagcaggccgctgtctccacctgcctcgccttcgcgcgcgaccggcctgacctcctcagttcgcttcaaaggaaggatgtggaggtcctggtgggcaatgtggcgccgtctctgttcaaggacggggaggcatcagcgctgcggcttcggcgctaccttgctggggaagaaaccgatgtcactgtttcagacagagctgaaactgtcgatattgttcgatatctgctaagntacacatacggttcttctgtcagctgctcagnngacnnggaactcactgattcggnnnnnannnntatcatggctgagttannnanttttannnnnnnntnnnnnnnnnnnnnnnnnnnnnnnnnnnnnnnnnnnnnnnnnngctcnnnnnagn

SEQ ID NO: 5166 - DNA, 477 bp, Zea mays
  Peptide Sequence Number=SeqID_12344
  Probeset Number=SeqID_19569
aaaacggaccggatcccgacccaatttaaccaagccccccatcagttgcggccgcgcgctcgtgccgttgcgctgcggcaaagcctccccccacacctctctcctccacccgccgcccccgcgggaccgaaaccctagctagggttctgcccgccgccgccgccgccttcgatccagacgcggccagccttcccgcaacaccgccatggacacggggcgcaagcggaccgcaccggagggcgccaacggcgcgggcggccccaagcgcgcgagagaatcggagacaactggtgtaggaagcaaatccaagccgtgcaccaaatttttcagcactgcgggttgcccctttggtgcaacccgcagtgctgaaaaattcggtgactcagggtttggtggtcggtcaggtggcggtggaggatttggtgactcaggattcggtggccaatcaggcggcggtggaggattcggcgactcagg

SEQ ID NO: 5167 - DNA, 1360 bp, Zea mays
  misc_feature (33)..(36): n is a, c, g, or t
  misc_feature (313)..(315): n is a, c, g, or t
  misc_feature (317)..(317): n is a, c, g, or t
  misc_feature (324)..(331): n is a, c, g, or t
  misc_feature (339)..(362): n is a, c, g, or t
  misc_feature (368)..(374): n is a, c, g, or t
  misc_feature (378)..(392): n is a, c, g, or t
  misc_feature (396)..(419): n is a, c, g, or t
  misc_feature (425)..(432): n is a, c, g, or t
  misc_feature (438)..(442): n is a, c, g, or t
  misc_feature (445)..(451): n is a, c, g, or t
  misc_feature (457)..(462): n is a, c, g, or t
  misc_feature (470)..(474): n is a, c, g, or t
  misc_feature (481)..(485): n is a, c, g, or t
  misc_feature (493)..(504): n is a, c, g, or t
  misc_feature (512)..(515): n is a, c, g, or t
  misc_feature (518)..(526): n is a, c, g, or t
  misc_feature (535)..(539): n is a, c, g, or t
  misc_feature (543)..(551): n is a, c, g, or t
  misc_feature (559)..(568): n is a, c, g, or t
  misc_feature (570)..(574): n is a, c, g, or t
  misc_feature (582)..(587): n is a, c, g, or t
  misc_feature (601)..(610): n is a, c, g, or t
  misc_feature (618)..(622): n is a, c, g, or t
  misc_feature (626)..(634): n is a, c, g, or t
  misc_feature (637)..(641): n is a, c, g, or t
  misc_feature (649)..(652): n is a, c, g, or t
  misc_feature (658)..(663): n is a, c, g, or t
  misc_feature (670)..(675): n is a, c, g, or t
  misc_feature (679)..(684): n is a, c, g, or t
  misc_feature (915)..(915): n is a, c, g, or t
  misc_feature (935)..(935): n is a, c, g, or t
  Peptide Sequence Number=SeqID_12345
  Probeset Number=SeqID_19570
gttcctaatcgccaccgctgtccccaaccagcnnnnccctagccctcatcgccggcggccatggccgagaccgtcgacgacaagatcagttacttccaggctgtcaccggcatctccgacacggacctctgcacggaaatcctcgccgcgcacaactgggacctgcagctcgcggtgtcctccatcaccgctccctctccctcctcggcagcggcgaccgcctgctagagctgccgccgtcagctgccgaggcggctgacttcgtcgccgagttcgagcgcgagtgcggcgccggccgcggcccacgcttcgnnncngattcannnnnnnnctgttcgnnnnnnnnnnnnnnnnnnnnnnnngatcannnnnnngatnnnnnnnnnnnnnnnctgnnnnnnnnnnnnnnnnnnnnnnnnctgaannnnnnnncgcggnnnnnttnnnnnnntgagannnnnncgttgccnnnnnggcggtnnnnnatcagaannnnnnnnnnnngggttcannnntgnnnnnnnnnagcctgaannnnntcgnnnnnnnnnccgttttnnnnnnnnnngnnnnntggcttcnnnnnnaaccagagaatcgnnnnnnnnnngcagcagnnnnngaannnnnnnnnaannnnncctgaagnnnntgatannnnnnttcttcnnnnnngttnnnnnnaagagctattgctacaggttgaatggcccaaatctaggaaagagatgactgaagatcttcaacgaattgttgaagcgagtgctacgtcacttgttgcgatgcggattacagctgaagagagactaaacaaccagcgattgcgtgaggaacaagatgctgcttacagagctgcacttgaagctgatcaggccagggaacgtgaaaggttagaggaactgaaaagacgtgaangagaggctgcagaggctganaaaaagcgtaaagaagaaggaggaaactgtacccaagggcatccccaaaaaaacacctgaaaaggaaaactggctcttgcaagggggaggcaaaaaaaaggccttggttccttgggagtttaaccttgaaaaagggaccagggggttacccccggtctccccaaaaaaattcccccctggggaaaaccccaaaaaggggggaatttttcaagtttttgggaacggggggttccccccttgggaaaatgggggcctctccccccaaaggggggggaagggggggaaaaacccccccccttttttttttttccccccccctgttttttttggggtcgcaaaaaaaaaaccccccctcccctggggaaaaaaaaatttttttttttttttgcggggggggttttttttttttataaaaaaaaaaaaat

SEQ ID NO: 5168 - DNA, 486 bp, Zea mays
  Peptide Sequence Number=SeqID_12346
  Probeset Number=SeqID_19571
catttgatcatatgacaagatgtgtatccaccttaacttaatgatttttgccaaaatcattaggggattcatcagagcaaagggttacttcagaatttaatttatagatgcatcgcataaacataaacagcttcaatggataacacaataatattgatattaaatacgctatatcacacatacttactttctactagcaaccgtgactaatgggaagaataataatgctaagcaactcaaactatagttaacagtgacataccaaataagtaacaacaacactaaattcttaatcgttcaactataacatatggaagtttctgttttgcagacaacatacagtcacaaatgattcagcttagcaaacctaacatggtgatgtagaagccttgtcatggcaatgatacacatgttgcagtcttccaatgccaaacagtttatgtttcctttcggcaataggcagccttaccagttaccaactacata

SEQ ID NO: 5169 - DNA, 1162 bp, Zea mays
  misc_feature (1094)..(1162): n is a, c, g, or t
  Probeset Number=SeqID_19572
acccatgttcctgttcccacactcgactgtcatcctgtgatatccgctcgccagtcgccactccgtttcggcattccgcctcctcccgacacacctctttaactcgcttccgtttccaaaaaaatgctccagttaatttaatccagacgaggaatcgcctcgccgcggatctctccgctcgccgacaagacccgcgatcggctccagcgtgaagactcgcgttgcggcggggagcgtcgccgccgctcggcacggggctcgtcggttcggcggtcgctttaggctcggtcgaggccagcggtgccggggcaatgcggtcagttcgtggagctgtttgaggcgcttggctgggatctgagggtgccgcgtgccaggtaggggaagcaagcgagctctgtcggtgggggagctggtggtggttgtaagtgtagggcgcgcgtttggctgacagaatggagcacgtagtcgggggcaagttcaagctcgggaagaagatcgggagtggatcatttggggaactttacctcgccgtgaacgtgcagaatggcgaggaggtggctgtcaaactggaatcagtcacatcacgacatccacagcttcactatgaatcaaaactatacatgcttttgcagggtggaactgggattccacatcttaagtggttcggggtggaggggcagtacaatgtcatggtgattgatctgcttggtccaagtctggaggacttatttaactactgcagcagaaagttctcccttaaaacagtactaatgcttgctgatcagatgatcagtagagtagaatacatgcacacaagggggtttctacatcgtgacatcaagcctgataattttctcatgggtttaggacgtaaagcaacccaggtatttgtcatcgactatggccttgcgaagaagtatcgagatctccaaactcataagcacataccatacagggaaaacaaaaatctcacaggaacagcacgatatgccagtgtaaatacccatcttggagttggtgagtttgtggcttgtaaatacagatgtgctactgtatcatcagtatctgagcattaaatgaatctataggacaannnnnnnnnnnnnnnnnnnnnnnnnnnnnnnnnnnnnnnnnnnnnnnnnnnnnnnnnnnnnnnnnnnnn

SEQ ID NO: 5170 - DNA, 449 bp, Zea mays
  misc_feature (275)..(276): n is a, c, g, or t
  misc_feature (285)..(302): n is a, c, g, or t
  misc_feature (304)..(310): n is a, c, g, or t
  misc_feature (316)..(324): n is a, c, g, or t
  misc_feature (327)..(330): n is a, c, g, or t
  misc_feature (338)..(338): n is a, c, g, or t
  misc_feature (340)..(342): n is a, c, g, or t
  misc_feature (347)..(364): n is a, c, g, or t
  misc_feature (371)..(375): n is a, c, g, or t
  misc_feature (379)..(379): n is a, c, g, or t
  misc_feature (387)..(389): n is a, c, g, or t
  misc_feature (405)..(411): n is a, c, g, or t
  misc_feature (419)..(420): n is a, c, g, or t
  misc_feature (431)..(443): n is a, c, g, or t
  misc_feature (446)..(446): n is a, c, g, or t
  misc_feature (448)..(449): n is a, c, g, or t
  Peptide Sequence Number=SeqID_12347
  Probeset Number=SeqID_19573
cccacgcgtccgcccattccatgttgatgaccatgtctcctgaatggggcagctcaccctcccattttggaatatgatcaagaattagataaggagagcttaaatccaggagaacagatttacgagaagttaacgtcaggaatgtatttgggtgaaattgtaaggagggtgctccttaaaatatcattgttttgcgccatttttggtgatactgagcacactaagccacaaacctctgtcctttccacatatttcagcaatgcaccatgacgttnncttctcgtnnnnnnnnnnnnnnnnnnannnnnnnagaaannnnnnnnnttnnnngcacatantnnnaggcnnnnnnnnnnnnnnnnnnaatctgnnnnnttgnggcgacannngcagcccggctggctnnnnnnnggcttgcnnggatcctcatnnnnnnnnnnnnngancnn

SEQ ID NO: 5171 - DNA, 676 bp, Zea mays
  misc_feature (168)..(168): n is a, c, g, or t
  misc_feature (179)..(181): n is a, c, g, or t
  misc_feature (221)..(221): n is a, c, g, or t
  misc_feature (244)..(244): n is a, c, g, or t
  misc_feature (278)..(278): n is a, c, g, or t
  misc_feature (281)..(281): n is a, c, g, or t
  misc_feature (285)..(286): n is a, c, g, or t
  misc_feature (288)..(290): n is a, c, g, or t
  misc_feature (295)..(295): n is a, c, g, or t
  misc_feature (308)..(308): n is a, c, g, or t
  misc_feature (310)..(311): n is a, c, g, or t
  misc_feature (314)..(314): n is a, c, g, or t
  misc_feature (316)..(316): n is a, c, g, or t
  misc_feature (322)..(322): n is a, c, g, or t
  misc_feature (329)..(334): n is a, c, g, or t
  misc_feature (355)..(355): n is a, c, g, or t
  misc_feature (400)..(400): n is a, c, g, or t
  misc_feature (408)..(408): n is a, c, g, or t
  misc_feature (431)..(431): n is a, c, g, or t
  misc_feature (478)..(478): n is a, c, g, or t
  misc_feature (491)..(491): n is a, c, g, or t
  misc_feature (544)..(544): n is a, c, g, or t
  misc_feature (587)..(587): n is a, c, g, or t
  misc_feature (593)..(593): n is a, c, g, or t
  misc_feature (642)..(642): n is a, c, g, or t
  misc_feature (655)..(655): n is a, c, g, or t
  Peptide Sequence Number=SeqID_12348
  Probeset Number=SeqID_19574
gcaaccggaagcgataaggcaacacacgcgcgcgacaggcatatttcgcgttttgactactaccagaagataccgttccagtttcagacgaaccaagtggatgagagtgaggttagggagctgcggcgtaccctgcgacagctgcaaggaggaatgatgcgatggcgnccaccaacccnnngtgggggtgcgcggggtgagcgtggcgaagtcgaagaagntagaggagggtgagtcgcggganccgcgggtgcccgacgaggcaagcgccatggcgnccncccnncnnnccaanttagtagaggccntnncangncccccngtttttnnnnnnccccgatcagaccacggatcnccccccccccagtggccccatagaaccatctttgcttccctgtcncctggcgnccaccggacgggaaggaggaaancaggcttcttcacttccccgtctttggcgaccaccggaggggaagangaagggaggcttnttcactcctcccggcgaccaacggagggaaggaagggaggcttcttcgctccntcgtccccggcgaccaccaatggaaggaggaagggatcaaggnggagtncgagggaggacgcgagccgagaatccggtggttgagcgcgggatctctnttcgcggctgctntcgggacttgtgggaaaggag

SEQ ID NO: 5172 - DNA, 546 bp, Zea mays
  misc_feature (429)..(429): n is a, c, g, or t
  misc_feature (460)..(460): n is a, c, g, or t
  Probeset Number=SeqID_19575
gagtttgggaaggttcaaaggaagcagaggaagaacatgagacgggagagaaggaagacttggaggacaaggaagtagttgttgatacatccgtgccgcaacccttcggcagacgcccacgaataccccagctacaccccttgcaacacgttgatccaagttgggccgtatacgcgtgtattccgcttcctgggcctgcttgagcgcccgggctggtcttcgactgctccttcaccaccaatatctcctgattctccccagctgctaacacacctatcgaagtcttcaatgatcagcgcccagacgcccttatacaatacttcaggatggtactacaactcatgtcaggtatggctgttttgcctccataggagatcctcaaaacttaactgaagctttgaataatacaaagtgggagcttggcatggnatactgagtttgaggcattggttaagaatgnatacttggccatctagtccccgtcagaacaaagtaaaagaaatgtgatagactgcagatgggtatagaaaataaaaaagaaaggca

SEQ ID NO: 5173 - DNA, 768 bp, Zea mays
  misc_feature (1)..(102): n is a, c, g, or t
  misc_feature (764)..(768): n is a, c, g, or t
  Peptide Sequence Number=SeqID_12349
  Probeset Number=SeqID_19576
nnnnnnnnnnnnnnnnnnnnnnnnnnnnnnnnnnnnnnnnnnnnnnnnnnnnnnnnnnnnnnnnnnnnnnnnnnnnnnnnnnnnnnnnnnnnnnnnnnnnnngctccctcctgtttaattttgagggggttcgtccctgagccctctagcccattggacctccactgtgccgacaacggggcttttgcgctgcctttggtgcctgcgacccaccagaagggctaacacgggctccggatgggtctccccggccgggtactcctttggtggggtcagctgaagatatcaaaattacagtatgatgtgcctaattcggggccgtttcctcttcaatatgagtagttttagactatagtttctatagcaaagttggagaacagatatagatggacaaggacaactgtaggtgggcctaattacttgggaggttccgtcacaactttgtatccatgagcatatttctttgtatccatgatatatatattgcttaattgaatatccatgaaaggcaccttgtattgattagcaattatgtgaattgtttgtgagattctttacttgtatggttattctaaatgatgtccctagtcagagtcgatgactagcacatgtattagttgatgactacatttcacaagtcatggacatggatatgttaaactaaaaatgtgggcacatgtatgatatgagtttggaccgacccaacatgagatattgtaatattgttctctttttgcaacatcgtgtaccgcggcccccaccannnnn

SEQ ID NO: 5174 - DNA, 583 bp, Zea mays
  misc_feature (42)..(42): n is a, c, g, or t
  misc_feature (577)..(579): n is a, c, g, or t
  misc_feature (582)..(583): n is a, c, g, or t
  Probeset Number=SeqID_19577
ccatgtggagaagcaatagaacccgccaccattgatgaggtngagagcaacaggtcaacgtaaaaaaaacccgagtagcttaagtgtgaagttataatttatcataccaattaaaatagttttttatctaaataataaataaaaaagacgtatctaaatgtcttctaaagatttaacgctctagtcttatgattttctggagcacttttaatgactttagttgaccaaatttctgaagcaggagctgtacagggccacaaattaaaagcggagtgacgagagtggttgcctgccgggtctgtaccgtactacgtcattagcgctagcataatgcataacacccgtagctagcgtcaatgcagcaacttgctagcccccaacttgcaacagtgagatcgaagcaagatctgcttcttttttgatttcggatcttcttttgcgccttttttaccccccgggtgaagaaacgtttttaccggcagccggcaggagcaaaagtcacacctgccaaaatgtttggtttgacaaactaatcggatggcgttcaagcaaagtcatattgtatcctaaccacgcnnnagnn

SEQ ID NO: 5175 - DNA, 671 bp, Zea mays
  misc_feature (1)..(71): n is a, c, g, or t
  Peptide Sequence Number=SeqID_12350
  Probeset Number=SeqID_19578
nnnnnnnnnnnnnnnnnnnnnnnnnnnnnnnnnnnnnnnnnnnnnnnnnnnnnnnnnnnnnnnnnnnnnnntggccggtcgccgggtccaagtctccgctgtgtgtcgttcttgtagaacgacagacgatgatgactgggtcgttccagattgtgacaagctaggtgtccctaggaaagttcagcggccatgtacccgctgccgacgagatgaactcatcttaatcgaatccgtcatcttaaagatgaccatcgacgatatatatgggcgccgcgcgcacgtcgtcgcggcggctccgccacgcattatcgagccaattacgacgatgctggcgggaccagtttgggcggtacgcgcgcacggacgttcggcgcggcctgcgtccagatacaagcccatgaggtggattccagcgtttctctgtatatatgtaggacggtacgagccctagtaggctagtactacgaactgccctctttcaattagctaatgctatggatgtaaggcttcgcccgaaccaaaaccagttcttctttcgccaaagttgaaaacctgcaatggcgagttcagcttgttgccacaaaaagtaaaaaaaaaactgtttacctccattcagatgttcaaagttgtacatacaggagcaccgatgcaacctttcgcctttgcctagc

SEQ ID NO: 5176 - DNA, 545 bp, Zea mays
  misc_feature (200)..(200): n is a, c, g, or t
  misc_feature (241)..(241): n is a, c, g, or t
  Probeset Number=SeqID_19579
atggagaagcttccttcagtgagtcctccctttccgtttaaggcagcaagcaggagcagacaggaggcgccgagagcccagcgtcggagatctccgccgccatggagacgctggccagcgccatgcggcgcgagaaccgccgggtccaggcccccgccctcctcctctggttcctccgccctcgcctcgggcaggggccntctcgtcatggccttcctctcttggctcgcctggtcttacntcccccggccgtttgtggcaggacgcgaaaacccgggggaatctgggccgcctcctcgagagagctctacaggggtcccgaggggttttccggggggggacaagcttagaaccttgggggcaggggtttggaggaaaaattttgggggggggaagggccctgccaggcaaaagcggggggccccttgggggggaaagaccccgtcctttgggcccccaaaagaaaacacgtcttttgcgcccttttgggtatacacggggggggggggcccccccttcaggggaggtgtcccgcgggccccggt

SEQ ID NO: 5177 - DNA, 545 bp, Zea mays
  misc_feature (305)..(305): n is a, c, g, or t
  misc_feature (346)..(346): n is a, c, g, or t
  Peptide Sequence Number=SeqID_12351
  Probeset Number=SeqID_19580
accggggcccgcgggacacctcccctgaagggggggccccccccccccgtgtatacccaaaagggcgcaaaagacgtgttttcttttgggggcccaaaggacggggtctttcccccccaaggggccccccgcttttgcctggcagggcccttcccccccccaaaatttttcctccaaacccctgcccccaaggttctaagcttgtccccccccggaaaacccctcgggacccctgtagagctctctcgaggaggcggcccagattcccccgggttttcgcgtcctgccacaaacggccgggggangtaagaccaggcgagccaagagaggaaggccatgacgaganggcccctgcccgaggcgagggcggaggaaccagaggaggagggcgggggcctggacccggcggttctcgcgccgcatggcgctggccagcgtctccatggcggcggagatctccgacgctgggctctcggcgcctcctgtctgctcctgcttgctgccttaaacggaaagggaggactcactgaaggaagcttctccat

SEQ ID NO: 5178 - DNA, 1130 bp, Zea mays
  misc_feature (780)..(780): n is a, c, g, or t
  misc_feature (796)..(800): n is a, c, g, or t
  misc_feature (807)..(809): n is a, c, g, or t
  misc_feature (824)..(827): n is a, c, g, or t
  misc_feature (833)..(835): n is a, c, g, or t
  misc_feature (1130)..(1130): n is a, c, g, or t
  Peptide Sequence Number=SeqID_12352
  Probeset Number=SeqID_19581
ccaattgcttctgatcctgtccactccattaccaagaatagcactccatgtatcttggagtagagggaggaggagggagcgcagccagtcatctatggattggtgccccaaacaacaagaccggccgagagggaagagcggaggccggaggggtcagctcttgcacttgtcaggggaggctagtctaggctaggggatctctgattgcctcctatcctctcctagccctgccctgccgcagcgcaacgactccgaaatctgaatcgccgcctccctccgccattcgcgtcagtgacatctattccttcaattcattcagtcaggcgacagcccatgcccttcacacaatcaaaatcgaatgttggttacacaactggaaaaataacgcacaccccgcaacatactaggcacgtctttatctcggatcagtattcgggagtaagaacgacagcgcattgccaggatagaaatcgtcctgatgttcttcgtaagtctggcatttagaccaggctgacaatgtcagcttccgagttcaggattccataccagcaagtttcaccttcgcagcctgctgagaatgtaaatcagtttaagacctgtcgatgtggggagggagacccgaactccacttctgaaactggtgacagtccaccggcctcttgtcctaattgccaggtccttaagagtggacatttactactttcatctaaaggaattggatggacatcatggaaaaagcgctggtttgttcttacgagggcatccctagtgttcttcagnagcgaccctaatgtgnnnnnacccagnnnagctgaaccaattgnnnnacttgnnngaattgacttgaataacactgcaagtatgataatcaaagaagaaaggaaacttataacagtcgtgtttcctgatggccgtgacggacgcactttcacccttaaggcagaaactacagaagacctaaatgagtggagaagtgcattggagaatgctctggctcaggcacccagtgttgtgaatacagcgggacaacttccagtagtcagcactgacataacagaacctgttgaagctgctgttgaacaattgcattcttcgagagatgccatcttctccaattccggcaccatgtn

SEQ ID NO: 5179 - DNA, 856 bp, Zea mays
  misc_feature (1)..(5): n is a, c, g, or t
  misc_feature (8)..(30): n is a, c, g, or t
  misc_feature (33)..(36): n is a, c, g, or t
  misc_feature (39)..(53): n is a, c, g, or t
  misc_feature (55)..(56): n is a, c, g, or t
  misc_feature (58)..(63): n is a, c, g, or t
  misc_feature (856)..(856): n is a, c, g, or t
  Peptide Sequence Number=SeqID_12353
  Probeset Number=SeqID_19582
nnnnngtnnnnnnnnnnnnnnnnnnnnnnntcnnnngannnnnnnnnnnnnnnanntnnnnnnatgctatatgggcatatattactcctccgtcaaatttcatgattttttgagactatttgtgtattattataattttttctatacaaaattatcaaaatgcatttaaattcataaaatattccactatcgaccgaaaattgcaaatatgttaccagaaacaataaacattatataagaacataacctcaaatccccatatggaaatgataaagtgaagtattgattatgttgaaacttagatatttagggcgattccacatgtaactatccgaatatctgaaatctggtaagatatctgggtagatgtccggatatccgaaatatgaaattcggacagttatccgagaagatatccggatatccgaaatccgacggatatcagtcatatcatatccgtatccgatatccgaactgtactatccgaattcgaatccgaaatccgaaaattctgcggatatcctaaaaaaactatccaaccgaataattagccttttcgaacggtcggatggtcggataatatccgtaccgtttacacccctactaatcagtaacgggttgtttagaacaaattacggagacagatcttgaacaattcatgcgtagccaaatatcagaagatatacctgctttgcaaaggaagcagcaacttcacattaacatttgagaagatgggtgtctctggagagcaacaacataataatttaaaaatagtcagatattaatcttgcacctcaaagcggagcaacaagttaggttggctccaacaagagcctctaaagcctcctgtactctn

SEQ ID NO: 5180 - DNA, 367 bp, Zea mays
  misc_feature (305)..(305): n is a, c, g, or t
  Probeset Number=SeqID_19583
gagcacaatgcacaaacatgcgaccgtaaggacgccggtcgccgggcagtcgcgcggggcccggcccccccgcccatgccgcccgcccgcactgcactcatcggcagctacgtccatgccggattctctagtgttcggtgcgacgcacacgcacaggtatgcgcagggtccatcgagctcgcgtcccctcggtgtcgctctcgcttagagggccccacgcccgccttgctgcgcgcgcatgcgcgggccggtctaggcagcgcgggcgaaggcgaccgccacctccgtggtggcgctggaggaangggacgtgcacactcagggtgtaggaaggcgaaactgcgatggagcacgagggcaacaacac

SEQ ID NO: 5181 - DNA, 590 bp, Zea mays
  Peptide Sequence Number=SeqID_12354
  Probeset Number=SeqID_19584
tacaactcagcaaaattacaatcataccctcaagcctatacatataagctataaatttgaacaagggcatcaacgtcttttccttccgtagtcttattgagcaagtcgaggactttggtttgctatcgctgattccttcctcatgtacatgctctgttgaatcgatgcttgctgcttcgaccttgtaaccacgacagccacacatcatcccctaaacgaaggtatccttcggcattttacctcgttgctcttaaaacatactcagaaataattggagttaatattttgaggaccttcgaccaaagaggatacccaacagtagcccctcacggtatttcgaaattcataacgagctcaggtcgtgtaataaacggaggcctcatgccgaaggtccaaaaaacatcttccctaagatcgttaacgaaaacaaattctttaaagtacaacaacaaacaacaacaacaaagcctttttgtcccaagcacgttggggtaggctagagatgaaaccccatatgaaaacctcagagctcaacccccaaagaaaagaaaagggagacaaaggcaaaggagaaccgaaaaacgacgaaa

SEQ ID NO: 5182 - DNA, 1216 bp, Zea mays
  misc_feature (1)..(36): n is a, c, g, or t
  misc_feature (39)..(40): n is a, c, g, or t
  misc_feature (331)..(332): n is a, c, g, or t
  misc_feature (695)..(697): n is a, c, g, or t
  misc_feature (974)..(975): n is a, c, g, or t
  misc_feature (1112)..(1119): n is a, c, g, or t
  misc_feature (1144)..(1144): n is a, c, g, or t
  misc_feature (1204)..(1206): n is a, c, g, or t
  misc_feature (1216)..(1216): n is a, c, g, or t
  Probeset Number=SeqID_19585
nnnnnnnnnnnnnnnnnnnnnnnnnnnnnnnnnnnntgnngataccggtactgcggaatctcattctcatccagcaccgctccaccgctaaacccctctcgtgctcctggacggcactgacgccgagtgcgacgccgagcgaggtcgcgactcgcgagggggaaccctagcagcgatagatctagagcgggcgctttcgatctgtccgggaaatggcggaggatcctgccgcggaacaggagacgcggcagctagaggaccggctcagggatgtcggggaacggctgcaggcgccttccgacgacgcggaggacctgctcaacctcctcanngaagttgaggaatgtttaattaaagtagagcagtcacctcgcgaaagcatatcaaatgctcttcgcccagcaactgaagctctggtcaagaaagagctgctgggccatgctgattcaaatgttagacttgctgtggcatcatgcatatatgagatcacacggatcacggcgcctgatgctccatatgatgatgatgcaatgaaggtatagtttgccctgaataaaaagatttctgctgttctgtacgtacacgtgttgttacttggttttaggatgtattctctttaattgtgggggccttcaagcatctggatgacatagagagccccttctttggaaggagaacttcaattcttgatacannngcaaaagttcggtcctatgtggtgatgctagatcttgaatgtgacgatttgataaatgatatgttccatcacttcttgaggactgttaattctgggcattcagaagccgtcatatgctgcatggaaacaataataatgagattggtaattgaggagagtgaggatgtccaaccacagattgcttcatgtctactccaagatgttagaaaagaagaaaatgtatcatccttaattttttctcacatcagcaacatagatttatttacaactaattaannactcagtgtaggtgttggaacttgctctcagttgcaaggggatccaacaagggtgaatagtggcgttaacagggttctcgcgcaagatggcaatagctctgttaatctggcctctcacgggcactatgcgggagtannnnnnnntatctgagcgcccagcgtcttgtgntaaggacgcatgtgccctcagacacctaggttatccccagaatattcccataaagcatgnnnacagactggn

SEQ ID NO: 5183 - DNA, 1019 bp, Zea mays
  misc_feature (1)..(1): n is a, c, g, or t
  misc_feature (4)..(16): n is a, c, g, or t
  misc_feature (19)..(25): n is a, c, g, or t
  misc_feature (30)..(40): n is a, c, g, or t
  misc_feature (44)..(64): n is a, c, g, or t
  misc_feature (66)..(69): n is a, c, g, or t
  misc_feature (73)..(85): n is a, c, g, or t
  misc_feature (88)..(92): n is a, c, g, or t
  misc_feature (99)..(106): n is a, c, g, or t
  misc_feature (116)..(116): n is a, c, g, or t
  misc_feature (118)..(133): n is a, c, g, or t
  misc_feature (135)..(137): n is a, c, g, or t
  misc_feature (139)..(139): n is a, c, g, or t
  misc_feature (147)..(147): n is a, c, g, or t
  misc_feature (149)..(149): n is a, c, g, or t
  misc_feature (151)..(153): n is a, c, g, or t
  misc_feature (158)..(162): n is a, c, g, or t
  misc_feature (165)..(166): n is a, c, g, or t
  misc_feature (170)..(171): n is a, c, g, or t
  misc_feature (176)..(182): n is a, c, g, or t
  misc_feature (184)..(186): n is a, c, g, or t
  misc_feature (188)..(195): n is a, c, g, or t
  misc_feature (203)..(204): n is a, c, g, or t
  misc_feature (214)..(217): n is a, c, g, or t
  misc_feature (219)..(219): n is a, c, g, or t
  misc_feature (225)..(229): n is a, c, g, or t
  misc_feature (237)..(239): n is a, c, g, or t
  misc_feature (244)..(245): n is a, c, g, or t
  misc_feature (251)..(254): n is a, c, g, or t
  misc_feature (256)..(258): n is a, c, g, or t
  misc_feature (271)..(273): n is a, c, g, or t
  misc_feature (990)..(1019): n is a, c, g, or t
  Peptide Sequence Number=SeqID_12355
  Probeset Number=SeqID_19586
ngtnnnnnnnnnnnnncgnnnnnnnaaagnnnnnnnnnnnatannnnnnnnnnnnnnnnnnnnncnnnnatcnnnnnnnnnnnnnctnnnnnttcgatnnnnnnnnccgcgcgcgngnnnnnnnnnnnnnnnngnnnangaatgcgntntnnnggtgnnnnngcnnggtnngggannnnnnnannnannnnnnnnacctgtcnngcaacacatnnnngnactgtnnnnnactctgcnnngttcnncaactnnnncnnnctatatacaccannnccgatcagactggtgtaagctctgtgatttgtggaactgatcgcaactgatttcctgggcagtgaggacggcgccgagcatcgcgtaggccgcggtggggaggatcgcgcaggggaccaaggtgctggcggagggcggccacgacaggatattccgccagccttcagcgccccgcccgacgagcagctgcgcaagtcctacgcttgctacctctccacggccgccggccggtgatgggcgtcctgtacctgtccacggccagggtcgccttctgcagcgacacccgctgtcctacgaggcttccggcggcgacagaacggagtgtacccactacaaggtgcgattcctctcaacggctgcgggctgcgacccttccgccaacaagacgaagcccgcggagaagttcgtccagctggtgtcggtggacagtcacgagttttggttcatgggcttcgtcaactacgacggcgcggttgcgcacctgcaggaagcgctgagcgggttccgcaacctgcaggcgtgacatggaggacctcaatgcaatggccagtgttatattgtacgtgctcgccagaactgattgatcgaacagagcgattgtgaacccgctctctgtgtgtgttgcggtgctagtgtttgcatcgtgttgtgcgtgtgcggatttgtatgacattttttgatttggttgccattgcagcgagagaccagtccaatcannnnnnnnnnnnnnnnnnnnnnnnnnnnnn

SEQ ID NO: 5184 - DNA, 767 bp, Zea mays
  misc_feature (31)..(34): n is a, c, g, or t
  misc_feature (767)..(767): n is a, c, g, or t
  Peptide Sequence Number=SeqID_12356
  Probeset Number=SeqID_19587
ccggccgggatccgtgcacacatttgttatnnnncgccgttctctctccgtggaaaaatcttgccgccgttcatggaaggagattccgccgcccctgtggatttttttggcgccgttcttatccctggcggcattcatctcttgctcgcgcttatcttcctctctgctctctgccgtgcagaagctcccagccgaagcccatggcgctcggtcgcccggctgcctagcccagcgccgatctcccttcagctccaaccccctctgcgcgcggacctctctcatccccatggcgtcttcccctgctggtttgccggcgcccgagctccctctgcccatcaatggcctcagcccaggagttcgtctgctttccccgctcgtccctccctcaaaatcgcctgaccgcgcgacctccatgtagctcccttcagttcttcccaattcgtggccgcgtccctcagctcgctctcccatgccgcacccagcccctgctctgctcgccgtggagctcgcctccgacccctgcttgccgcgttcctgcgcgctgtcgccttgctgcgtgcgtcgtggttttcttcctctgcgcgccaggctgttccggagcttcctttgctccattccttggttgcgtgacgagcccctcgcgcaggcgcgagctgtctgttcggcgtagtcgagccgttctcagttgctcgctgtaacaccctgaatctggggtataaaatttctttgctcatattcgcaaaaaaaaaaaaaaaaaatttgcggcn

SEQ ID NO: 5185 - DNA, 373 bp, Zea mays
  misc_feature (6)..(18): n is a, c, g, or t
  misc_feature (24)..(32): n is a, c, g, or t
  misc_feature (43)..(43): n is a, c, g, or t
  misc_feature (45)..(45): n is a, c, g, or t
  misc_feature (189)..(190): n is a, c, g, or t
  misc_feature (373)..(373): n is a, c, g, or t
  Probeset Number=SeqID_19588
caatcnnnnnnnnnnnnnactgtnnnnnnnnngtgtgctgctntnctgacagtctgatgctctattttaatactccctccgtttcgttttagttgtcgctggatagtgcaaaattgaaccattcagcgacatctaaaaagaaacggagatgagtatatatgtagcagcagccggagcggcattgccaannctgcgtacctgattgaatgctggtgactgccacccaagccaggccagactgcttcatcggttaccaagaatttgctactgtatgggtatacagaattgcatgcacacacatgtactgggtgctgcttgtgatgcaatgccagttgtggaggatgatttgcttcactttataaaaaaaaaaaan

SEQ ID NO: 5186 - DNA, 629 bp, Zea mays
  misc_feature (1)..(4): n is a, c, g, or t
  misc_feature (10)..(13): n is a, c, g, or t
  misc_feature (23)..(23): n is a, c, g, or t
  misc_feature (25)..(30): n is a, c, g, or t
  misc_feature (32)..(32): n is a, c, g, or t
  misc_feature (36)..(38): n is a, c, g, or t
  misc_feature (42)..(46): n is a, c, g, or t
  misc_feature (569)..(575): n is a, c, g, or t
  misc_feature (600)..(605): n is a, c, g, or t
  misc_feature (608)..(616): n is a, c, g, or t
  misc_feature (618)..(621): n is a, c, g, or t
  misc_feature (623)..(629): n is a, c, g, or t
  Peptide Sequence Number=SeqID_12357
  Probeset Number=SeqID_19589
nnnnggtttnnnnaatttttttntnnnnnntntttnnntttnnnnntttttttttttttttttttttttttttttttttttttttttttttttttttttttttttttttttttttttttttttttttttttttttttttttttttttttttttttttttttttttttttttttttgttgcaaacgacgacggaggagagcacatggcatctccccaggaaataataataatcagagagaggtcacagagctgtatcaggaggcgctcaaattttctgtgtggtctctaaaggtacgtactccctccgtttcgttttagttgtcgctggatagtttcaataattgaactatccagcgacagctaaaaagaaacggagggagtagctaagtagtatggttgcagagtcacgttctgattgctttgattaagctatatggaatctgttgaatcagtttgtgagacaacatcaaatcgcgcagacatcaaatcagtttgtgtttggacgttttggactctgattagcatattgattttgccactgctcgacattagatttgggtgccacattnnnnnnnagttctggctggacaagggcggtgnnnnnntannnnnnnnnannnntnnnnnnn

SEQ ID NO: 5187 - DNA, 1025 bp, Zea mays
  misc_feature (6)..(8): n is a, c, g, or t
  misc_feature (1025)..(1025): n is a, c, g, or t
  Probeset Number=SeqID_19590
tcgtcnnntgtcgtcgtccatccatgcatcgatgacgaccagcctctgttccctgtgcaggacatcttcggcgccggcagcgagacgtcggcgaccacgctggagtgggccatggcggagctgatccggaaccccaaggcgatgcagcgggcgacggccgaggtgcgcgaggccttcggcgcgcgcggcgcggtggccgagcacgagctgggcgagctgcggtacctgcacctcgtgatccgggagacgttccggctgcacccgccgctgccgctgctgctcccgcggcagtcccaggagccgcgccgcgtgctgggctacgacgtgcccgcgggcaccaccgtgctggtgaacgtctgggcgctgggccgcgacggcaggtactggccgggcgaccccgaggagttccggcccgagcggttcgaggccgaggccagcgcggtggagttcaagggcgccgacttcgagctcctgccgttcggcgccggccggaggatgtgcccgggcatggcgttcgggctcgccaacgtcgagctcgcgctcgccagcctgctgttccacttcgactgggaggcgcccggcgtgtctgaccccgccgagttcgacatggccgaggcgtttggcatcaccgcgagacggaaggccgacctgctactccgccccatcctccgcgtgcgcctccctgttcccggtgtctaatcgccgtgtgaattcacgtgatcgacaagctgatctggccgaggatttggccaccggcgagcgccggccgcggacaaggtgtgtcgttgactcgtttccccactatggcctactataagctagtagtttaagaacgataggtccaagccacatctacattatggacctacctgttgaaggctttcaaaggaggacacagcctctaattttatgtctttttatgtagcgatgacaatcttatcgtgaatatgtatacctgcggttacgtatgtaatgggtgtgccggtatcgtaaatatgtgggtacggtgaagctatcaaattttn

SEQ ID NO: 5188 - DNA, 690 bp, Zea mays
  misc_feature (62)..(62): n is a, c, g, or t
  misc_feature (675)..(690): n is a, c, g, or t
  Peptide Sequence Number=SeqID_12358
  Probeset Number=SeqID_19591
acagatgctcaagaatgctggtttcagtcatgtcattgctgaagaccgaactgaccagttcntcagtgttttacagaaggagctagacaaatttgagaagaacaaagatgatttcctgtctgagtttgcccaggaggattatgacgatatcgtgaatggatggaaggcaaaactgcagaggagctctgctggtgagcagaggtgggggctgttcgtcgccaccaagtgatgcgcgtgcgtgtggctttattacaaataacatttggagctctgctggtgagcagaggtgggggctgttcgtcgccaccaagtgatgcgcgtgcgtgtggctttattacaaataaatttgaagctctgctggtgagcagaggtgggctgttcgtcgccaccaagtgatgcgcgtgcgtgtggctttattacaaataaatttgcttctgcaattcaccgatgggattcgcttcataacgtgattttacataactgaactcagagagcctatcctattgcttttgttttgggacaatgagactgatataacttttacggtcctgttaaatatagagtgtgctgtactgatgctcctcatggctgtggctacatggttgacacgtgacatgagatttgttattttcatatttttttagaaaaatattttgcatctcaacttttgaccgnnnnnnnnnnnnnnnn

SEQ ID NO: 5189 - DNA, 269 bp, Zea mays
  Peptide Sequence Number=SeqID_12359
  Probeset Number=SeqID_19592
gggaaaatcaaggataccccggttatcaaagtctcattcataatctagtgctgtgtgttatcaattactatggacttaagtggatatatttgcagagtgtatcgcaattggattatgatattccaagtggtaagctccttcgagtagtataggtttgtacatggggactcctgattatcactggcacgtaccgccaagctcttccaccctgagcagctcatcagtggcaaggaggatgccgctaccaatttcgcccgtggccactacac

SEQ ID NO: 5190 - DNA, 966 bp, Zea mays
  misc_feature (31)..(32): n is a, c, g, or t
  misc_feature (52)..(55): n is a, c, g, or t
  misc_feature (64)..(66): n is a, c, g, or t
  misc_feature (107)..(109): n is a, c, g, or t
  misc_feature (135)..(135): n is a, c, g, or t
  misc_feature (164)..(165): n is a, c, g, or t
  misc_feature (194)..(195): n is a, c, g, or t
  misc_feature (203)..(208): n is a, c, g, or t
  misc_feature (211)..(211): n is a, c, g, or t
  misc_feature (213)..(215): n is a, c, g, or t
  misc_feature (229)..(231): n is a, c, g, or t
  misc_feature (240)..(241): n is a, c, g, or t
  misc_feature (244)..(245): n is a, c, g, or t
  misc_feature (264)..(264): n is a, c, g, or t
  misc_feature (279)..(281): n is a, c, g, or t
  misc_feature (293)..(293): n is a, c, g, or t
  misc_feature (316)..(317): n is a, c, g, or t
  misc_feature (323)..(327): n is a, c, g, or t
  misc_feature (329)..(329): n is a, c, g, or t
  misc_feature (333)..(334): n is a, c, g, or t
  misc_feature (344)..(350): n is a, c, g, or t
  misc_feature (363)..(366): n is a, c, g, or t
  misc_feature (966)..(966): n is a, c, g, or t
  Probeset Number=SeqID_19593
cggacgcgtgggcggacgcgtgggtgagccnncgtttgcggtgcgacagctnnnncaggaccgnnncccgcgcgcgtgccgtacgtgccagggacgacgccgggcgnnngatggagttcacgtcgtcctacttcnacgccttcggcaaccccgacctcgcggcnntggtctccggcgacggcggcagcgcgcanncccaccgnnnnnnccncnnnaccgacggcgcgannncggaggacnncannagccccaccaccacaacgncgaggcgcgcgccgnnnatgttctgcgtncccgacacggaggcggaggagcnnaacggnnnnntngacnngtgcaccctnnnnnnnaaggcgctctgcnnnnacatcttcatgtacagaggggacacgccattctgcagcgacgactgcaggagggagcagatcgagatggaccgcataaggcaccgcaggaagaagcagcacgccctgatagcgcagcagcagcagctgcagcagcagcagcaggcggcggccgcggcgatggcgcagaaggaccagcgtgcccagcgccggcagcttcagccacagcactgccccgggctcccggaagcttcacccacccaaaccggtcccaacgtacccaaggatggcgaatgaattgttgcccgttcgtagtacagacaaggattctcctcgtaaggaaggaccaagtagccaccccgccccttgtttgcgtctgtatccgacgcgaaccaccgaagtgcgcgcggaggcttttccgtgtcctgcaactatattagcaatccaagacttgctcggtttttgtttggctcctgattaaaaacggagccctcttggaggcttggagccactaattgaggtcttttctctatcaatcgagtccttgctccttgtacttttatttaaggttatttaaatgtttgcatgcattttttgtcctcaaaaaattggcaaaagatan

SEQ ID NO: 5191 - DNA, 289 bp, Zea mays
  Peptide Sequence Number=SeqID_12360
  Probeset Number=SeqID_19594
gttcggacttccgccgcgcttcgccctctcgctccagccgcttcacagcgccgccgctcgcctctccgaccgccgcgagaatggtatgtcgattgcgcttggtggtgttagttcgagtaggggttatgagcggagggaaaataataattattgtgttttaacttaaatgatttgcgtttcgtctcttgtactgcgtcgagcgtcgtcttcaattagcgagtgatgtaaaattgtgactgctaatctggactgttaattactggtgattgcagcmaaaaaaaaaaaaaaa

SEQ ID NO: 5192 - DNA, 426 bp, Zea mays
  misc_feature (1)..(2): n is a, c, g, or t
  misc_feature (123)..(123): n is a, c, g, or t
  misc_feature (356)..(356): n is a, c, g, or t
  misc_feature (398)..(398): n is a, c, g, or t
  misc_feature (404)..(404): n is a, c, g, or t
  Probeset Number=SeqID_19595
nncttcctctgcgcttcgcccacacgctccagccgcttcaccgcgccgccaccgccaccggcgaggatgcccgttcaagagggttccgtggagatcgggcgcgtggccctggtgaactacggngagggactatggcccgtctcgtcgtcattcggtaagatgtggtcggaccagaacagggcaacttgtggatgcccctggaatatggtcagggtgccaggtgaacttcaagcggctctcacttactgacatcaagattgacatcaaacgtgtccccaagaagacaaccctgatcaaggcgatgggagggaagcttgatgtgaagaccaagtgggagaacagctcatggggcaagnaaagctgatttgtccagaagaggagagcatcgctcaatgacntttganaaggttcaaaagtcatgcttgc

SEQ ID NO: 5193 - DNA, 673 bp, Zea mays
  Peptide Sequence Number=SeqID_12361
  Probeset Number=SeqID_19596
aaaaaaaaaaaaaaaaaaaaaaaatttttgactggagcacaaactccccatctccgccactactgaagcccttgtacccctaaccgacgccgctgctgctagggagcttccacccgcgcgcctacaacgagagctagcagcagtagcggtcgttatcttgtcgctcctgctccgtttgtttacccaagtcccagcctagatgccgcagatggatgtgcccactaatcagatccccgcaggctggttcactgagccggcttccgagcggcccatgggcttgcccaggaccggctcttcagtcgcctcaacgcgcaggcgcccgagttcgtgccgggggggcccgcccccaccgacgcccgggggttgtgctttccccccccccccaaagggatccgaatgtttccccaccccccctccccggccgcgtgggggcttcttctcccgggcccaaacccgggcggttgagtactatggccaattgggggaacgcagcggattttgccaaagcaaaaagcgctcccccaaatttaaaaaaaaaatcccccccccccccggaaaaaaaaaaccccgggggttgggcccccaaaaaaggggggcccaaaataccccgcgggggaaaaatttttttgggccaccccctttcaacaaaaaattggggggtttttcccccggt

SEQ ID NO: 5194 - DNA, 673 bp, Zea mays
  Peptide Sequence Number=SeqID_12362
  Probeset Number=SeqID_19597
accgggggaaaaaccccccaattttttgttgaaagggggtggcccaaaaaaatttttcccccgcggggtattttgggccccccttttttgggggcccaacccccggggttttttttttccgggggggggggggattttttttttaaatttgggggagcgctttttgctttggcaaaatccgctgcgttcccccaattggccatagtactcaaccgcccgggtttgggcccgggagaagaagcccccacgcggccggggagggggggtggggaaacattcggatccctttggggggggggggaaagcacaacccccgggcgtcggtgggggcgggcccccccggcacgaactcgggcgcctgcgcgttgaggcgactgaagagccggtcctgggcaagcccatgggccgctcggaagccggctcagtgaaccagcctgcggggatctgattagtgggcacatccatctgcggcatctaggctgggacttgggtaaacaaacggagcaggagcgacaagataacgaccgctactgctgctagctctcgttgtaggcgcgcgggtggaagctccctagcagcagcggcgtcggttaggggtacaagggcttcagtagtggcggagatggggagtttgtgctccagtcaaaaatttttttttttttttttttttttt

SEQ ID NO: 5195 - DNA, 478 bp, Zea mays
  misc_feature (31)..(31): n is a, c, g, or t
  misc_feature (83)..(83): n is a, c, g, or t
  misc_feature (85)..(85): n is a, c, g, or t
  misc_feature (175)..(175): n is a, c, g, or t
  misc_feature (448)..(448): n is a, c, g, or t
  Probeset Number=SeqID_19598
actttcctttctcgctcctgtttcttctagncccccgccgaccgcgtcccaggcccgcccgccctgtcggtgccccgcgaccncncccacccaccgtccccgcaccgccggcgcccccgcccgccaggtgagggttcagcgtggaggtgaggtagtggcagtagcgagcaacgcnccgggtgggcacgtcaacccggcgttcacgttcggcttgttcgtgggccgccgcatctccttcgggcgtgccgcggtatactggcttgtgcagatgctcggcgcggtggtcgcgtcgttcctgctaacgctcgtctccggcggcacggtatataatgtttgctaacgtcatcgactcgagctgtgagggttcagcgtggaggttcgtcgaggtctgctgctcgtagctcccgtcactctactcaagatctagcagaagtggagcaactgtganaagaacttaggcgacatcaggattacttga

SEQ ID NO: 5196 - DNA, 342 bp, Zea mays
  Peptide Sequence Number=SeqID_12363
  Probeset Number=SeqID_19599
cgttgctgtcgccgttgctgtcgtttatttttaaagaatttttgaccctatttccctttcatgtttagaatgagtaagcatgtatttgaaagccttcatgatgtgctcacatcaacatgtcatatgagctccatagaagctttagccatgtttttgtggatcattggtgctcctcagtcaattagacaactgacaatcgttttgagaggtcaaaagacacaactagtagagaatttgaggaagtgttacattgtgtttataagatgtctgatgatatcattaaaccaaaagatccaaaattttctattgtatacctaagagtacaagcccccgacagcaacg

SEQ ID NO: 5197 - DNA, 2418 bp, Zea mays
  misc_feature (2205)..(2229): n is a, c, g, or t
  misc_feature (2234)..(2236): n is a, c, g, or t
  misc_feature (2298)..(2302): n is a, c, g, or t
  misc_feature (2304)..(2418): n is a, c, g, or t
  Peptide Sequence Number=SeqID_12364
  Probeset Number=SeqID_19600
atccgtcgctcgggcgggggcctcggcgcggtcgtgctttacgtcgctcccttccctatctactccgtttctatttcgaggcggctcggcttcgtcgtcaccggtcgattgggtccggggctttgcgcgtccgtgttcttggacatttctttgggccgactctccttcgcgatttcgaggcaggtcggcttcttttttaccgcttgatttgttcctctgcgttgcatttctgtgctctttctaatcccttcggcgcttctctcctgcgcgcgactccggaagggaggggttgtaggtttgtccgggctgtccggttttcggtttactctatgggcgattgtggttagggggtggagcctgttcagtcctcggcctctcaccgtgtgtgtttcgggattgagagattaattgaggagtgtaggtttgttgatgggtcgtttggcggattggttggagccacgtcattcttctggcagatccggtatttgagtggatttttcccctggacttttattctgaggttgtagattcatcattcgacatgctggtggctggatctgcaggggcaacaaagttttggaagtagattgaggcgttgactggactgatgttcatagtatcgggagaagatcggttgaatatacttatgtccctaaatcggtcagctgttagttcagacttattttttgtcctctgtaattcttaagtgcataaattttggcgggtggttttcttcatcaactttattgaatgggtgtatgggtttgatgcgactttgatcgcgcttagacttgcgcaatcatgaatacggaactgtttactctttcttgagtttgtttgccaaccttcctctctcctgtcttccttcaaaaattggcattataggcttgattacccttcattggaaattctgcttgctggatctgcaggggcagaagagtcttggaactagattgaggggttaactggactgttgttcatagtatcgggagaagatcgttcggatatatctacctaaatcgctcttctactattggttcatatttaatttctgtccgctgcaatttttagttaattatattggggctgatggttttctccagcaacaagattattatatggatggatggatggatggtgttcaagcgccttgcctgtcctgtcttgccctttgtcccttcgtcgcctcgggcctcggcgtgctcgcattttccattacttcgtttcgattttgagccgggtatcatcttcacctgttgttttgttccgctgctttgcgcctccgtgctcccgcagatccctttgggccgtttcgcctccgcgcgacgctgggagcgagctgagtatggtttggctgggttgttcagtttgcggtgtattcttcctgcaattctagttttcgtgttgattcggtatcgtcctcgacttctcagcgtgtgggttgcaggattgggcccgatcggtgttgtgagagttcgtcatgatggcgtgtggcgaggagatacaggcaggtcagtcttctgtcagatccgacgttaattggttttgttgattggacatggattgatgatttctcaggctcaaatgtatccgggtgtggtaccatcagaacctctcgtagcctgcacaccaactggattcggcccgttcttattttaattgctgatctcgcttgtgtcctttttggtgttagtcgtcctgacttcagaagcagaagaaagggtccagcgctggttacggagatattagttgaagggttgaggttttcttatggttcattcattgtttttcgtttgatgtcgtcatattggtgtgaagatcgcaaccggacttactataagcttgtttgcacttcattggaaatgctgctggctggatctgcgggggcaacagagttttggaagttgattgaggtgttgactggaccggtgtatcaggaaaagatcgttgggatatacataccaaaattgcttttgtattggttcgtcttcagtttctgtgcgctgcaattctttgtttcttatattggggccggtggttttctccagcaagattatatggatggatggggttggaggcgtgtttgatctggcttgtgcttgtgcaatcagaagttaggaactgttcagagttccttgtttgttcactaaaaaaaaaaaaaaaaagggcggccgggtgcgatctattgtcaatcttctttgaaannnnnnnnnnnnnnnnnnnnnnnnntttgnnngtaaatctgcgcacttttaggagactcggagttcgtcctagatgcaaaagtacctggctggnnnnngnnnnnnnnnnnnnnnnnnnnnnnnnnnnnnnnnnnnnnnnnnnnnnnnnnnnnnnnnnnnnnnnnnnnnnnnnnnnnnnnnnnnnnnnnnnnnnnnnnnnnnnnnnnnnnnnnnn

SEQ ID NO: 5198 - DNA, 509 bp, Zea mays
  Probeset Number=SeqID_19601
accctacctgatttgctcgtgccctcgctcggcatcacacagattcccgcgtcccgccgtcggcgactcggcgtcctgctgattgcgtcgcgaggagtgctcgtagccgccctcctctctcagattcagtcgtcgcccatggcgaggaatccaggccgcaccgtcttcatcggcaacttggatgaaaaagtatctgaaagagtcttgtatgagattcttattcaggcaggccatgtagtaggcctacatgtacctagtaataaggagagtaacagtcacaaaggttatgcttttgctgagtatgaaaccgaggatatcgcgcaatacgctgttaggcttttctcgggacttgttcggatcaatggtaaaacgctcaagttcgtggtaggttttcatttctatctaggtacattagttgtgtataatattctgtctacaagcattacttgtgtatacaccacttgtctataatagcaggaccacttctctaaaaaaaaaaaaaaaaaacg

SEQ ID NO: 5199 - DNA, 346 bp, Zea mays
  misc_feature (66)..(66): n is a, c, g, or t
  Peptide Sequence Number=SeqID_12365
  Probeset Number=SeqID_19602
tcataatagtaagacactgcatcctcttagggacgactttggagtctcttcaccttttacttaggnggcatttaagctctgcatcccgtaggaacaactttaagcttcttcaccttttacttaggtgatattttagctctgtgtccctataggaacgactttggagctaagccctgcatccccttaggaaagactttgggagatttttcaccttttacttaggggggtattttagaactgcgtccccgtaggaatgactttgggagctttttcaccattactgttacactcaaaaccatcaactaaaggtaatgtatttagattattagtggtaaatatagtaatg

SEQ ID NO: 5200 - DNA, 346 bp, Zea mays
  misc_feature (281)..(281): n is a, c, g, or t
  Probeset Number=SeqID_19603
cattactatatttaccactaataatctaaatacattacctttagttgatggttttgagtgtaacagtaatggtgaaaaagctcccaaagtcattcctacggggacgcagttctaaaatacccccctaagtaaaaggtgaaaaatctcccaaagtctttcctaaggggatgcagggcttagctccaaagtcgttcctatagggacacagagctaaaatatcacctaagtaaaaggtgaagaagcttaaagttgttcctacgggatgcagagcttaaatgccncctaagtaaaaggtgaagagactccaaagtcgtccctaagaggatgcagtgtcttactattatga

SEQ ID NO: 5201 - DNA, 744 bp, Zea mays
  misc_feature (1)..(134): n is a, c, g, or t
  misc_feature (540)..(540): n is a, c, g, or t
  Peptide Sequence Number=SeqID_12366
  Probeset Number=SeqID_19604
nnnnnnnnnnnnnnnnnnnnnnnnnnnnnnnnnnnnnnnnnnnnnnnnnnnnnnnnnnnnnnnnnnnnnnnnnnnnnnnnnnnnnnnnnnnnnnnnnnnnnnnnnnnnnnnnnnnnnnnnnnnnnnnnnnnnnntttatattaaataccttatttattcgagaatgtctccaatatgcaacatatacacacattgttggtagtcaaattaaaagtatattcaaaagttcatattcatctattttgatagaaaagatttatctaatgcataatcttttattaatagattgtttaactaattctacatagtttactacagcagtcattcatattgggccttttatttaaccacttgtttcaaaacataactatttttactttagaatgtttttttcctaaattacccaaaataatattttagggtgttacagattggtcactttattgctaactgtcccgataatgatagtgaccaggaacaaggaaagaatgggaagagagagaacaagaaggtttacaagaaggctaagggcgaggcacnccttggaaaagaatgggactcgaattgttcttcgtccgactccgacgacgaaggactcgccgccacggccttcaacaaatcgtctctcttccccaacgagcgtcacacctgcctcatggcaaaggagaagaaggtaagtacttgaagtactattacgtatgcttcttcaagtgatgatgagtctagtgatgatgaagtagacta

SEQ ID NO: 5202 - DNA, 621 bp, Zea mays
  misc_feature (71)..(71): n is a, c, g, or t
  misc_feature (498)..(498): n is a, c, g, or t
  misc_feature (601)..(621): n is a, c, g, or t
  Peptide Sequence Number=SeqID_12367
  Probeset Number=SeqID_19605
gtcaccaattaatgaggataaaagagggatctattggagtagagattttaagccaactctcctaatatggnggttggattagggataggggagctcttagagatgctcgtagcccctctaacctaccaaacgggccttaacttttttttatattcaaatcttcattgaaaacaatggttctcacttctcaatacattttttgtatctcctttttgtaatgtatattttccttatccaactcatctctatttctatatcttgaagagtatctttttcttcttcttctttttaggtcttttggcctctatatcgatatcttgtgaaaagagcctaactcatggataattgtgggacccatagaccatggtgtaaactgaacaccagaaattgatttaagtacacgtaaatgacattttatatgtaattgcaaatttattgttggcaaacgaacgacagattatttgttagagttaaccaacatgaattaatatatatacnataatcatggataattgatttcctaattaatatacgttcgcaaaattgtccaagtgtcatttttgcattagttaattacgtcatggtcaattatatgcaatannnnnnnnnnnnnnnnnnnnn

SEQ ID NO: 5203 - DNA, 621 bp, Zea mays
  misc_feature (124)..(124): n is a, c, g, or t
  misc_feature (551)..(551): n is a, c, g, or t
  misc_feature (601)..(621): n is a, c, g, or t
  Probeset Number=SeqID_19606
taccaaatccataaagtaccatattgcatataattgaccatgacgtaattaactaatgcaaaaatgacacttggacaattttgcgaacgtatattaattaggaaatcaattatccatgattatngtatatatattaattcatgttggttaactctaacaaataatctgtcgttcgtttgccaacaataaatttgcaattacatataaaatgtcatttacgtgtacttaaatcaatttctggtgttcagtttacaccatggtctatgggtcccacaattatccatgagttaggctcttttcacaagatatcgatatagaggccaaaagacctaaaaagaagaagaagaaaaagatactcttcaagatatagaaatagagatgagttggataaggaaaatatacattacaaaaaggagatacaaaaaatgtattgagaagtgagaaccattgttttcaatgaagatttgaatataaaaaaaagttaaggcccgtttggtaggttagaggggctacgagcatctctaagagctcccctatccctaatccaaccnccatattaggagagttggcttaaaatctctactccaatagatccctcttnnnnnnnnnnnnnnnnnnnnn

SEQ ID NO: 5204 - DNA, 1026 bp, Zea mays
  misc_feature (1)..(41): n is a, c, g, or t
  misc_feature (1002)..(1026): n is a, c, g, or t
  Peptide Sequence Number=SeqID_12368
  Probeset Number=SeqID_19607
nnnnnnnnnnnnnnnnnnnnnnnnnnnnnnnnnnnnnnnnnttaactgcagcagtcatatacaaactcggcgatgtcaagttgcggggttctcgctctgaaatcggtgagcggtgcagtggtacagcagcggatgatggagaggaaccggacccaagtacactaaccccatctattccactgacagtcagacaaaactgctcccttgctgttgatttggattcccgtgcaaagacgttctttgcaaccgcgctgcctctctggggccgtcggttcgtgtgcgacccctaccgtgggccccgtggtgcccccacgccgccctgctgggcccgcggcaccagcccgtgctcgtctgccccggcggccccgccggccgggccgacccctgcccgcctggccgtcctcctgggcccccccggcggcccctatcggcgctcgcctggcgggcctgtccccgtcgcgccgtcagcccccgcccgggggtgcgtggggcgccgccatcgcgcccctccggccggtcgagtctgcgaggttctcctctgcgaggaggaccagatggctgatgtgatgaacaagaacaacaggctggtacgtaatagacgtccgtgatgcggccgaatgctctacttctactgtacgagaagaaagtgtcatctgggagatagatacatctgctcgccgaatcacgtttgcacagaggacttggtggcctgttcctggttgaagaagatgtacacaaagtgcagctgcataaataacgtggatcgttaacatatgtcagaagctgatggatctggctgggaaccaaggaaactggaggagacgctcttggacacagcgttgagcggtctgaaaaaaaggcatgccttctccaggctgtggccgggcgtccctgcctgccgccttccccatctcttccgtcgatctgtcatgtgaccagtgacgatataggagattgatcagttgtaatcatggtgaaaatttgattgtagtattggttccnnnnnnnnnnnnnnnnnnnnnnnnn

SEQ ID NO: 5205 - DNA, 1026 bp, Zea mays
  misc_feature (1)..(25): n is a, c, g, or t
  misc_feature (986)..(1026): n is a, c, g, or t
  Peptide Sequence Number=SeqID_12369
  Probeset Number=SeqID_19608
nnnnnnnnnnnnnnnnnnnnnnnnnggaaccaatactacaatcaaattttcaccatgattacaactgatcaatctcctatatcgtcactggtcacatgacagatcgacggaagagatggggaaggcggcaggcagggacgcccggccacagcctggagaaggcatgcctttttttcagaccgctcaacgctgtgtccaagagcgtctcctccagtttccttggttcccagccagatccatcagcttctgacatatgttaacgatccacgttatttatgcagctgcactttgtgtacatcttcttcaaccaggaacaggccaccaagtcctctgtgcaaacgtgattcggcgagcagatgtatctatctcccagatgacactttcttctcgtacagtagaagtagagcattcggccgcatcacggacgtctattacgtaccagcctgttgttcttgttcatcacatcagccatctggtcctcctcgcagaggagaacctcgcagactcgaccggccggaggggcgcgatggcggcgccccacgcacccccgggcgggggctgacggcgcgacggggacaggcccgccaggcgagcgccgataggggccgccgggggggcccaggaggacggccaggcgggcaggggtcggcccggccggcggggccgccggggcagacgagcacgggctggtgccgcgggcccagcagggcggcgtgggggcaccacggggcccacggtaggggtcgcacacgaaccgacggccccagagaggcagcgcggttgcaaagaacgtctttgcacgggaatccaaatcaacagcaagggagcagttttgtctgactgtcagtggaatagatggggttagtgtacttgggtccggttcctctccatcatccgctgctgtaccactgcaccgctcaccgatttcagagcgagaaccccgcaacttgacatcgccgagtttgtatatgactgctgcagttaannnnnnnnnnnnnnnnnnnnnnnnnnnnnnnnnnnnnnnnn

SEQ ID NO: 5206 - DNA, 527 bp, Zea mays
  Peptide Sequence Number=SeqID_12370
  Probeset Number=SeqID_19609
gaagctaggagaaattcctcgtgggcgccccattgatgacaagttgttggcgtcgcgagcatatcgccgtgctagggggctgtgccagcgctgcgctgaaaagtggtcccgggatcacaaatgcccagccactgtaccgctcaatgcaatattgcaggtgtgggatttaattcgagacgaggatcaggaagtgactgaggagacgcatccagttgatactgaacagttattcttagctatctcaaaggaagctagtctaggaatcgaagctccatggcagtgcgttttgtggtgaagttcagaacaaaccactactaatcctggttgattcgggcagttcacattcctttattagtggaagattggtgtcggaaattggatggtctctctggaattctagccccggtgcatgtcaaagtggccaattgcgaggttttgtcatgctcgttacagttgttacatgattcatggttaatcaaagggtattcgtttatctcccaaaaaaaaaaaaaaaaaaaaaaaaaaaa

SEQ ID NO: 5207 - DNA, 527 bp, Zea mays
  Peptide Sequence Number=SeqID_12371
  Probeset Number=SeqID_19610
ttttttttttttttttttttttttttttgggagataaacgaataccctttgattaaccatgaatcatgtaacaactgtaacgagcatgacaaaacctcgcaattggccactttgacatgcaccggggctagaattccagagagaccatccaatttccgacaccaatcttccactaataaaggaatgtgaactgcccgaatcaaccaggattagtagtggtttgttctgaacttcaccacaaaacgcactgccatggagcttcgattcctagactagcttcctttgagatagctaagaataactgttcagtatcaactggatgcgtctcctcagtcacttcctgatcctcgtctcgaattaaatcccacacctgcaatattgcattgagcggtacagtggctgggcatttgtgatcccgggaccacttttcagcgcagcgctggcacagccccctagcacggcgatatgctcgcgacgccaacaacttgtcatcaatggggcgcccacgaggaatttctcctagcttc

SEQ ID NO: 5208 - DNA, 572 bp, Zea mays
  Peptide Sequence Number=SeqID_12372
  Probeset Number=SeqID_19611
ggaagaaggacgctgcaaggtacacggtggcaccgaacggggtggcgcgcatcggcaaggcaggagatgccatggtgccgtgccacctgatggcctatccgtacatggtccactactgccaccggtcggtggacgtggaagctctccgcgttgagctgatggggctcggagacgaccacgcggcggcggccagccacgcaatcgcgatagcgatgtgccacgccaacacgacgagctgggatgcccgctacttccaaatgttgaatgcgacgcggggggaggagatctgccacttcatgccgcacaactacgtgttgtggctgcctgctgccgctctgtagagccacaggcactaggagtgcagcatgctgagagacaagaagattgagtactactagtagtagcttgctttgcttgtcaggaacaagctaggttgtccatgcatgtcttacgtctctgacgatcatcgagcggacaatcaaataataaataaataaattgttgagtcttgcaaaaaaaaaaaaaaaaaaaaaaaaaaaaaataaaaaaaaaaaaaaaaaaaaaaaaaaaaa

SEQ ID NO: 5209 - DNA, 572 bp, Zea mays
  Peptide Sequence Number=SeqID_12373
  Probeset Number=SeqID_19612
tttttttttttttttttttttttttttttattttttttttttttttttttttttttttttgcaagactcaacaatttatttatttattatttgattgtccgctcgatgatcgtcagagacgtaagacatgcatggacaacctagcttgttcctgacaagcaaagcaagctactactagtagtactcaatcttcttgtctctcagcatgctgcactcctagtgcctgtggctctacagagcggcagcaggcagccacaacacgtagttgtgcggcatgaagtggcagatctcctccccccgcgtcgcattcaacatttggaagtagcgggcatcccagctcgtcgtgttggcgtggcacatcgctatcgcgattgcgtggctggccgccgccgcgtggtcgtctccgagccccatcagctcaacgcggagagcttccacgtccaccgaccggtggcagtagtggaccatgtacggataggccatcaggtggcacggcaccatggcatctcctgccttgccgatgcgcgccaccccgttcggtgccaccgtgtaccttgcagcgtccttcttcc

SEQ ID NO: 5210 - DNA, 1009 bp, Zea mays
  misc_feature (1)..(46): n is a, c, g, or t
  misc_feature (48)..(54): n is a, c, g, or t
  misc_feature (61)..(75): n is a, c, g, or t
  misc_feature (77)..(77): n is a, c, g, or t
  misc_feature (79)..(87): n is a, c, g, or t
  misc_feature (89)..(90): n is a, c, g, or t
  misc_feature (92)..(103): n is a, c, g, or t
  misc_feature (106)..(106): n is a, c, g, or t
  misc_feature (129)..(129): n is a, c, g, or t
  misc_feature (131)..(131): n is a, c, g, or t
  misc_feature (138)..(138): n is a, c, g, or t
  misc_feature (220)..(222): n is a, c, g, or t
  misc_feature (1007)..(1009): n is a, c, g, or t
  Peptide Sequence Number=SeqID_12374
  Probeset Number=SeqID_19613
nnnnnnnnnnnnnnnnnnnnnnnnnnnnnnnnnnnnnnnnnnnnnnannnnnnntgtgcgnnnnnnnnnnnnnnngnannnnnnnnngnnannnnnnnnnnnnaantggatacgagacagcacttaggncnacataanctaatatcaatgtcctgtcactgtttaccgttcccgtgggcagacgccgtctggcatactcttctcgtctccgtcgcttctnnntcgccggcgacgaggaggcccgtgcggagcgcatgagatacgcctccatcttgcgaccccacggcgcaggagcgcacgccggcgagatacccgactcgccggtgtacagcgtgtcgcccttggcggcgagcgagtagatgtggccttcctccatcaccagcgagctgatgaggctcgtctccggcgccatcgtgggcgggccgtcaaatccccttctctcttcttccataatgacaattatctcgagcgcagcagggagatctagccaggcgccatgggagaagacacgagcagggacagcgcgggcgcgtccacggctgctccagactcccacgaagcgggacttcagcgcggccagaaagatggggacgagctgcgggggagctcgcagcggatccaacgccgggagctcgcctgggaagaaggccgtcgagccggggccggaaccaggggtgcggtggagaagaagctcagggcgcggcgccagcagggaagaagtgcgcgacgcgcaggggaagaagctggagcagcgcgcggctgtgagggagatggaggctggagaagatgacctcgagctctagaagaagcgagcagggacacgttgcgcaggaaaaaatctcaccaaggggcggcggctcggccacagttgatctttactgccttgaacacaccgataaggttacccatgacttcccagcgcaatcttcccccagacacctcactcaccacccagcgcccaggcttcgtgcgggtgcggggtgcccgggaacacaacctgcgcaacnnn

SEQ ID NO: 5211 - DNA, 573 bp, Zea mays
  misc_feature (9)..(10): n is a, c, g, or t
  misc_feature (28)..(28): n is a, c, g, or t
  misc_feature (38)..(38): n is a, c, g, or t
  misc_feature (64)..(64): n is a, c, g, or t
  misc_feature (351)..(351): n is a, c, g, or t
  misc_feature (374)..(374): n is a, c, g, or t
  misc_feature (390)..(390): n is a, c, g, or t
  misc_feature (458)..(458): n is a, c, g, or t
  misc_feature (502)..(502): n is a, c, g, or t
  misc_feature (528)..(528): n is a, c, g, or t
  misc_feature (546)..(546): n is a, c, g, or t
  misc_feature (548)..(548): n is a, c, g, or t
  misc_feature (556)..(556): n is a, c, g, or t
  misc_feature (573)..(573): n is a, c, g, or t
  Peptide Sequence Number=SeqID_12375
  Probeset Number=SeqID_19614
ccccctgcnnggagagagagagaaaganagctcactantccccccccccccccccggcccaggncaaggtgcgccccattgcgaggggtttgctacctctcgggattcagggtattttatagatgacgaaggcagcaactatttatgggagcaagacacagagcgatgccttgcggccagggccattgcgtccagcaaatattatcaagaaaataaatttcccacataccagaatgggttcaaatgggtatagtaatccagctgggctgatgggtcccgaaatacccccctctcaagggagataattgcaaaggaggactggcagatcttacttgggatcggtcggtcagncgtcttccttctggtccgggganttttgcggatggaagntttggagaaaagggtctccaacactggcccccattggttggtcccaatggaaggttaaatgggagaanaagtaaacttttgatgggggccgggggatatccccttttggganaaaatcctaaaagaggggggatttanaggccccctggaaaaagngnccccgggngaccagggccaaaactn

SEQ ID NO: 5212 - DNA, 833 bp, Zea mays
  misc_feature (1)..(117): n is a, c, g, or t
  misc_feature (718)..(833): n is a, c, g, or t
  Probeset Number=SeqID_19615
nnnnnnnnnnnnnnnnnnnnnnnnnnnnnnnnnnnnnnnnnnnnnnnnnnnnnnnnnnnnnnnnnnnnnnnnnnnnnnnnnnnnnnnnnnnnnnnnnnnnnnnnnnnnnnnnnnnnncctcatggtattatattaataagagaccgaaacattggtctcgaccgagaaaatctctgaaccctggcctcccatcactaatgggctgacgtcaaccgtccactctgcaacagcccaaccagagggtggtacacatgacatcgtaacccgagagcggatgaggcacaacgagggatttttttaactaagccagaaaattcgccctcgagaggaatacacccgggtcttggaggtgctactcagaagccttaaccactaggctagagaccctttcactgaaggccaactgaacacaacagtgaaaatcagaaatgacgggcaaaggagcagttgactagcgagtgatttattgtttccggtgcctgatcacaaaggggacagcgagtaggatgaggaaagcttctcttctcgtggcaaaggagcacctaaccagcaaccgaacctctcaattcagtggtgcctcataatggtcatctatttcagcaacttgtcttgatgcttggttagttggttttatatagtatattggtccaggtatatacagtaatatatgggtgaccgggaccgactatggtcgatgaataatccgtgactagccatnnnnnnnnnnnnnnnnnnnnnnnnnnnnnnnnnnnnnnnnnnnnnnnnnnnnnnnnnnnnnnnnnnnnnnnnnnnnnnnnnnnnnnnnnnnnnnnnnnnnnnnnnnnnnnnnnnnn

SEQ ID NO: 5213 - DNA, 775 bp, Zea mays
  misc_feature (1)..(166): n is a, c, g, or t
  misc_feature (173)..(173): n is a, c, g, or t
  misc_feature (175)..(175): n is a, c, g, or t
  misc_feature (177)..(178): n is a, c, g, or t
  misc_feature (185)..(185): n is a, c, g, or t
  misc_feature (188)..(188): n is a, c, g, or t
  misc_feature (195)..(195): n is a, c, g, or t
  misc_feature (198)..(199): n is a, c, g, or t
  misc_feature (206)..(207): n is a, c, g, or t
  misc_feature (210)..(210): n is a, c, g, or t
  misc_feature (216)..(217): n is a, c, g, or t
  misc_feature (224)..(224): n is a, c, g, or t
  misc_feature (233)..(234): n is a, c, g, or t
  misc_feature (243)..(244): n is a, c, g, or t
  misc_feature (247)..(247): n is a, c, g, or t
  misc_feature (255)..(258): n is a, c, g, or t
  misc_feature (260)..(262): n is a, c, g, or t
  misc_feature (267)..(267): n is a, c, g, or t
  misc_feature (294)..(294): n is a, c, g, or t
  misc_feature (313)..(313): n is a, c, g, or t
  misc_feature (315)..(315): n is a, c, g, or t
  misc_feature (317)..(318): n is a, c, g, or t
  misc_feature (325)..(325): n is a, c, g, or t
  misc_feature (347)..(347): n is a, c, g, or t
  misc_feature (358)..(359): n is a, c, g, or t
  misc_feature (367)..(367): n is a, c, g, or t
  misc_feature (371)..(371): n is a, c, g, or t
  misc_feature (380)..(381): n is a, c, g, or t
  misc_feature (385)..(385): n is a, c, g, or t
  misc_feature (392)..(392): n is a, c, g, or t
  misc_feature (400)..(400): n is a, c, g, or t
  misc_feature (410)..(410): n is a, c, g, or t
  misc_feature (412)..(412): n is a, c, g, or t
  misc_feature (426)..(426): n is a, c, g, or t
  misc_feature (457)..(457): n is a, c, g, or t
  misc_feature (465)..(466): n is a, c, g, or t
  misc_feature (474)..(475): n is a, c, g, or t
  misc_feature (494)..(495): n is a, c, g, or t
  misc_feature (503)..(503): n is a, c, g, or t
  misc_feature (506)..(506): n is a, c, g, or t
  misc_feature (511)..(511): n is a, c, g, or t
  misc_feature (513)..(513): n is a, c, g, or t
  misc_feature (517)..(517): n is a, c, g, or t
  misc_feature (522)..(522): n is a, c, g, or t
  misc_feature (531)..(531): n is a, c, g, or t
  misc_feature (534)..(534): n is a, c, g, or t
  misc_feature (539)..(539): n is a, c, g, or t
  misc_feature (549)..(549): n is a, c, g, or t
  misc_feature (554)..(554): n is a, c, g, or t
  misc_feature (561)..(561): n is a, c, g, or t
  misc_feature (565)..(565): n is a, c, g, or t
  misc_feature (576)..(576): n is a, c, g, or t
  misc_feature (594)..(595): n is a, c, g, or t
  misc_feature (623)..(623): n is a, c, g, or t
  misc_feature (629)..(629): n is a, c, g, or t
  misc_feature (647)..(647): n is a, c, g, or t
  misc_feature (657)..(657): n is a, c, g, or t
  misc_feature (671)..(671): n is a, c, g, or t
  misc_feature (729)..(729): n is a, c, g, or t
  misc_feature (752)..(752): n is a, c, g, or t
  misc_feature (775)..(775): n is a, c, g, or t
  Peptide Sequence Number=SeqID_12376
  Probeset Number=SeqID_19616
nnnnnnnnnnnnnnnnnnnnnnnnnnnnnnnnnnnnnnnnnnnnnnnnnnnnnnnnnnnnnnnnnnnnnnnnnnnnnnnnnnnnnnnnnnnnnnnnnnnnnnnnnnnnnnnnnnnnnnnnnnnnnnnnnnnnnnnnnnnnnnnnnnnnnnnnnnnnnnnnnnnnnnacgaggngngnntttgagnagncggttangtnntttaccnnaanattccnngggaggngatgcacgnngccttgagnntgnatttttannnntnnncgaangtaagaaaatgggagtagtaaaactcnagtactcagagtgttttcngnannccatgtnccagcaggtggggagaccgccncccgctgaaannaggtgttngganagccggtcnncagngacacgnggataggngtttaagtgntnacttcaaaaaaaantttagcctggcaaaagtcaggttgggctggngggtatanngcccaacnncccatactcaatggggganngccctaanagnaaagntnggtnttatnccgggggtnccntgggncccctcgganacggnaccctgntaangttatttgggngcacatccatacccgtcnnaggtctttgagacaaggtcaagtgccangtgggncccaataacttgggaggncctgccatgncatccatcatcatnctaagcctacccaaaaagttttaccatttttggagctattaatttatttctaaaattntaaagggcttggtttgaacaccnttaagggctatataattctatgn

SEQ ID NO: 5214 - DNA, 890 bp, Zea mays
  misc_feature (551)..(572): n is a, c, g, or t
  misc_feature (583)..(588): n is a, c, g, or t
  misc_feature (591)..(596): n is a, c, g, or t
  misc_feature (607)..(609): n is a, c, g, or t
  misc_feature (614)..(616): n is a, c, g, or t
  misc_feature (622)..(624): n is a, c, g, or t
  misc_feature (630)..(634): n is a, c, g, or t
  misc_feature (636)..(638): n is a, c, g, or t
  misc_feature (644)..(644): n is a, c, g, or t
  misc_feature (659)..(670): n is a, c, g, or t
  misc_feature (673)..(673): n is a, c, g, or t
  misc_feature (686)..(689): n is a, c, g, or t
  misc_feature (703)..(703): n is a, c, g, or t
  misc_feature (705)..(707): n is a, c, g, or t
  misc_feature (714)..(716): n is a, c, g, or t
  misc_feature (739)..(741): n is a, c, g, or t
  misc_feature (746)..(746): n is a, c, g, or t
  misc_feature (748)..(749): n is a, c, g, or t
  misc_feature (772)..(774): n is a, c, g, or t
  misc_feature (779)..(781): n is a, c, g, or t
  misc_feature (787)..(789): n is a, c, g, or t
  misc_feature (794)..(806): n is a, c, g, or t
  misc_feature (826)..(826): n is a, c, g, or t
  misc_feature (830)..(830): n is a, c, g, or t
  misc_feature (853)..(854): n is a, c, g, or t
  misc_feature (858)..(860): n is a, c, g, or t
  misc_feature (883)..(885): n is a, c, g, or t
  Probeset Number=SeqID_19617
atcaaaatgatgttaacggcagctggtccccttcccaaaattttgatagttttggaaattcttttgggcaagccccccctggtaccccttcatctaacttccaaagttccccccttgggaagttgcctgaccaaggacgagggagaaatcatgggtttgtcgggaaaggcccttgcattccaagccgctttgcagtggatgaggttgaatctccaactaataacttgacccccaccattggaaccagtggagccatagtgaccccccccatatttggatttagtggacatatgtgaaccttttttgaatttgtaagtagcgttgatcagtgtgccctggaaacaaatctagtggtttgatgaatggttgctagtaccttcgtttcttctttttttttttccgctaattggttttgaaaggccaaaatttaggtggcagcatgtggtatcttcctttataagtttgttcagtttaaaggacttaaaattggtccaaaaaaaaaaaaaaaaaacaaaaaaaaaaaaaactcgagactagttccctcgtgcaannnnnnnnnnnnnnnnnnnnnntggacatatgnnnnnnttnnnnnnatttgtaagtnnngttgnnnagtgannnctggannnnnannnagtggnttgatgaatggttgnnnnnnnnnnnnttncttttttttttcnnnngtaattggtttatnannngaattannnatgtgtcagcatgtggaatcttnnnttatnanngtttgttcagttcaaaggacttnnnattgnnnagtccnnngtcannnnnnnnnnnnnctttgttctctttttctgtnattnccaattgtagcattatttttatnnccgnnntaattcagcctagtcgatttatnnncggcc

SEQ ID NO: 5215 - DNA, 352 bp, Zea mays
  Peptide Sequence Number=SeqID_12377
  Probeset Number=SeqID_19618
acttcaaagtcaggatacccctcttggactgggcctatcacaaccacttactctcgtgcgctctccgtgggagcgaggactcgcggccggcggcagcggcaggttctcctagatctccggcatcatcagtaacaaatggctgacggtgaggacattcagccccttgtttgtgacaatggaactggcatggtcaaggctggttttgctttcggtttagctcaaggctgtggtgtggcagcgagttgagggggtcgcgagagctgcgtgtcgaagtaatttaagcggccagcgcggaaagggcggccgccggctccggtgagctcgatcggcgtggtggctgaagtgattttgt

SEQ ID NO: 5216 - DNA, 352 bp, Zea mays
  Peptide Sequence Number=SeqID_12378
  Probeset Number=SeqID_19619
acaaaatcacttcagccaccacgccgatcgagctcaccggagccggcggccgccctttccgcgctggccgcttaaattacttcgacacgcagctctcgcgaccccctcaactcgctgccacaccacagccttgagctaaaccgaaagcaaaaccagccttgaccatgccagttccattgtcacaaacaaggggctgaatgtcctcaccgtcagccatttgttactgatgatgccggagatctaggagaacctgccgctgccgccggccgcgagtcctcgctcccacggagagcgcacgagagtaagtggttgtgataggcccagtccaagaggggtatcctgactttgaagt

SEQ ID NO: 5217 - DNA, 734 bp, Zea mays
  misc_feature (1)..(2): n is a, c, g, or t
  misc_feature (634)..(634): n is a, c, g, or t
  misc_feature (652)..(653): n is a, c, g, or t
  misc_feature (668)..(668): n is a, c, g, or t
  misc_feature (689)..(690): n is a, c, g, or t
  misc_feature (709)..(716): n is a, c, g, or t
  misc_feature (723)..(726): n is a, c, g, or t
  misc_feature (728)..(728): n is a, c, g, or t
  misc_feature (730)..(734): n is a, c, g, or t
  Peptide Sequence Number=SeqID_12379
  Probeset Number=SeqID_19620
nnccggtcgaggccggcgggcctgtctggtgctgggtggaccggggacatcgtcggcgagcttctcctgtaccgaccaccgtctcacatggtactcagcgcccaacccttgctccatctccatggcatggactgctccatacaggccacgctcggcctccaccttcggcgcccaacgagcaggtgttagggccgcgcagcaccttcctctagtgtgctcggctccagccatggcgtgtggacgctcaagttcggccctcctctggcctctgctcccatggtacaagcccctcttccatgatgccccccatcatcgcgttctcattccctgtgagggcagggagaaatcgggtgtgtactcgtggctagcatgtgggtcgggccaccagttccgaccgaattgtgcgctggcgtgctgaggccgccgtggtaccgtgcgttgccgtggcacgcttccggcaccatcttgaagcacgcagtgaggacacgtgtcatctgaagagcaagttggtacctggaatctcaagtcccaggtcaagaacaggtaccacaggatgaggcgcttggaggatgctgcgatgtgttcgtgagaggtctaggccgtcgcctcccagtcaactttgggttgctggacngttgtctccttataatgnnattatttattttgtntagaattcctgttatgtagtnnagatgtgacattcgaaaannnnnnnnaaaaaannnncntnnnnn

SEQ ID NO: 5218 - DNA, 284 bp, Zea mays
  misc_feature (1)..(18): n is a, c, g, or t
  Probeset Number=SeqID_19621
nnnnnnnnnnnnnnnnnncctgattacaaacccgacctctgtccgacctaccaccaccgctcacctctgtttggctttctcccctcttgctcacccgcttctcgctccgtattccggataccctcatgctctttccctaacgatggtagccatggcggggagaggtaaggcgatcaggttcatgcaccgccatgaaggccatgtccaggatcttcatggctggcctccatttccctgtgggaaggatctgcatagttcttctaggccggctagtttgctgtaag

SEQ ID NO: 5219 - DNA, 661 bp, Zea mays
  Peptide Sequence Number=SeqID_12380
  Probeset Number=SeqID_19622
gccccaatgccattaccttattaaacggcccgggcttaagcttattccccagccccacccatgccggtgccaacagccgcatccaagccggtgccagttacagggaccttggggggttggcagccccccgatcttgggccagtgggtggagttcctgaggcatcagtgcacccggagggggaccccttattgttccccccagtcccaggggttggggcagcagttttcccaccagttcaggcaggtggacccccaccccgggtcccaggggtttttgggtttggtcctccagtccatcctgcagcagcacccgcaaagtggccagttcggggggcttttgggggcccaaatagcccagcaactgcgggggatgtgggttttgcagcacccgattccatccccttacgttgttgcggggggtgtccccccctgaagaaattatgtgttgtagtatacccgctccccgcgggttagttagttagttgagtcatttaggggggatgattgagtaataaggggtcccccatccccagggggggcagtgtcagggggagcaatgccctgaatgaccatttgaaatgaaaaaaggaatcctccttttgttccaatttaaatttcccttaaaaagaaaaaaaaaaaaaaaaaaaaaaaaaaaaaaaaa

SEQ ID NO: 5220 - DNA, 893 bp, Zea mays
  misc_feature (1)..(152): n is a, c, g, or t
  misc_feature (753)..(893): n is a, c, g, or t
  Peptide Sequence Number=SeqID_12381
  Probeset Number=SeqID_19623
nnnnnnnnnnnnnnnnnnnnnnnnnnnnnnnnnnnnnnnnnnnnnnnnnnnnnnnnnnnnnnnnnnnnnnnnnnnnnnnnnnnnnnnnnnnnnnnnnnnnnnnnnnnnnnnnnnnnnnnnnnnnnnnnnnnnnnnnnnnnnnnnnnnnnnnncatcagggtcatctttactatatgctatagtttttttgaactttaatagtgttttgctaaaggatttataaattttatcggggtcgactgaccccaataaacacacctaaatttgcccctgcgtgcagcgtgttgtactgagcctagaacacgtgtgggacgaagtcgtgctagatctgcttggaatgccaccgcgcacgtttattctagaaccatatagccatctagtgcgtttgctggcctaggaacctaacttcacatgctatcgtgatgtgttatgtcatcgtcgtagacagatcaaataaatattactcttaagcagcggcacgagaatatttttgggctagggtggtccgtggcccacacggaccgccctctagctccgccattgcaccgaatcttagtttgtcaaatccggccaaaatccacacttccaactagaattctttgacttcgccttcctctctcggatcattggacggatcaagtgaaacctcttcctgtctacttcctgctccagcatccatggtcgagggtgagtggcgcgatatgcagcgcgggcgtaggcgacgtgggcggccgggcacgtggtgtgggggcnnnnnnnnnnnnnnnnnnnnnnnnnnnnnnnnnnnnnnnnnnnnnnnnnnnnnnnnnnnnnnnnnnnnnnnnnnnnnnnnnnnnnnnnnnnnnnnnnnnnnnnnnnnnnnnnnnnnnnnnnnnnnnnnnnnnnnnnnnnnn

SEQ ID NO: 5221 - DNA, 571 bp, Zea mays
  misc_feature (21)..(21): n is a, c, g, or t
  misc_feature (54)..(54): n is a, c, g, or t
  misc_feature (100)..(100): n is a, c, g, or t
  misc_feature (142)..(142): n is a, c, g, or t
  misc_feature (159)..(159): n is a, c, g, or t
  misc_feature (225)..(225): n is a, c, g, or t
  misc_feature (260)..(260): n is a, c, g, or t
  misc_feature (274)..(274): n is a, c, g, or t
  misc_feature (305)..(305): n is a, c, g, or t
  misc_feature (377)..(378): n is a, c, g, or t
  misc_feature (390)..(390): n is a, c, g, or t
  misc_feature (413)..(413): n is a, c, g, or t
  misc_feature (443)..(443): n is a, c, g, or t
  misc_feature (475)..(475): n is a, c, g, or t
  misc_feature (493)..(494): n is a, c, g, or t
  misc_feature (529)..(529): n is a, c, g, or t
  misc_feature (533)..(533): n is a, c, g, or t
  misc_feature (554)..(554): n is a, c, g, or t
  misc_feature (560)..(560): n is a, c, g, or t
  misc_feature (571)..(571): n is a, c, g, or t
  Probeset Number=SeqID_19624
ccggctggcagggtcccctanttccccccccccccccccccccttttacagggncttgggataattggattaaatatgggggaacaatattcttcttccnaaaaaaaagaactgggagaaactggcatttataccagttgcnaatgggactcgattggncccagtggaagtcactttttgctcgtctggacaattaacatgtcaccttttgcttttgagcttccnaggcgggatcttccatttgtttcccttcttaaagnagattgggatgcanggaaagccttaccaattcctatggcaagagnaactttcttttgggatatcccaaaaggcatgggggtttaaccagcggcttggaaccccaatggaactcccgnngcaggttatggnaaaatcctgggggaatttcatgngggcgatgggaatcccacccaagggtcccnaaaaaggggatccggatggggccttttttgantttccgtaaaaaacacanngaccgccttggtaaggctggggccactgctggccncatngggggggggggattggtggancccccnaattgggttcn

SEQ ID NO: 5222 - DNA, 571 bp, Zea mays
  misc_feature (1)..(1): n is a, c, g, or t
  misc_feature (12)..(12): n is a, c, g, or t
  misc_feature (18)..(18): n is a, c, g, or t
  misc_feature (39)..(39): n is a, c, g, or t
  misc_feature (43)..(43): n is a, c, g, or t
  misc_feature (78)..(79): n is a, c, g, or t
  misc_feature (97)..(97): n is a, c, g, or t
  misc_feature (129)..(129): n is a, c, g, or t
  misc_feature (159)..(159): n is a, c, g, or t
  misc_feature (182)..(182): n is a, c, g, or t
  misc_feature (194)..(195): n is a, c, g, or t
  misc_feature (267)..(267): n is a, c, g, or t
  misc_feature (298)..(298): n is a, c, g, or t
  misc_feature (312)..(312): n is a, c, g, or t
  misc_feature (347)..(347): n is a, c, g, or t
  misc_feature (413)..(413): n is a, c, g, or t
  misc_feature (430)..(430): n is a, c, g, or t
  misc_feature (472)..(472): n is a, c, g, or t
  misc_feature (518)..(518): n is a, c, g, or t
  misc_feature (551)..(551): n is a, c, g, or t
  Peptide Sequence Number=SeqID_12382
  Probeset Number=SeqID_19625
ngaacccaattngggggntccaccaatcccccccccccnatgnggccagcagtggccccagccttaccaaggcggtcnntgtgttttttacggaaantcaaaaaaggccccatccggatcccctttttngggacccttgggtgggattcccatcgcccncatgaaattcccccaggattttnccataacctgcnncgggagttccattggggttccaagccgctggttaaacccccatgccttttgggatatcccaaaagaaagttnctcttgccataggaattggtaaggctttccntgcatcccaatctnctttaagaagggaaacaaatggaagatcccgcctnggaagctcaaaagcaaaaggtgacatgttaattgtccagacgagcaaaaagtgacttccactgggnccaatcgagtcccattngcaactggtataaatgccagtttctcccagttcttttttttnggaagaagaatattgttcccccatatttaatccaattatcccaagnccctgtaaaaggggggggggggggggggggaantaggggaccctgccagccgg

SEQ ID NO: 5223 - DNA, 1009 bp, Zea mays
  misc_feature (499)..(502): n is a, c, g, or t
  misc_feature (1009)..(1009): n is a, c, g, or t
  Probeset Number=SeqID_19626
tatcaaaccaatctctctctctctactaatgacactcaagcgcctagggctgctaccctagaaccaagcctgcggtagaggggtataacctcgccggagaagacagctatccccatggaccgaaggtccatgacagcaaccacccgtccacctgtgccgtcgctcctgcaggcgccgaaacggttgcagaagaaggcgctggattcgcagtcagatgggatggtccggcgggccacccagcagccaccagaacgtgaccagctccataggctcacttgccccaggtggagcagcagatgctccgctatgcctgcgcctgcagccggacggttagtctgcagtaccagcgagctgttgtgtctctggccacgatagaagagaagctaaggaaccaagaggaaatgggcctgcagaccaagactagaattgaggacgaccttaatatgtgctgaatgaatatacgagtggccccgagcgcacactaccggacggaggaagnnnnaaatgacaggtaggccaatagaattgtggagagttagttagcagcagataagtccaagaaagtaggagttagttgagagtttgtaggagaagttggttagccatagggctatttataagccgcatggcagcagggaataaatcaagcaagatcaattatccaaagctgctcttctcccttgcctctctcaagccaccggtgaggaatccctcacggtgaaggtctggagcgcgactacgaactgcgtagccgcggtccagcgacgttgggcgtcgaggcgcttgacaagtggtcagggaagacaaaaggctgctgaccgtcctttttccagatggccgtgatggtcgcgcctttaccttgaaggcagaaagttctaaagatttgttcgagtggaaaacatcactggaagaagctcttgcacaagctccaaatgcagctcttctgatggggcataatggaatatttcgcaatgacacaactgatgtggagagagaagagacctaccan

SEQ ID NO: 5224 - DNA, 781 bp, Zea mays
  misc_feature (366)..(366): n is a, c, g, or t
  misc_feature (386)..(386): n is a, c, g, or t
  misc_feature (389)..(389): n is a, c, g, or t
  misc_feature (392)..(392): n is a, c, g, or t
  misc_feature (399)..(400): n is a, c, g, or t
  misc_feature (419)..(419): n is a, c, g, or t
  misc_feature (431)..(433): n is a, c, g, or t
  misc_feature (437)..(438): n is a, c, g, or t
  misc_feature (442)..(442): n is a, c, g, or t
  misc_feature (444)..(444): n is a, c, g, or t
  misc_feature (451)..(451): n is a, c, g, or t
  misc_feature (454)..(454): n is a, c, g, or t
  misc_feature (457)..(457): n is a, c, g, or t
  misc_feature (459)..(459): n is a, c, g, or t
  misc_feature (465)..(465): n is a, c, g, or t
  misc_feature (467)..(467): n is a, c, g, or t
  misc_feature (470)..(470): n is a, c, g, or t
  misc_feature (472)..(472): n is a, c, g, or t
  misc_feature (474)..(475): n is a, c, g, or t
  misc_feature (477)..(478): n is a, c, g, or t
  misc_feature (481)..(482): n is a, c, g, or t
  misc_feature (486)..(486): n is a, c, g, or t
  misc_feature (488)..(488): n is a, c, g, or t
  misc_feature (494)..(494): n is a, c, g, or t
  misc_feature (502)..(502): n is a, c, g, or t
  misc_feature (511)..(511): n is a, c, g, or t
  misc_feature (514)..(514): n is a, c, g, or t
  misc_feature (519)..(519): n is a, c, g, or t
  misc_feature (524)..(524): n is a, c, g, or t
  misc_feature (527)..(527): n is a, c, g, or t
  misc_feature (532)..(532): n is a, c, g, or t
  misc_feature (536)..(536): n is a, c, g, or t
  misc_feature (539)..(540): n is a, c, g, or t
  misc_feature (548)..(548): n is a, c, g, or t
  misc_feature (551)..(551): n is a, c, g, or t
  misc_feature (555)..(555): n is a, c, g, or t
  misc_feature (562)..(563): n is a, c, g, or t
  misc_feature (565)..(568): n is a, c, g, or t
  misc_feature (577)..(577): n is a, c, g, or t
  misc_feature (590)..(590): n is a, c, g, or t
  misc_feature (597)..(597): n is a, c, g, or t
  misc_feature (600)..(600): n is a, c, g, or t
  misc_feature (605)..(605): n is a, c, g, or t
  misc_feature (607)..(609): n is a, c, g, or t
  misc_feature (612)..(613): n is a, c, g, or t
  misc_feature (615)..(615): n is a, c, g, or t
  misc_feature (618)..(619): n is a, c, g, or t
  misc_feature (623)..(623): n is a, c, g, or t
  misc_feature (630)..(636): n is a, c, g, or t
  misc_feature (638)..(638): n is a, c, g, or t
  misc_feature (646)..(646): n is a, c, g, or t
  misc_feature (654)..(655): n is a, c, g, or t
  misc_feature (658)..(658): n is a, c, g, or t
  misc_feature (662)..(662): n is a, c, g, or t
  misc_feature (664)..(664): n is a, c, g, or t
  misc_feature (672)..(673): n is a, c, g, or t
  misc_feature (682)..(683): n is a, c, g, or t
  misc_feature (687)..(689): n is a, c, g, or t
  misc_feature (693)..(693): n is a, c, g, or t
  misc_feature (703)..(703): n is a, c, g, or t
  misc_feature (710)..(711): n is a, c, g, or t
  misc_feature (718)..(718): n is a, c, g, or t
  misc_feature (722)..(722): n is a, c, g, or t
  misc_feature (724)..(724): n is a, c, g, or t
  misc_feature (729)..(730): n is a, c, g, or t
  misc_feature (733)..(733): n is a, c, g, or t
  misc_feature (735)..(735): n is a, c, g, or t
  misc_feature (742)..(742): n is a, c, g, or t
  misc_feature (744)..(744): n is a, c, g, or t
  misc_feature (747)..(747): n is a, c, g, or t
  misc_feature (749)..(751): n is a, c, g, or t
  misc_feature (756)..(757): n is a, c, g, or t
  misc_feature (766)..(769): n is a, c, g, or t
  misc_feature (771)..(771): n is a, c, g, or t
  Peptide Sequence Number=SeqID_12383
  Probeset Number=SeqID_19627
gcgcgctgaacgcgcacaggagaaggccacaaccagtggatagatttagaaataaagataaggctagagaataagattgagacgagagaattgtggagagttagttggcagcagataagtccaagaaaataagagttagttgagagtttataggagaagttggttagccatagggctatttataagccacatggcagcagggaataaagcaagcaagattattatttcctaatctctctctaaaacaagccgacggttgaggggaaaaacctcaccggcgacgacggaccgtggctacgaactccgtagtcaggggccagctaccctaggtcgggaggtccttgacagctgtgttcctcactgctngtatttcagccagtagctcnacnttngaacccnngatgctgcctctttgctcnccctcgcccctnnncatnncctngngctaccncanccngncccccncncgncncnncnnatnntccntnccttcnctcccccnctttccccnccncttanacacnctntttcnctgngcnncctgcctntcnccantccgcgnncnnnncccctcacncccccctgctccngtccccnccnccccncnnncgnntnccnngcancactccnnnnnnncncccctcancacttttnnccnttgncnacgtcccnnctctctttnntttnnncccntctaaaactngtgcccnnctcaccncccncngttcnntcncntgtctcncnacntnnntcctnncctctcccnnnncnccctattccc

SEQ ID NO: 5225 - DNA, 1180 bp, Zea mays
  misc_feature (4)..(9): n is a, c, g, or t
  misc_feature (11)..(11): n is a, c, g, or t
  misc_feature (17)..(46): n is a, c, g, or t
  misc_feature (48)..(57): n is a, c, g, or t
  misc_feature (62)..(65): n is a, c, g, or t
  misc_feature (95)..(95): n is a, c, g, or t
  misc_feature (105)..(106): n is a, c, g, or t
  misc_feature (130)..(132): n is a, c, g, or t
  misc_feature (166)..(167): n is a, c, g, or t
  misc_feature (1128)..(1180): n is a, c, g, or t
  Probeset Number=SeqID_19628
ggtnnnnnncngtgcgnnnnnnnnnnnnnnnnnnnnnnnnnnnnnncnnnnnnnnnngctannnntgacagagagccgttggactcatggcgcancggacagtgnncagtccactgtccggtgcacaccnnncagtccggtgcggtgtccggtgtgccactaaaanncatctccgaaggctgcgctctcgggtttctgcgactgggaaaactctgctgtggaccagcctggccccacctggcagagggtgcaccagacagtccggtgcacaccggacagtccggtgccccaaagccagaaacactaactcttgtttttcagctgattttcaaatcggttttcgctctaacttgtgtgtgagttctagagtgacatctagcactgtatatgagtgcgattgtgcaccaacactacactagaactctcttggtcaaactactcatcgacaacccctctttatagtacggctaaaagagaataaaagacctaactaaatcgcgagtgttcacatctccttgacactcggactccgtagaccttcaccttttgttccgtcgttttagccgtcgcttcgagttcttatctccgggattgttttcaccgttgtagtacttctacctgtcatgcgacctaacttaccatttgtctctgcaaaacacacgttagtcacatataatattacgttgtcattaatcactaaaaccaaccaggggtctagatgctttcagttgccttatgaattttgaaacaatatgtatatggagtcttaatgcctagttgggactagatgaatgtcggtcttttgtcgttgtgatcgtgattgctgaacattttttgatgaaactagtaaattttgcacactacaaaaaatctattaaaaataaataccccctccattctttttatttgtcgtgttttagttcaaaaatgaactagcaagcaacaaatattcgagaacagaagtagtaataaagtagtttacaaagaggaaaattaagagacaaagaaggaaacaaagatgtaactcaactcatgaatttcttcaactataccgtgggttttgttcaagactctataagcttcatttgatgtggaatatccaaggagaaagtcttcatcgcactcaannnnnnnnnnnnnnnnnnnnnnnnnnnnnnnnnnnnnnnnnnnnnnnnnnnnn

SEQ ID NO: 5226 - DNA, 620 bp, Zea mays
  misc_feature (601)..(620): n is a, c, g, or t
  Peptide Sequence Number=SeqID_12397
  Probeset Number=SeqID_19629
aaactaaccccaaaccccaatccaccccatcccctcctcatccactccgggcggccatggcctgctccttctccgccgccatcaccgtctcttccgcccctaccccggccgccagacccctcgctgctgccccgcagtccgtctgcatcgctcgctccgcggtcgccaccactgccaggccgctccgcctcgccgcctcagggtccgcgcgggctaccagactcgttgcccgcgccagcgtagtcgatgactttgccgctggtcgggaacaagggcgccagacttagaaggccggagctgtgtccgaaccagaagttcatcaacggggaagctctctgattacttgggggaagaagtaccgtcatttctggtccttctacccctggaatttcaccttcgtctgcccgaccgagatactgcgtttagtgacagatacgaggattttgagaagttgacactgagggttttgggggttccattgacagggtgttctccccccctttgatggttgcaaacaaacagaatgccgggggggctcggcgatcttaaatacccacttgtttctgatgggaacaaatcattttcaaaggcctttggggtnnnnnnnnnnnnnnnnnnnn

SEQ ID NO: 5227 - DNA, 447 bp, Zea mays
  Peptide Sequence Number=SeqID_12398
  Probeset Number=SeqID_19630
cgttgctgtcggaagaccgagcgcactgcgcccaagtccgacgatgtctacctacctcaagctcctcctcaagctgtaccgcttcaacgccgtgatcctcaagcggtacttcattagcaagaccaaccgccctgcctctctcgctccaccgtctcatcagcttcatggaagggggggatgtctcgcttggatttccattcagattggggtggctgcatgtgttttccagttatgtgtcacattgcaggagaatcaaattgctgtgatcgtgggaaacgtgactgacgacaagagggtctacgaggtatctgcaatgaaggtggctgcgtctcaggttcactgagacggcaagggcacggattctgagcgcgggtgacgagtgcctcgcctttgaccattgtccattgtcaggttgatggtcatctattgatgtacgctctatttttt

SEQ ID NO: 5228 - DNA, 447 bp, Zea mays
  Peptide Sequence Number=SeqID_12399
  Probeset Number=SeqID_19631
aaaaaatagagcgtacatcaatagatgaccatcaacctgacaatggacaatggtcaaaggcgaggcactcgtcacccgcgctcagaatccgtgcccttgccgtctcagtgaacctgagacgcagccaccttcattgcagatacctcgtagaccctcttgtcgtcagtcacgtttcccacgatcacagcaatttgattctcctgcaatgtgacacataactggaaaacacatgcagccaccccaatctgaatggaaatccaagcgagacatcccccccttccatgaagctgatgagacggtggagcgagagaggcagggcggttggtcttgctaatgaagtaccgcttgaggatcacggcgttgaagcggtacagcttgaggaggagcttgaggtaggtagacatcgtcggacttgggcgcagtgcgctcggtcttccgacagcaacg

SEQ ID NO: 5229 - DNA, 794 bp, Zea mays
  misc_feature (358)..(358): n is a, c, g, or t
  misc_feature (403)..(403): n is a, c, g, or t
  misc_feature (415)..(415): n is a, c, g, or t
  misc_feature (450)..(450): n is a, c, g, or t
  misc_feature (455)..(455): n is a, c, g, or t
  misc_feature (469)..(469): n is a, c, g, or t
  misc_feature (477)..(477): n is a, c, g, or t
  misc_feature (483)..(483): n is a, c, g, or t
  misc_feature (515)..(515): n is a, c, g, or t
  misc_feature (600)..(794): n is a, c, g, or t
  Peptide Sequence Number=SeqID_12400
  Probeset Number=SeqID_19632
acacaaacaagaagcttgcattgttcgtttgctcgatcgttgcaggtaatggagaaccctgctccgagtatcgtagtgccccccatcgccgcacctgtatcagcgaacttcagcagactcgccttccgcaacctgtacatccgacggacgggtccagacagcagggagatggtgactgtggagggaagaagaggctctagtgatcagacaggcgacatgaggtacgtgagtgacttccccgtctacgatggccgtggctccgacgccgtcctggtggctcgcgtgcagggcgtcacaaccacgttcgggaactccaaccaggttcttctcaccggtcgcccttcgaggccggcaggcntcaagggcttccacgctcctttaccgaaaggagtgggtgacggantggatcatgccnatggaatggggcaatccttacggcggggaccccgnagagntttgccttgcggcngagaaggntgcctncctcaaaagaagggttacccttgcccgattgntgatggcgccccgcaacactgacccgtcagccatgcagttttcttgtgcgccgggtggtttggctcatcacagcaaccaaacagnnnnnnnnnnnnnnnnnnnnnnnnnnnnnnnnnnnnnnnnnnnnnnnnnnnnnnnnnnnnnnnnnnnnnnnnnnnnnnnnnnnnnnnnnnnnnnnnnnnnnnnnnnnnnnnnnnnnnnnnnnnnnnnnnnnnnnnnnnnnnnnnnnnnnnnnnnnnnnnnnnnnnnnnnnnnnnnnnnnnnnnnnnnnnnnnnnn

SEQ ID NO: 5230 - DNA, 310 bp, Zea mays
  Probeset Number=SeqID_19633
cttaattatctctactaaaaaacaagtagaactaatgatcattgaaggcttagcaccattagacagaagtcaatacccgaacccattcatcatcctctgctgcagactacagaatgtgagactgcaaaaactagggcgaggggggaggcacaaattaaaagagcaatggaattaattaacaaccgagcgcgacggcagcaagaggaatgagacgagcatggtgcgttcttgactcctccgtttcatgcaaagcctcgcgagcaagcttcaaatcctgtaacaggaacgggaaacctagatgctagagcat

SEQ ID NO: 5231 - DNA, 542 bp, Zea mays
  misc_feature (2)..(2): n is a, c, g, or t
  misc_feature (16)..(16): n is a, c, g, or t
  misc_feature (19)..(19): n is a, c, g, or t
  misc_feature (21)..(21): n is a, c, g, or t
  misc_feature (24)..(24): n is a, c, g, or t
  misc_feature (27)..(27): n is a, c, g, or t
  misc_feature (31)..(31): n is a, c, g, or t
  misc_feature (83)..(83): n is a, c, g, or t
  misc_feature (156)..(156): n is a, c, g, or t
  misc_feature (257)..(257): n is a, c, g, or t
  misc_feature (294)..(294): n is a, c, g, or t
  misc_feature (337)..(337): n is a, c, g, or t
  misc_feature (358)..(358): n is a, c, g, or t
  misc_feature (380)..(380): n is a, c, g, or t
  misc_feature (403)..(403): n is a, c, g, or t
  misc_feature (418)..(418): n is a, c, g, or t
  misc_feature (439)..(439): n is a, c, g, or t
  misc_feature (472)..(472): n is a, c, g, or t
  misc_feature (491)..(491): n is a, c, g, or t
  misc_feature (517)..(518): n is a, c, g, or t
  Peptide Sequence Number=SeqID_12401
  Probeset Number=SeqID_19634
cnggagagagagaaanagnanagntcnctantcccccccccccccccccagactcctcctttccctgttcccatcgctcaagnatccgtttttagtagtagtaattttagtagtagtaattgtcattaacctttgcgttccctccgtcgcgcacgntcctcggctcgggcctcacctcccatttcggtttgggtctggttgtgctcgatccgaggcttactttgggctttgcggcttctctccttgtccaagcttgntgtctgggattcgacctgcagatcggaaggaaacaanggggggcattatcacctaccagataagagaaaattctctttgnaaatttggggatcaagcttgnggatgggacgaaaccctccggngggacttcactgcctggaagggngttaagcaagccaanattcaggggtctcctggcccnaaagcaccctggtttaaaaatccctggggttgnaaaaacaatgaacccgtgntttgcttgggaaaaaaaggattatgnntcaaagggctgggaaatattctca

SEQ ID NO: 5232 - DNA, 788 bp, Zea mays
  misc_feature (1)..(187): n is a, c, g, or t
  misc_feature (788)..(788): n is a, c, g, or t
  Probeset Number=SeqID_19635
nnnnnnnnnnnnnnnnnnnnnnnnnnnnnnnnnnnnnnnnnnnnnnnnnnnnnnnnnnnnnnnnnnnnnnnnnnnnnnnnnnnnnnnnnnnnnnnnnnnnnnnnnnnnnnnnnnnnnnnnnnnnnnnnnnnnnnnnnnnnnnnnnnnnnnnnnnnnnnnnnnnnnnnnnnnnnnnnnnnnnnnnnnnggatctgacttataatgattgcatcacttcctactaagtctggcaaagtgacataggtatccaagttgaacatgtatattgacaactgtcctccacctatggctattaacaataagaggcagctgaacacaccattaggcaatataagaccatgccaatgcttaggcttctagttcttctagattttcttgacagcttgttctctttgttatttctcacatcaatcacatgatgatgtggttatgtgttaatgtttgtaagtcctcagtgacaaatgtcttaaatatttataagattgttcctttttaacttagtaaccttactccctccggtcctaaaaaaacaagaacaaactagaggcccctacggcggccaataacaggcgtacagaaacccatccatgactacaaaaaactaacaagaactaccacaatgctagctaactagcagggaggcccggaatgggggcggtcaattctgcatacttgttaatcaaaatgcagatatgtagttcaatgcaatatgcacccatttgtccacatttgaagagttaccaattttaacgggatgcaatctttgcacaagtttcggttgctgaaan

SEQ ID NO: 5233 - DNA, 787 bp, Zea mays
  Peptide Sequence Number=SeqID_12402
  Probeset Number=SeqID_19636
gcacgaggccgaccaccgctgtggcatactaccttatatactatcgaagaaaaggggatcggaatcgaggagcttcctacactcctttagtcgaatcccaagaatgttctggatttgatatattgaccagtgtggctttctccattccagcctgtctgcggtacttaggaccaactttatcttggcctatcaccaaggtagcacccgctggttcatagttctaaacttacaaaacaattccaacattgtgatttctgtaccgcataggctctgaggagatctacacatcctcatacaaaacaattccaacattgtgattccagcctgtctgcggtattgagaactttgtgccctgtccttgttgtctctcatgggcacctcaaaatgtttcttgtttatgaggatccttatcttgactaccatggctatatcagctgccatgaatgctacaatcattgggacactagtaactaagagggactacaagtttgctgagctcatgagactccctgacacatttcttatgttgtttgttctgctgtgctttgacttttcaatatatttgtcattcaagatattgtggtctgcaagaacttcagtagatcagaaaatatgttcacaggtcttgttggagagtggtcatggttacaaagttgggaacaaaaggaaccccctaacagatcatttacttggagagttagaggatactaccaaaaacacaggaattgggcgtgacccagttatggactctgaatgtgaaactacctttacaaagcagtcatggtct

SEQ ID NO: 5234 - DNA, 787 bp, Zea mays
  Probeset Number=SeqID_19637
agaccatgactgctttgtaaaggtagtttcacattcagagtccataactgggtcacgcccaattcctgtgtttttggtagtatcctctaactctccaagtaaatgatctgttagggggttccttttgttcccaactttgtaaccatgaccactctccaacaagacctgtgaacatattttctgatctactgaagttcttgcagaccacaatatcttgaatgacaaatatattgaaaagtcaaagcacagcagaacaaacaacataagaaatgtgtcagggagtctcatgagctcagcaaacttgtagtccctcttagttactagtgtcccaatgattgtagcattcatggcagctgatatagccatggtagtcaagataaggatcctcataaacaagaaacattttgaggtgcccatgagagacaacaaggacagggcacaaagttctcaataccgcagacaggctggaatcacaatgttggaattgttttgtatgaggatgtgtagatctcctcagagcctatgcggtacagaaatcacaatgttggaattgttttgtaagtttagaactatgaaccagcgggtgctaccttggtgataggccaagataaagttggtcctaagtaccgcagacaggctggaatggagaaagccacactggtcaatatatcaaatccagaacattcttgggattcgactaaaggagtgtaggaagctcctcgattccgatccccttttcttcgatagtatataaggtagtatgccacagcggtggtcggcctcgtgc

SEQ ID NO: 5235 - DNA, 689 bp, Zea mays
  misc_feature (48)..(48): n is a, c, g, or t
  misc_feature (143)..(143): n is a, c, g, or t
  misc_feature (151)..(151): n is a, c, g, or t
  misc_feature (158)..(158): n is a, c, g, or t
  misc_feature (163)..(163): n is a, c, g, or t
  misc_feature (168)..(168): n is a, c, g, or t
  misc_feature (171)..(171): n is a, c, g, or t
  misc_feature (177)..(177): n is a, c, g, or t
  misc_feature (179)..(179): n is a, c, g, or t
  misc_feature (187)..(187): n is a, c, g, or t
  misc_feature (189)..(189): n is a, c, g, or t
  misc_feature (194)..(194): n is a, c, g, or t
  misc_feature (196)..(196): n is a, c, g, or t
  misc_feature (199)..(199): n is a, c, g, or t
  misc_feature (201)..(201): n is a, c, g, or t
  misc_feature (204)..(205): n is a, c, g, or t
  misc_feature (209)..(209): n is a, c, g, or t
  misc_feature (219)..(219): n is a, c, g, or t
  misc_feature (222)..(222): n is a, c, g, or t
  misc_feature (226)..(226): n is a, c, g, or t
  misc_feature (231)..(231): n is a, c, g, or t
  misc_feature (237)..(237): n is a, c, g, or t
  misc_feature (244)..(245): n is a, c, g, or t
  misc_feature (248)..(248): n is a, c, g, or t
  misc_feature (252)..(253): n is a, c, g, or t
  misc_feature (255)..(255): n is a, c, g, or t
  misc_feature (257)..(259): n is a, c, g, or t
  misc_feature (265)..(266): n is a, c, g, or t
  misc_feature (268)..(269): n is a, c, g, or t
  misc_feature (273)..(274): n is a, c, g, or t
  misc_feature (278)..(280): n is a, c, g, or t
  misc_feature (283)..(284): n is a, c, g, or t
  misc_feature (286)..(286): n is a, c, g, or t
  misc_feature (290)..(290): n is a, c, g, or t
  misc_feature (295)..(295): n is a, c, g, or t
  misc_feature (307)..(307): n is a, c, g, or t
  misc_feature (309)..(310): n is a, c, g, or t
  misc_feature (314)..(314): n is a, c, g, or t
  misc_feature (318)..(318): n is a, c, g, or t
  misc_feature (322)..(323): n is a, c, g, or t
  misc_feature (345)..(345): n is a, c, g, or t
  misc_feature (348)..(348): n is a, c, g, or t
  misc_feature (350)..(350): n is a, c, g, or t
  misc_feature (352)..(352): n is a, c, g, or t
  misc_feature (358)..(360): n is a, c, g, or t
  misc_feature (362)..(365): n is a, c, g, or t
  misc_feature (374)..(374): n is a, c, g, or t
  misc_feature (376)..(376): n is a, c, g, or t
  misc_feature (379)..(379): n is a, c, g, or t
  misc_feature (381)..(381): n is a, c, g, or t
  misc_feature (384)..(384): n is a, c, g, or t
  misc_feature (387)..(387): n is a, c, g, or t
  misc_feature (389)..(389): n is a, c, g, or t
  misc_feature (391)..(391): n is a, c, g, or t
  misc_feature (395)..(395): n is a, c, g, or t
  misc_feature (403)..(403): n is a, c, g, or t
  misc_feature (405)..(405): n is a, c, g, or t
  misc_feature (408)..(408): n is a, c, g, or t
  misc_feature (414)..(415): n is a, c, g, or t
  misc_feature (418)..(419): n is a, c, g, or t
  misc_feature (424)..(424): n is a, c, g, or t
  misc_feature (428)..(428): n is a, c, g, or t
  misc_feature (430)..(430): n is a, c, g, or t
  misc_feature (432)..(433): n is a, c, g, or t
  misc_feature (435)..(436): n is a, c, g, or t
  misc_feature (439)..(442): n is a, c, g, or t
  misc_feature (444)..(444): n is a, c, g, or t
  misc_feature (455)..(456): n is a, c, g, or t
  misc_feature (459)..(459): n is a, c, g, or t
  misc_feature (461)..(463): n is a, c, g, or t
  misc_feature (465)..(467): n is a, c, g, or t
  misc_feature (472)..(474): n is a, c, g, or t
  misc_feature (476)..(476): n is a, c, g, or t
  misc_feature (478)..(479): n is a, c, g, or t
  misc_feature (500)..(500): n is a, c, g, or t
  misc_feature (502)..(502): n is a, c, g, or t
  misc_feature (505)..(506): n is a, c, g, or t
  misc_feature (601)..(689): n is a, c, g, or t
  Peptide Sequence Number=SeqID_12403
  Probeset Number=SeqID_19638
tcactatccccccccccccgttcctccgctccctccgcgacaaccagnaccctcattcctcgtcggcgaaaactggaagcgggaagacaactcagatcccccaattttgttcttgagacggaaggcttgggttaaacccggcntccatggntttgacnttggnaactnagnccctcngnaggggagngncagcnantgntnagnncttncccagccatngtnggcngggcnatgcgnaaaatannggntctnngntnnncctatnngnnggcnngcgnnnaannanaaanggcgngggtggttaatntnngttnatcncctnnttgtcgaggtcgcggattattnggnangncggggnnnannnnggattacgntntananaantantnangtcngttttcgngnacnctattnnccnnccccnattntntnngnnatnnnntntcttttctttnncgntnnntnnntttannntncnngtgggttttggtgtgttttcncntgnnggtttggtttgtgatctcaatttcattattgatttctgaaattatattatgggtacaggccattcatggccttctgctgtgtttcttgtgaggtnnnnnnnnnnnnnnnnnnnnnnnnnnnnnnnnnnnnnnnnnnnnnnnnnnnnnnnnnnnnnnnnnnnnnnnnnnnnnnnnnnnnnnnnn

SEQ ID NO: 5236 - DNA, 930 bp, Zea mays
  misc_feature (1)..(51): n is a, c, g, or t
  misc_feature (66)..(66): n is a, c, g, or t
  misc_feature (141)..(141): n is a, c, g, or t
  misc_feature (246)..(246): n is a, c, g, or t
  misc_feature (266)..(266): n is a, c, g, or t
  misc_feature (305)..(305): n is a, c, g, or t
  misc_feature (327)..(327): n is a, c, g, or t
  misc_feature (342)..(342): n is a, c, g, or t
  misc_feature (351)..(351): n is a, c, g, or t
  misc_feature (356)..(356): n is a, c, g, or t
  misc_feature (362)..(362): n is a, c, g, or t
  misc_feature (365)..(365): n is a, c, g, or t
  misc_feature (393)..(393): n is a, c, g, or t
  misc_feature (436)..(436): n is a, c, g, or t
  misc_feature (445)..(445): n is a, c, g, or t
  misc_feature (452)..(453): n is a, c, g, or t
  misc_feature (472)..(472): n is a, c, g, or t
  misc_feature (476)..(476): n is a, c, g, or t
  misc_feature (493)..(493): n is a, c, g, or t
  misc_feature (502)..(502): n is a, c, g, or t
  misc_feature (504)..(504): n is a, c, g, or t
  misc_feature (508)..(509): n is a, c, g, or t
  misc_feature (512)..(512): n is a, c, g, or t
  misc_feature (518)..(518): n is a, c, g, or t
  misc_feature (523)..(523): n is a, c, g, or t
  misc_feature (532)..(532): n is a, c, g, or t
  misc_feature (560)..(560): n is a, c, g, or t
  misc_feature (567)..(567): n is a, c, g, or t
  misc_feature (569)..(569): n is a, c, g, or t
  misc_feature (581)..(581): n is a, c, g, or t
  misc_feature (586)..(586): n is a, c, g, or t
  misc_feature (588)..(588): n is a, c, g, or t
  misc_feature (593)..(595): n is a, c, g, or t
  misc_feature (597)..(604): n is a, c, g, or t
  misc_feature (610)..(615): n is a, c, g, or t
  misc_feature (625)..(625): n is a, c, g, or t
  misc_feature (627)..(629): n is a, c, g, or t
  misc_feature (631)..(631): n is a, c, g, or t
  misc_feature (639)..(641): n is a, c, g, or t
  misc_feature (646)..(653): n is a, c, g, or t
  misc_feature (658)..(660): n is a, c, g, or t
  misc_feature (663)..(664): n is a, c, g, or t
  misc_feature (666)..(668): n is a, c, g, or t
  misc_feature (670)..(670): n is a, c, g, or t
  misc_feature (683)..(683): n is a, c, g, or t
  misc_feature (689)..(693): n is a, c, g, or t
  misc_feature (695)..(713): n is a, c, g, or t
  misc_feature (718)..(720): n is a, c, g, or t
  misc_feature (727)..(732): n is a, c, g, or t
  misc_feature (739)..(741): n is a, c, g, or t
  misc_feature (743)..(750): n is a, c, g, or t
  misc_feature (759)..(760): n is a, c, g, or t
  misc_feature (762)..(767): n is a, c, g, or t
  misc_feature (780)..(780): n is a, c, g, or t
  misc_feature (783)..(791): n is a, c, g, or t
  misc_feature (802)..(806): n is a, c, g, or t
  misc_feature (810)..(812): n is a, c, g, or t
  misc_feature (814)..(817): n is a, c, g, or t
  misc_feature (821)..(824): n is a, c, g, or t
  misc_feature (840)..(840): n is a, c, g, or t
  misc_feature (930)..(930): n is a, c, g, or t
  Probeset Number=SeqID_19639
nnnnnnnnnnnnnnnnnnnnnnnnnnnnnnnnnnnnnnnnnnnnnnnnnnncctccggcctagggntgctcaaaaggctgctgatgaggcgaaggctcgatttggccacattgacggggaccatctgacgcttctgaatgnataccatgcatacaaacaaaacaatgaagatccccagtggtgttacgagaactttgtcaattcaagagcacttaagtctgcagacaatgtcagacaacagcttgntcgcatcatgactagattcnacctcaagatgtgcagcccggatttcaatagccgtgagnactatgtcaatatcaggaaagncatgcttgcgggggnatttcatgncaggncgctcnccnggaacgaactggacattacctgactgtnaaagataaccagggcgtcccatcttcatcccctcccaatttgnatgggaccntaaaccnnaggggggcctcctataatngaanatgtctttgacccaccncggaatttntntttnnccnccgtcnccccnaaattccgnggggtgggaacgggcttaatttgaatanttgcgcncnccccttacctantgttncnggatnnncnnnnnnnntttccnnnnnngggggcccgntnnntntaggcaannnggtcnnnnnnnngtttnnnccnncnnntngcctagggtttcntcggcnnnnncnnnnnnnnnnnnnnnnnnngaaannncttggcnnnnnnattagtnnngnnnnnnnntaattttgnncnnnnnnccttatttttgtntgnnnnnnnnntttatattttnnnnntttnnngnnnnaacnnnntatccttcgggtgggntggaaaaaaaaaaaaaaaaaaaaaaaaaaaaaaaaaaaaaaaaaaaaaaaaaaaaaggaaaaaaaaaaaaaaaaaaaggcccctagggcn

SEQ ID NO: 5237 - DNA, 1020 bp, Zea mays
  misc_feature (678)..(681): n is a, c, g, or t
  misc_feature (683)..(686): n is a, c, g, or t
  misc_feature (691)..(693): n is a, c, g, or t
  misc_feature (709)..(709): n is a, c, g, or t
  misc_feature (711)..(718): n is a, c, g, or t
  misc_feature (726)..(730): n is a, c, g, or t
  misc_feature (732)..(733): n is a, c, g, or t
  misc_feature (771)..(773): n is a, c, g, or t
  misc_feature (1020)..(1020): n is a, c, g, or t
  Peptide Sequence Number=SeqID_12404
  Probeset Number=SeqID_19640
acggagcagtcaaggccgaccggcggacgggcggcggcggtgaggcggatcgaattggcgagagaactcggaggtttcggggcctggggcgctcgcggagcgattttcgctcgaccgtgaatccgggggaatatgttgccagtcgtgggattcagtcgcacatatatctacccactgcacctatccctcacctcccaccgttactgcgctcgacgtcgtgccatacgactagaatgccaactccttagacaagaaattaccgccgccatagccctgttttctccatcgcccaatgccggagggcgactccagacgcctagaagcacccggggatcctgggcggtcggtttcggggcggagtggtgatcaatttcgccagggatcgctcatcggcgccgactcgcgtaagaagtctgcttcttctgagggccagcgcatccacgacttcggggctgacgagcaagcctctgtggattctgagattcagcaactagaagtagttgagccggagctctttgaaggagaagagcaggtggtcgaagaggagccgcctaacactgaggcattcgccttgttccaggtgccgtctcccagtcagctttctagcgccaaggatagatgttagatggaggcaatgtttatctcttatttaaaaagacttcttttatgtaataaagnnnntnnnntgttnnntttttatgaagattantnnnnnnnntgctaaannnnngnntataaattttcatagcaaattctatatgttatttgttnnnaattgaagaaagaagaccaaaaaattgacatccgaataaatatccggatccatccctacctacaggagaacaggtggtcaaagaggagccgcctaacactgaggctttcgacttgatctaggtggcgtctcccagtcagctttgtggctctagggaataatatttagttcgttttattttatcatttatttttgtaagacttccactatataataagtacatttatgatatttatgacatttatctn

SEQ ID NO: 5238 - DNA, 542 bp, Zea mays
  Probeset Number=SeqID_19641
ccggccgccggctcggccctcgaccacagtaaaggatcaggcgcaggcaggaaaatagagagagagcgaagagggagaagggaaggctcgtctgtgcgtgggctccggcaggctacgggcagtgctacagaacacgccggagcgtgccctcgaccgactgccgccgctgcaggaacgcggcgcccacgccaacgtctactcgacatttgtagccttccgggaggtcgcaggagtccaggatgccgacgacaccacgggccgccgcatgggtggctggagcgtgaggtcacgagtcatatgaagatcatcctggtacctggaatctcaagtcccaggtcaagaacaggtaccgcaggatgaggcgcatgaaggatgttgtaacgagttcgtgagaggtctaggtcgtcgtctctcagtcaactttgggttgctggaccgttgtctccttataatgtaattattcatttattttgtatagaactcctattatatagtagagatgtgacattcgatccaaaaaaaaaaaaaaaaaaggggcggcc

SEQ ID NO: 5239 - DNA, 614 bp, Zea mays
  misc_feature (604)..(614): n is a, c, g, or t
  Peptide Sequence Number=SeqID_12405
  Probeset Number=SeqID_19642
accaccaaaccaatcgctggatttgtccagagtatttccggtttcaccgccctagatctgacccgagacgccgcgtcttcgctgagatggcgattactgcgaggcggtcgacgatggtgcgcccggcgcgggagacgccgcggcagcggctgtggaactcccaacctcgacctcggtggtgccgcgcttccacacgcccagtgtctacttctaccgccgcgacggccccgtgccggatgcggagggcttcttcgacggcgagcggatgccgcgcgcgctggcagaggccctcgtgcccgtctatccaatggccggcccgctcccgcgggacggggaccgtaggctccagatccactgcaatgccgaggcagtggtcttcctccaggcccacgcgcccgaatccctctggcgatgacctacggggggcttcccccccaccctgggagtccaggggcctcatccccgaccgtcgattaaccccgacgaacttctcggcctttctcccttactcggggctccagggggggcttattttccaagggggggggggccccccccccttgggggtggggcattgcaaacccccttgggcgggggagggggnnnnnnnnnnn

SEQ ID NO: 5240 - DNA, 614 bp, Zea mays
  misc_feature (1)..(11): n is a, c, g, or t
  Peptide Sequence Number=SeqID_12406
  Probeset Number=SeqID_19643
nnnnnnnnnnnccccctcccccgcccaagggggtttgcaatgccccacccccaaggggggggggcccccccccccttggaaaataagccccccctggagccccgagtaagggagaaaggccgagaagttcgtcggggttaatcgacggtcggggatgaggcccctggactcccagggtgggggggaagccccccgtaggtcatcgccagagggattcgggcgcgtgggcctggaggaagaccactgcctcggcattgcagtggatctggagcctacggtccccgtcccgcgggagcgggccggccattggatagacgggcacgagggcctctgccagcgcgcgcggcatccgctcgccgtcgaagaagccctccgcatccggcacggggccgtcgcggcggtagaagtagacactgggcgtgtggaagcgcggcaccaccgaggtcgaggttgggagttccacagccgctgccgcggcgtctcccgcgccgggcgcaccatcgtcgaccgcctcgcagtaatcgccatctcagcgaagacgcggcgtctcgggtcagatctagggcggtgaaaccggaaatactctggacaaatccagcgattggtttggtggt

SEQ ID NO: 5241 - DNA, 716 bp, Zea mays
  Peptide Sequence Number=SeqID_12407
  Probeset Number=SeqID_19644
ccatgtcagctgcctcgataccgtcacacattccctctatctagcacgttggcccgcgcccatgacgccgtccccgtgtgcccgtcccgtctcacctgctcgtgggccggctgggtcacgcccgcgctcgggtgggccgaaatccccccggcccgctaaaccaaaatttcatttcccctttttcccttttcacaatttcatatacacttgtattttaatattttatgaagaaataatggtcgaagcccttttctaagtcacataaaataatgataataagaatttgacacattttacttagcaagacaaatgtttgatgtattatttattgcattttttgctagaggaagcagtgaccgacgttccagaagccttagctccaaagaagggcaggagcccgacctctcggagatagaaccttcgtgttacgagagcttcgacgaaggcaagttcattctacccttttttgaaaggtcaagagggggaacccctactgtaaaattttaataataatgtaaaattacaatgcgacgtgagtacaagagatagatatgagctgggaaggtctagctaggaagctaagaagaaggatcataagagcacaaaagttatgcctgccactgatcaagccagttcggaattgagttgtcatatttccctctgctctgtgtacaaccaaccttaattccttgatgaattcattcttgcagtgttgc

SEQ ID NO: 5242 - DNA, 692 bp, Zea mays
  misc_feature (624)..(624): n is a, c, g, or t
  Peptide Sequence Number=SeqID_12408
  Probeset Number=SeqID_19645
tactcgggcccacacgtcagtcaaccagggagctggcacacgtggagatggcttggatcgcgcagggagaaaaggggaggtgggccagaatggaggtagtcggcccaaacaacggttttggtctttttcctttttattttctattttcttttctccctttcccaattcaatactccaatttgaacttaaattcaaattccgtggcaaactcgtctccaaattaactatcccacttgaatatgacatgagatgaattgatttatttttaagaaatttatttagtggtggctaatgcttttcctcctcgttttctagtgtttacaatttgatatttatttccaacttggcttttaatatattttatcaacattattttatatagtcacaaaatacacacaaaataaagtctcagcatgatgcaccatttaatatcttttattaacctttgttttttttaatgaggtgttcacatgaaatgataaatagatacaacacacacatacaaataaaggtaataatattttttccttttatattatcccttacaaattgggtattacaaatcctacccccttaaaaataatctcgtcctcgagaattaggaagaacgagggaaaagatggngaaaatctatacgaagctcttcttctctttcccaggtcgcttcatcttctccgtggcgactccattgt

SEQ ID NO: 5243 - DNA, 616 bp, Zea mays
  misc_feature (324)..(324): n is a, c, g, or t
  misc_feature (328)..(328): n is a, c, g, or t
  misc_feature (334)..(334): n is a, c, g, or t
  misc_feature (346)..(346): n is a, c, g, or t
  misc_feature (349)..(349): n is a, c, g, or t
  misc_feature (355)..(356): n is a, c, g, or t
  misc_feature (359)..(359): n is a, c, g, or t
  misc_feature (369)..(369): n is a, c, g, or t
  misc_feature (375)..(375): n is a, c, g, or t
  misc_feature (390)..(392): n is a, c, g, or t
  misc_feature (402)..(402): n is a, c, g, or t
  misc_feature (404)..(404): n is a, c, g, or t
  misc_feature (408)..(408): n is a, c, g, or t
  misc_feature (417)..(417): n is a, c, g, or t
  misc_feature (421)..(422): n is a, c, g, or t
  misc_feature (424)..(424): n is a, c, g, or t
  misc_feature (427)..(427): n is a, c, g, or t
  misc_feature (430)..(430): n is a, c, g, or t
  misc_feature (437)..(437): n is a, c, g, or t
  misc_feature (439)..(442): n is a, c, g, or t
  misc_feature (448)..(450): n is a, c, g, or t
  misc_feature (457)..(457): n is a, c, g, or t
  misc_feature (460)..(464): n is a, c, g, or t
  misc_feature (469)..(469): n is a, c, g, or t
  misc_feature (471)..(471): n is a, c, g, or t
  misc_feature (474)..(474): n is a, c, g, or t
  misc_feature (492)..(492): n is a, c, g, or t
  misc_feature (499)..(500): n is a, c, g, or t
  misc_feature (502)..(502): n is a, c, g, or t
  misc_feature (507)..(508): n is a, c, g, or t
  misc_feature (510)..(510): n is a, c, g, or t
  misc_feature (512)..(513): n is a, c, g, or t
  misc_feature (515)..(515): n is a, c, g, or t
  misc_feature (519)..(521): n is a, c, g, or t
  misc_feature (525)..(525): n is a, c, g, or t
  misc_feature (527)..(527): n is a, c, g, or t
  misc_feature (536)..(536): n is a, c, g, or t
  misc_feature (543)..(544): n is a, c, g, or t
  misc_feature (552)..(552): n is a, c, g, or t
  misc_feature (554)..(554): n is a, c, g, or t
  misc_feature (560)..(561): n is a, c, g, or t
  misc_feature (563)..(563): n is a, c, g, or t
  misc_feature (565)..(568): n is a, c, g, or t
  misc_feature (575)..(575): n is a, c, g, or t
  misc_feature (583)..(583): n is a, c, g, or t
  misc_feature (588)..(588): n is a, c, g, or t
  misc_feature (592)..(592): n is a, c, g, or t
  misc_feature (599)..(599): n is a, c, g, or t
  misc_feature (601)..(616): n is a, c, g, or t
  Probeset Number=SeqID_19646
cggctcgagcggctcgagctcgaacgaattcggctcgagcggctcgaggcaaggttcgcttcctgtagaaactagctctccctccgggtgccatggccgatccggcggaggagaccgttgtctcgccgccaccgacccctgcggccccagccgtgggcgcctcagacccgcccctgcagcctgctgctgacgagcgcctcaacggagaaaggtgtctgcctccggccccggaggtaaggtcccggggattcaggcttcttggagaggacacttccgtgcacaaatcccttgggggcggtaaaactgctgacgttctggttatgnaaanacaaanaaaacttctgcntgntgtaannacnccggcgcaantgccantttgggctccccctnnnacccgtttcncncccncccattccntganncntgnaantccacantnnnnttgtannnggaactnttnnnnnccccncnttntctcctttcggcgtcctnaccctanncntcccnncntnnancaannncccncntactccttnctccctnntccccccntntaattnntntnnnnctctttnttcctttnctccnttcnccccccnannnnnnnnnnnnnnnn

SEQ ID NO: 5244 - DNA, 839 bp, Zea mays
  misc_feature (1)..(25): n is a, c, g, or t
  misc_feature (147)..(147): n is a, c, g, or t
  misc_feature (270)..(270): n is a, c, g, or t
  misc_feature (628)..(632): n is a, c, g, or t
  misc_feature (640)..(645): n is a, c, g, or t
  misc_feature (648)..(839): n is a, c, g, or t
  Peptide Sequence Number=SeqID_12409
  Probeset Number=SeqID_19647
nnnnnnnnnnnnnnnnnnnnnnnnnaaggcggcacgagcataagaagaaaaaaaacacacacacacaaacacaaagcgacttttcaaatcgacaaaggggaaaggttcgcttcttctcgcatcttgctttacttcgagtgccatggncgatccggcggaggagaacgttgtctcgccgccaccgacccctgcgggcccagcgtgggcgcctcagacccgcccctgcagcctgctgctgacggcgcctcaacggagaagtgtctgccccgncgccgaagtaaggccccggggattcagcttcttggagaggacacttccgggccaaatcccttgggggcggaaacctgctgacgttcttgtatggaaaaacaagaaacttctgctgttggataaggcggggcacctggcatctgggttcttgtccaaaaggcttgattaacccctccctggcccggaaaacccatgaccggattgggggggttgcccaccttaattcgggggggccaaagcacccacctttctaaaaaaaagccccccggatatacccccaagggggggatttcgggaacccttggggggaatggttcccgggaaaaaaagaaaaaaacaaaaaagaggtttttcttgnnnnntttttctnnnnnnttnnnnnnnnnnnnnnnnnnnnnnnnnnnnnnnnnnnnnnnnnnnnnnnnnnnnnnnnnnnnnnnnnnnnnnnnnnnnnnnnnnnnnnnnnnnnnnnnnnnnnnnnnnnnnnnnnnnnnnnnnnnnnnnnnnnnnnnnnnnnnnnnnnnnnnnnnnnnnnnnnnnnnnnnnnnnnnnnnnnnnnnnnnnnnnnn

SEQ ID NO: 5245 - DNA, 839 bp, Zea mays
  misc_feature (1)..(192): n is a, c, g, or t
  misc_feature (195)..(200): n is a, c, g, or t
  misc_feature (208)..(212): n is a, c, g, or t
  misc_feature (570)..(570): n is a, c, g, or t
  misc_feature (693)..(693): n is a, c, g, or t
  misc_feature (815)..(839): n is a, c, g, or t
  Probeset Number=SeqID_19648
nnnnnnnnnnnnnnnnnnnnnnnnnnnnnnnnnnnnnnnnnnnnnnnnnnnnnnnnnnnnnnnnnnnnnnnnnnnnnnnnnnnnnnnnnnnnnnnnnnnnnnnnnnnnnnnnnnnnnnnnnnnnnnnnnnnnnnnnnnnnnnnnnnnnnnnnnnnnnnnnnnnnnnnnnnnnnnnnnnnnnnnnnnnnnnnnaannnnnnagaaaaannnnncaagaaaaacctcttttttgtttttttctttttttcccgggaaccattccccccaagggttcccgaaatcccccccttgggggtatatccggggggcttttttttagaaaggtgggtgctttggcccccccgaattaaggtgggcaacccccccaatccggtcatgggttttccgggccagggaggggttaatcaagccttttggacaagaacccagatgccaggtgccccgccttatccaacagcagaagtttcttgtttttccatacaagaacgtcagcaggtttccgcccccaagggatttggcccggaagtgtcctctccaagaagctgaatccccggggccttacttcggcgncggggcagacacttctccgttgaggcgccgtcagcagcaggctgcaggggcgggtctgaggcgcccacgctgggcccgcaggggtcggtggcggcgagacaacgttctcctccgccggatcgnccatggcactcgaagtaaagcaagatgcgagaagaagcgaacctttcccctttgtcgatttgaaaagtcgctttgtgtttgtgtgtgtgtgttttttttcttcttatgctcgtgccgccttnnnnnnnnnnnnnnnnnnnnnnnnn

SEQ ID NO: 5246 - DNA, 440 bp, Zea mays
  Peptide Sequence Number=SeqID_12410
  Probeset Number=SeqID_19649
ggcacgagggtgctctgctgtccgctgctcgcagctcacctgcctgctgcctctggtgcgtgctgcctgcttcgctgtccgactgctggctccgtcgcagcgtcccggcgagaagagtactgggagaaagattgggactggagtcaggcataatgggttgtggttcatcagtcatgaggagtcagcattgaaagcaactgttgagggggatgtcaaggagattctactacatcatcgtcggttaggacatatatcttttgagaacttaagtcggttgtatcccatgatgtttaagggagtggacaaaagtagacttgtatgtgatgcatgtgaacttggcaaacatactagatctacctaccctagtgttggtcttcgtagttgtgaaccgtttattctaatacattcagatgtttggggtcaaaaaaaaaaaaaaaaaa

SEQ ID NO: 5247 - DNA, 453 bp, Zea mays
  misc_feature (54)..(54): n is a, c, g, or t
  Peptide Sequence Number=SeqID_12411
  Probeset Number=SeqID_19650
tctttccctctctctctctccctccccctcataagtcatactccctccatttcnttttatttgtcgctggatagtgcaaaattgcactatccagcgacaaataaaaagaaacggagggagtacataacaagtcatgcatgtagatcttctgatgactgatctggttacagtggcaaagttcatggactcagtaatagagtattatatatatattaagccctcaaagttacgctaattaggtcagtagctgcaaacatctagctagctaactagtgacatgataccagtacctgactacctgagatcgattgtgagattacgagaagggatgatttgtttgagggatacgagaagagagggaccatatcacgaacatgtagctagctgctagcgcctagagagatgatgagatgcatgtactacagcgaggccgggatgaagcagctagcagta

SEQ ID NO: 5248 - DNA, 553 bp, Zea mays
  misc_feature (13)..(13): n is a, c, g, or t
  misc_feature (301)..(301): n is a, c, g, or t
  misc_feature (411)..(411): n is a, c, g, or t
  misc_feature (508)..(508): n is a, c, g, or t
  misc_feature (537)..(537): n is a, c, g, or t
  Probeset Number=SeqID_19651
ttttttgtgcagntaaaaaaatatctggcaaaagtatcttcaacaacacaaaaagttttaaactaaaagaaaaagaccgcgaaaagttgtcatagagtcatcgcatgcaaggtttatatatggtgtttgatttgagtaatgatttagttcattatcttctcatttctcgcttttttgtttgatttgtggaattcttatttctcactttttttgtttgatttatgacatagaataagttgaccaattaccatcttatttctcatagttagttagtattaatatgagaaatgtggctatttcnctaaatttatagggtgtttggtttgagtaataagctagtctgtcatcttctcactcatcactatttttattaggcttgctctttacataaaatcaaacattttaagtgcnctagttccgtcatatccatctagtatcatgaaacgtacaaatacttagagggcgttggtttgagtaatctcttcatcaaaaataaaaatgaaatggngtatcataagtatattttttaaatttggngggatgacatcatttc

SEQ ID NO: 5249 - DNA, 487 bp, Zea mays
  Peptide Sequence Number=SeqID_12412
  Probeset Number=SeqID_19652
ctaagtacattactaaccggccagcggcgagcggaggccgaggtttggccggggagagaaagcagaggcgaggagggtgcgtgggcgggagagctgaggcacgggcaagcagcaactgccgacgcgggggcgagcagcggcggttggcgcacgtgcgagcaacggcgcaagcggctaagagcagcagcgcgacacggacggcggtggcgcgaccaggagttgtgaatcggcagcgacgacgaaaatgggcagtgggggcatcgaatggaagtaactgggagagaaaaagtcgatgaaccggtataaaggggtcgataccaaatatcttagcgtggactcctgacacgtgactggccggtataaaggaggtcggccactaggaacggacattacgggtggtttatataggccaccggtacacccctaagatcccataaaaaaatagttattataggtagtataattactatatcttaaacttgacagg

SEQ ID NO: 5250 - DNA, 487 bp, Zea mays
  Probeset Number=SeqID_19653
cctgtcaagtttaagatatagtaattatactacctataataactatttttttatgggatcttaggggtgtaccggtggcctatataaaccacccgtaatgtccgttcctagtggccgacctcctttataccggccagtcacgtgtcaggagtccacgctaagatatttggtatcgacccctttataccggttcatcgactttttctctcccagttacttccattcgatgcccccactgcccattttcgtcgtcgctgccgattcacaactcctggtcgcgccaccgccgtccgtgtcgcgctgctgctcttagccgcttgcgccgttgctcgcacgtgcgccaaccgccgctgctcgcccccgcgtcggcagttgctgcttgcccgtgcctcagctctcccgcccacgcaccctcctcgcctctgctttctctccccggccaaacctcggcctccgctcgccgctggccggttagtaatgtacttag

SEQ ID NO: 5251 - DNA, 512 bp, Zea mays
  Peptide Sequence Number=SeqID_12413
  Probeset Number=SeqID_19654
gccggagtcgagaagaaaatcgtcgattgacgacaaacctgaggtcgtatcgatgaatcgaaagtaccgggacaaacatctcgacaagacgaatgcaacagtactctcggatttcgccagcgacacatggattgaaagtagttactcgctggagttgtcgcagagttagaaccgtcccgaacttcggtgagcaattccaggaattgtggatcgaatttggggaaacagttttgagatatgaaaagggttcaacgagagggttccatccatatgtatattgctagggtttgaagatattttatttttcgtaataatcctatttttaaaattaaaataattccaaaaaaagctgaaattgtttttaatgtctgaaaaatacttcaaaggctccaaaaactatagaaaaattcctaggcatgatttcgcaccgaataaactcaaaaaacataattagaacttttgaatatgtttttaagtacctcaaataaatagaatttgaatttcgaaaaaaa

SEQ ID NO: 5252 - DNA, 512 bp, Zea mays
  Probeset Number=SeqID_19655
tttttttcgaaattcaaattctatttatttgaggtacttaaaaacatattcaaaagttctaattatgttttttgagtttattcggtgcgaaatcatgcctaggaatttttctatagtttttggagcctttgaagtatttttcagacattaaaaacaatttcagctttttttggaattattttaattttaaaaataggattattacgaaaaataaaatatcttcaaaccctagcaatatacatatggatggaaccctctcgttgaacccttttcatatctcaaaactgtttccccaaattcgatccacaattcctggaattgctcaccgaagttcgggacggttctaactctgcgacaactccagcgagtaactactttcaatccatgtgtcgctggcgaaatccgagagtactgttgcattcgtcttgtcgagatgtttgtcccggtactttcgattcatcgatacgacctcaggtttgtcgtcaatcgacgattttcttctcgactccggc

SEQ ID NO: 5253 - DNA, 1457 bp, Zea mays
  misc_feature (1)..(265): n is a, c, g, or t
  misc_feature (1457)..(1457): n is a, c, g, or t
  Peptide Sequence Number=SeqID_12414
  Probeset Number=SeqID_19656
nnnnnnnnnnnnnnnnnnnnnnnnnnnnnnnnnnnnnnnnnnnnnnnnnnnnnnnnnnnnnnnnnnnnnnnnnnnnnnnnnnnnnnnnnnnnnnnnnnnnnnnnnnnnnnnnnnnnnnnnnnnnnnnnnnnnnnnnnnnnnnnnnnnnnnnnnnnnnnnnnnnnnnnnnnnnnnnnnnnnnnnnnnnnnnnnnnnnnnnnnnnnnnnnnnnnnnnnnnnnnnnnnnnnnnnnnnnnnnnnnnnnnnnnnnnnnnnnnnnnnnnnngccgcctcctcctccggaaccttcgtcgacctgcacatctcgtccgcgtccctcctccccggccgcgacttcgccgccctcctctccgaccgctggcccaccgccgcgagtggccatctctccctcgcggtggtggcgcccccctcttgcccccgcccattcaacggccacatcgaggtgatccgcctcctacacactcgatttcgcgagtgccatccgctcccccggcgatgccctcgacctcctccccgctgctctcctcctcctcgtcgacgcctgcgttgggcctgcatccgctttctcgaggccgtgtcctggtccgaggacaaggaggcccgcgtcatcaacctggcgcggctcctccccgccgatgaggcagccgacctgctcgccagggtgtctcctctagtcgccgctggcggctggtctttcttccgctgcgggcgtggccggcaggtcaccctccgaagcgatgctgcacggccagatccactcggcgatccatgaccaccccgtccacgctgccaccaaggcgggactacccgtcgcgtgactgcgtccacaaggtgctcgacgaggcatttcagtcgcgcctggatacagtcatggagttcatggggaagtacgcaagcccggatttcagggttgctgtgggcagtgatgaacgcaggctataggctcaacctgcagtctgcagtgttaaatacttaaatgtgaagcacttgtattggctcatcgagaggatggtcgatctgagggtgacggataatgcggtgacgccgtggagtgatcaggctgccctggctactgatttgcagaagttgctgaatgttgcagacatgcggcggaacatgatgcctgggcttccaatgcttgtgacccgatgcacactcagactcgccaattcagtcatcactggggagactctggtacctcgacaggttattttagtctgctaactgataatttttctattacagcaactttatgcatgctgtatcttgtggtggtaagttactataccataaatgtgatgattcagttagaacttagaagatgctatctgcatctgattttcttctgttgaaaagcagttgacaatagattctatatgtcaacataatacaatgctctgtttgaatggtttaacttgctgcggcttaaaaaaaaaaaaaaaaaaaaaaaaaaaaan

SEQ ID NO: 5254 - DNA, 802 bp, Zea mays
  misc_feature (3)..(6): n is a, c, g, or t
  misc_feature (619)..(620): n is a, c, g, or t
  misc_feature (663)..(663): n is a, c, g, or t
  misc_feature (682)..(682): n is a, c, g, or t
  misc_feature (691)..(693): n is a, c, g, or t
  misc_feature (704)..(708): n is a, c, g, or t
  misc_feature (711)..(712): n is a, c, g, or t
  misc_feature (714)..(715): n is a, c, g, or t
  misc_feature (723)..(728): n is a, c, g, or t
  misc_feature (731)..(731): n is a, c, g, or t
  misc_feature (733)..(736): n is a, c, g, or t
  misc_feature (741)..(742): n is a, c, g, or t
  misc_feature (752)..(761): n is a, c, g, or t
  misc_feature (770)..(770): n is a, c, g, or t
  misc_feature (772)..(773): n is a, c, g, or t
  misc_feature (775)..(781): n is a, c, g, or t
  misc_feature (783)..(784): n is a, c, g, or t
  misc_feature (789)..(792): n is a, c, g, or t
  misc_feature (794)..(795): n is a, c, g, or t
  misc_feature (797)..(799): n is a, c, g, or t
  misc_feature (801)..(802): n is a, c, g, or t
  Peptide Sequence Number=SeqID_12415
  Probeset Number=SeqID_19657
agnnnntattatacaggtagcgttgcactgccctgcgagctggtctggttttgtttcgtttcgttttggttgggttttcacaggcaccgcgcgccggcgaccgagatggccgactggggtcccgtggtggtggcggtggtgctgttcgtgctgctgtcgccgggcctgctgctgcagctgccggccaagggcgggcgcttcgtggagttcggcaacttccagaccagcggcgcctccatcttcgtccacgccatcatcttcttcgccctcgccgccgtcttcctcatcgccatcggagtgcacatcaccacggactagccgtctagccatagccggcgggaccgggatctttcttcgttacagtctgcctgtatatacatacatgctcagtacgtacgctttaccgccgtctttgtatcagcacccctgctgtgtgcatacctagcaagtgtttatatgggctgtgtgggctgttatcattcagtggcgcagcaagaaacccgatcgtttgcttccaaaaaaaaaaaaaaaatgtggcgtgtggccatccatcgtcgatccatctacacaactccacagctcacctcgagatccttcgatttcgtctctcacacgaccnntgggtgccccccgtctctcttgcaattgggtccgcatgtctcnacctcacacccatatttcnaggcaacannntcgccctgaannnnnttnnanntcttctgnnnnnnatngnnnngtagnntcttatgaannnnnnnnnntctcatctncnncnnnnnnngnntctcnnnncnngnnntnn

SEQ ID NO: 5255 - DNA, 553 bp, Zea mays
  misc_feature (59)..(59): n is a, c, g, or t
  misc_feature (89)..(89): n is a, c, g, or t
  misc_feature (535)..(535): n is a, c, g, or t
  Probeset Number=SeqID_19658
ggagagagctcactagttccccccccccccccggttatctccacccatgggtccctggntctcctctagttgagctcaatcccaagtgntcgcttaagctggtgtggccaggttccctttcctgggtcgccgtcgatgggaagcccctggccatcgatatcgatggatattgggttggtttcttcgaccacgtcaatgcctcacaggatttgggacaccttgtcgacactcggaccatggtggttcgctcgttaccacgccatcttcagcatcatgggttctataaaactctggcgcactcggtcgggcacccggtctgtcaatctccaccacgcagcgctggcatcgggactttaccctggtatggatggttcgacgacaaggcccggaaccagtattttttccagcattttcgcggagtagtgaagtcacggtttgatggtggggacgataaattacctcgccggggatggcgggaagaacgaacccaagtcgacccccaagcggcggggctaattccgcagggaataaagcnggatggaactaaatctga

SEQ ID NO: 5256 - DNA, 160 bp, Zea mays
  Peptide Sequence Number=SeqID_12416
  Probeset Number=SeqID_19659
taaacccctttgatggttctccttgcgatcctccctgaggaagcgctgtgttagagttttttggtagagcccttggagcagcatgtgtagctttcggtagtggtaacggcggattagccggtttctcgctggcagacaatgaagatgacacatggggatc

SEQ ID NO: 5257 - DNA, 188 bp, Zea mays
  Probeset Number=SeqID_19660
gatccatcagtgccttgtgtcaacagtagactgactagatcagggctttcttatggaaccgatgatcacagtctcagagatgagttaggctattgcttacaactggctaattcttgttcttggacatgtatgttgagacatcaaaggagctggtttgaacgactacatggcaattgtgaccaacctta

SEQ ID NO: 5258 - DNA, 365 bp, Zea mays
  misc_feature (34)..(36): n is a, c, g, or t
  Peptide Sequence Number=SeqID_12417
  Probeset Number=SeqID_19661
tcgcgatctagaactagctttttttttttttttnnnaaaaactctaatatagacttcggtaaattaatccacccagtggaaagcaacagccaacagacgtcctcgagaccacacgtcgcttttcatgaccttgcctccctgttcatcggctgcggcgaagcattttcttcaacctctgctcccttccgaagccgtcgcactcgcaccttgagcaagctcctgtgcagacacacgggtttaccgcggccgtcctccatctggcacggcggagctaacagcagaccatgaccaagggcagctggcctgtggcctcactaggggacgaaagcgagaaaggccaggaatggcgctggttgctgtggatc

SEQ ID NO: 5259 - DNA, 208 bp, Zea mays
  Probeset Number=SeqID_19662
gcagcctgagcacccgaggagactccgtgcgaccgaagccagagccagcggaaccgaacggaagcgagacccccggcggctagcgagatggacggcggcgccggcgaggatccgctccttcgcgtgcaaattaagcagaaatgaaggagatgtagaactccaaacgtgattggtattatctgttcatcgaaaaaaaaaaaaaaaaaag

SEQ ID NO: 5260 - DNA, 208 bp, Zea mays
  Peptide Sequence Number=SeqID_12418
  Probeset Number=SeqID_19663
cttttttttttttttttttcgatgaacagataataccaatcacgtttggagttctacatctccttcatttctgcttaatttgcacgcgaaggagcggatcctcgccggcgccgccgtccatctcgctagccgccgggggtctcgcttccgttcggttccgctggctctggcttcggtcgcacggagtctcctcgggtgctcaggctgc

SEQ ID NO: 5261 - DNA, 151 bp, Zea mays
  Probeset Number=SeqID_19664
taaagcttggaccacatgggccggaccaaagaggggaatctcttactactaaggtttctagtgtagacgtccacacaacagattggcgcacggttctgccgatctctcccacgcacgcgcatggaaggcaccttccccgccgccccggatc

SEQ ID NO: 5262 - DNA, 365 bp, Zea mays
  misc_feature (1)..(6): n is a, c, g, or t
  misc_feature (93)..(93): n is a, c, g, or t
  misc_feature (171)..(171): n is a, c, g, or t
  misc_feature (211)..(211): n is a, c, g, or t
  misc_feature (221)..(221): n is a, c, g, or t
  misc_feature (270)..(270): n is a, c, g, or t
  misc_feature (278)..(278): n is a, c, g, or t
  misc_feature (298)..(298): n is a, c, g, or t
  misc_feature (338)..(338): n is a, c, g, or t
  Peptide Sequence Number=SeqID_12419
  Probeset Number=SeqID_19665
nnnnnncccccccattcccctaccctcttggccgcccccctcccatctcctcctttctcaagcacttgcagccacacatcaaaccctagccgncccccacccatctcctcctcccatggtgccattcgttgccgctcggatctccgtcgcgtggtgcaaatcttcaacggntttcggtggagagaggaagggaggaaaaaaaggggagaanccaagggggnggacttccggatcgtacttaaggaatttgccccaactttccggaaaggnaagtaaanacaagggggggtgctaccgnttgggtttgcatcctattcccggttttggggatgcaaaanttccattatggtaacccttgaattttg

SEQ ID NO: 5263 - DNA, 929 bp, Zea mays
  misc_feature (1)..(63): n is a, c, g, or t
  misc_feature (929)..(929): n is a, c, g, or t
  Probeset Number=SeqID_19666
nnnnnnnnnnnnnnnnnnnnnnnnnnnnnnnnnnnnnnnnnnnnnnnnnnnnnnnnnnnnnnngtacttggctgaaccacgggataaaccactgtgtctacctgtgttgattctcttgtggttattgtgtttcgctaagactcctctctagccacttggcaatactgtgctaacgtttaaccaagtttttgtggcattaagttcaagttttacaggatcacctattcaccccccctctaggtgctctcatagttccctactgcatttaactcatccataagctagatgcatctatgaatctatttatacaatgctgctactatttttccatcatatatatttagaaatgcttaaggctgatgtttttccctatttgaaaaatgttaaattatatagaaatgttactgttcaggaatccaagtgcaaaccaactacacaaatgatcttttggctagtaatatgctactgtattttttcttctatggtgatcgatattttcacttacttattaaacgttcatacattagactataataacctttcctgatcaatatatgcaaccattagtattatccttattcaaattgatttgtctcgcatcgctttcgttctggctgtaacgtatgctttggttgtttggtgaaatatgtcgccctcgtcgttgtctacattttgtcaagtttaggaaaaaggtttgcttcaattggtttcgccaagctttgtctgttttggatctccttcaatcgtcgtcttctactgtgcgtgaaagggaattaggcttacacttagttcctatataattttggtgggttgaattgccccacacaaatctttggactaactagtttgttctagtgtataagttatacaggtgtcaaagggtcacaacatagccaataaaatgaccaagtgttgggttcaacaaaagn

SEQ ID NO: 5264 - DNA, 929 bp, Zea mays
  misc_feature (1)..(1): n is a, c, g, or t
  misc_feature (867)..(929): n is a, c, g, or t
  Peptide Sequence Number=SeqID_12420
  Probeset Number=SeqID_19667
ncttttgttgaacccaacacttggtcattttattggctatgttgtgaccctttgacacctgtataacttatacactagaacaaactagttagtccaaagatttgtgtggggcaattcaacccaccaaaattatataggaactaagtgtaagcctaattccctttcacgcacagtagaagacgacgattgaaggagatccaaaacagacaaagcttggcgaaaccaattgaagcaaacctttttcctaaacttgacaaaatgtagacaacgacgagggcgacatatttcaccaaacaaccaaagcatacgttacagccagaacgaaagcgatgcgagacaaatcaatttgaataaggataatactaatggttgcatatattgatcaggaaaggttattatagtctaatgtatgaacgtttaataagtaagtgaaaatatcgatcaccatagaagaaaaaatacagtagcatattactagccaaaagatcatttgtgtagttggtttgcacttggattcctgaacagtaacatttctatataatttaacatttttcaaatagggaaaaacatcagccttaagcatttctaaatatatatgatggaaaaatagtagcagcattgtataaatagattcatagatgcatctagcttatggatgagttaaatgcagtagggaactatgagagcacctagagggggggtgaataggtgatcctgtaaaacttgaacttaatgccacaaaaacttggttaaacgttagcacagtattgccaagtggctagagaggagtcttagcgaaacacaataaccacaagagaatcaacacaggtagacacagtggtttatcccgtggttcagccaagtacnnnnnnnnnnnnnnnnnnnnnnnnnnnnnnnnnnnnnnnnnnnnnnnnnnnnnnnnnnnnnnn

SEQ ID NO: 5265 - DNA, 168 bp, Zea mays
  Probeset Number=SeqID_19668
taagatcagaaggctcggggggcggacccagtgtaggacatgggtgtacacatgtacacccaataaccggatggagattgacgccctcgatagttccttatggtgtagtagtatagattgtactcctcgtgcactgggccctgccgcttccgagtgaggtgccagatc

SEQ ID NO: 5266 - DNA, 168 bp, Zea mays
  Peptide Sequence Number=SeqID_12421
  Probeset Number=SeqID_19669
gatctggcacctcactcggaagcggcagggcccagtgcacgaggagtacaatctatactactacaccataaggaactatcgagggcgtcaatctccatccggttattgggtgtacatgtgtacacccatgtcctacactgggtccgccccccgagccttctgatctta

SEQ ID NO: 5267 - DNA, 608 bp, Zea mays
  misc_feature (1)..(1): n is a, c, g, or t
  Probeset Number=SeqID_19670
nattgctgctctccttgtcctctctctcgagcagcggcgtctccactgcctagtggagacctcaaggcggtgccgtcttcacggccggtggcgtgagccaaggcggctataagttgcaccgtcgcaacatcttcacggccggtggcgcgagctcaaggcggctacagatgcgtcgtcgggaaggcgaagaagagatctacacagggcgtcggcggcacgagctcgaccaggtactcgcacggagggacgtgcgcatgctctatgcctctacgagtctacgtgctccatgctcgtgttctgcgcctctgcatgctctgtgctgctaatatttgcaagatttcatcaggtgctcggtgcttgtgctctgcgcttcggcgtgcttcactactctgcgcaagcagatttcatccacatccctatgcagacaatcagacattgctccattgttctatgtagatttcatcaagtactccattgctctgatttctaaacaaacttatcctcttcgttacagaatacataagtaaatatgttacaggaaaccatcagttctgctgtttgctgctcttgtgaataactgaatatatctattatgttatctgctctta

SEQ ID NO: 5268 - DNA, 298 bp, Zea mays
  misc_feature (28)..(33): n is a, c, g, or t
  misc_feature (42)..(44): n is a, c, g, or t
  misc_feature (49)..(49): n is a, c, g, or t
  misc_feature (51)..(52): n is a, c, g, or t
  misc_feature (60)..(61): n is a, c, g, or t
  misc_feature (81)..(82): n is a, c, g, or t
  Peptide Sequence Number=SeqID_12422
  Probeset Number=SeqID_19671
cacaactgcatgtatactttaacgtgtnnnnnnggaagggtnnnagcangnnttctcttnncttccgccgaaaatcatcgnngatctattcagggtggaactaactcacatcgaggtttgctcgagctcgctcagcacatagctgaacaaggtcccgacgatcgctgttatctgcgtacactggtccaaattatttgcagttgtggtaggaggctcagaatcgacactttaatccgatctcagtgaacactttatattttcacaattagtctagatttatggatgtgtgccttcatta

SEQ ID NO: 5269 - DNA, 627 bp, Zea mays
  misc_feature (601)..(627): n is a, c, g, or t
  Probeset Number=SeqID_19672
gcccgatctcttcttgcacggcgcccctgtctgccctcttgcaatggggggggctcgctgctaagctttcctgtgcgctcgccctggctgttgaggccccgcacgtggctgctgtgaggcgtctcgcccataatgcttccctcgcacctgcgccagttgatgcccgggctgctgttgggctttgccacactttctgccgcgaggcccctcccgccgtcctccttggtggccccgcggtccttctgggtttaaaaataagtcgcataggaaactagcacgaaaaagtccatctgaagtaaacactagtcaaagccacggtaataagtgggcatggccatctggatcaccacagaaatgggttctatgctgttcagccctttctgccgcagaaaagggtattgtatcagaactcgcaaaaatagctggtgtgccaatctcaacaagttggagtcctaatgttacccatgttattgcatcaaccaacatgtctggttcttgcaagcgcacactgaagtttctgatggcaatcttgaatggcaaatgggttatctccatggactgggttaaaacttgcatggaacttatggaacctgctgatgannnnnnnnnnnnnnnnnnnnnnnnnnn

SEQ ID NO: 5270 - DNA, 627 bp, Zea mays
  misc_feature (1)..(27): n is a, c, g, or t
  Peptide Sequence Number=SeqID_12423
  Probeset Number=SeqID_19673
nnnnnnnnnnnnnnnnnnnnnnnnnnntcatcagcaggttccataagttccatgcaagttttaacccagtccatggagataacccatttgccattcaagattgccatcagaaacttcagtgtgcgcttgcaagaaccagacatgttggttgatgcaataacatgggtaacattaggactccaacttgttgagattggcacaccagctatttttgcgagttctgatacaatacccttttctgcggcagaaagggctgaacagcatagaacccatttctgtggtgatccagatggccatgcccacttattaccgtggctttgactagtgtttacttcagatggactttttcgtgctagtttcctatgcgacttatttttaaacccagaaggaccgcggggccaccaaggaggacggcgggaggggcctcgcggcagaaagtgtggcaaagcccaacagcagcccgggcatcaactggcgcaggtgcgagggaagcattatgggcgagacgcctcacagcagccacgtgcggggcctcaacagccagggcgagcgcacaggaaagcttagcagcgagccccccccattgcaagagggcagacaggggcgccgtgcaagaagagatcgggc

SEQ ID NO: 5271 - DNA, 1237 bp, Zea mays
  misc_feature (1)..(7): n is a, c, g, or t
  misc_feature (9)..(9): n is a, c, g, or t
  misc_feature (15)..(17): n is a, c, g, or t
  misc_feature (667)..(669): n is a, c, g, or t
  misc_feature (752)..(753): n is a, c, g, or t
  misc_feature (755)..(755): n is a, c, g, or t
  misc_feature (783)..(783): n is a, c, g, or t
  misc_feature (789)..(789): n is a, c, g, or t
  misc_feature (791)..(792): n is a, c, g, or t
  misc_feature (794)..(794): n is a, c, g, or t
  misc_feature (796)..(798): n is a, c, g, or t
  misc_feature (805)..(805): n is a, c, g, or t
  misc_feature (812)..(814): n is a, c, g, or t
  misc_feature (832)..(832): n is a, c, g, or t
  misc_feature (846)..(847): n is a, c, g, or t
  misc_feature (856)..(859): n is a, c, g, or t
  misc_feature (890)..(892): n is a, c, g, or t
  misc_feature (899)..(902): n is a, c, g, or t
  misc_feature (917)..(918): n is a, c, g, or t
  misc_feature (934)..(936): n is a, c, g, or t
  misc_feature (940)..(943): n is a, c, g, or t
  misc_feature (953)..(953): n is a, c, g, or t
  misc_feature (966)..(966): n is a, c, g, or t
  misc_feature (979)..(983): n is a, c, g, or t
  misc_feature (992)..(992): n is a, c, g, or t
  misc_feature (1018)..(1020): n is a, c, g, or t
  misc_feature (1032)..(1032): n is a, c, g, or t
  misc_feature (1034)..(1038): n is a, c, g, or t
  misc_feature (1042)..(1042): n is a, c, g, or t
  misc_feature (1044)..(1045): n is a, c, g, or t
  misc_feature (1048)..(1048): n is a, c, g, or t
  misc_feature (1056)..(1056): n is a, c, g, or t
  misc_feature (1061)..(1061): n is a, c, g, or t
  misc_feature (1066)..(1066): n is a, c, g, or t
  misc_feature (1081)..(1086): n is a, c, g, or t
  misc_feature (1091)..(1095): n is a, c, g, or t
  misc_feature (1098)..(1100): n is a, c, g, or t
  misc_feature (1102)..(1103): n is a, c, g, or t
  misc_feature (1114)..(1114): n is a, c, g, or t
  misc_feature (1116)..(1118): n is a, c, g, or t
  misc_feature (1122)..(1125): n is a, c, g, or t
  misc_feature (1134)..(1142): n is a, c, g, or t
  misc_feature (1174)..(1237): n is a, c, g, or t
  Peptide Sequence Number=SeqID_12424
  Probeset Number=SeqID_19674
nnnnnnngncatttnnnggcaactctcttcccgcccccacacacacccactccatgttccacacaagcacacactagcacaaggatcgttcgatcgttcttcgatcgttcgatcgttcttcgatcgttcgtcccctgttcttggttcgttcgttcgtccgttcgtccgttcgttcgatcgttcgtccgttcgttcgtccaaataatctttttcctactgttatgctgccgaaattccgatcgttcgttcatagttcctattcatcgttcatcgttcgttcatagtccctattcatcgttcttccagataatctttgtcctgccgttatgctgccgaaattccgatcgttcgttcgtccggtcattcgatcgttcgtccgttcgttcatccaaataatctttttcctgtcattatgctgccgaaattccgatcgttcgttcatagttcctatttatcgttcatcgttcgttcatagtccctattcatcgttcttccagataatcactgtcctgccgttatgctgccgaaattccgatcgttcgttcgtccgatcattcgatcgttcgtccgttcgttcatccaaataatctttttcctgccgttatgctgccgaaattccgatcgttcgttcgttcgatcattcgatcattcatcgttcgttcatagnnnctattcatcgttcatcgttcgttcatagttcctattcatcgttcgtcgttcgttcatacgaattattcaccatcactatccanngnataatctcatcactactattcactgacnctattnannancnnnactatcnatcatcnnnactattcatcatccatanttcctatccatccnncattgatcnnnnatattaactattcaccatcactatttacacnnnctatttnnnnatgctatttagtgtnnctttttacctatactnnngtcnnnnactttttacngagtctatttacntttgctacgcttnnnnnctttttacntttactttttcatgtttgtatttacnnntagttttaattntnnnnngatncnngtnctatttantgttnggggntgataatagtttttnnnnnntaatnnnnntannngnnattcagctcancnnntgcnnnntgtgtcgtnnnnnnnnnatttttatatttgttctccatgtctcgttttnnnnnnnnnnnnnnnnnnnnnnnnnnnnnnnnnnnnnnnnnnnnnnnnnnnnnnnnnnnnnnnn

SEQ ID NO: 5272 - DNA, 920 bp, Zea mays
  misc_feature (1)..(1): n is a, c, g, or t
  misc_feature (3)..(9): n is a, c, g, or t
  misc_feature (11)..(13): n is a, c, g, or t
  misc_feature (15)..(21): n is a, c, g, or t
  misc_feature (23)..(27): n is a, c, g, or t
  misc_feature (44)..(45): n is a, c, g, or t
  misc_feature (61)..(62): n is a, c, g, or t
  Probeset Number=SeqID_19675
nannnnnnntnnntnnnnnnntnnnnnatttaaatatcttatannataaatccaaaagcanntacaatggattcaacagccgcaagttggagttgagcacgacgttctaaaagtatggattcaacagccacaagttggagttgagcacgacgttctaaaagttgaaaggttcatgtatcatcccaacatgaagctccactccgccgtttagtttaattgttgaagggaactattgacctgatgctccaactacaccagagagaatagagaacacatatgtccccattctcacataatggtttcaggggagcttgatatattatagcaagtccaaaatcaagcttgatatattctagcaagtacaaaatcaactattctttataattccatgtttgactcctcccatgaccttttttggttttatcgaaggcccctaggaggttttgggatcgcacgtcggagcgcgtagcacttgtacaagagtccatagtcgagacttctatggtgatgctgaggtatctgcgccttttaatgttatgctgaggtaactggccagttccaggcatctcctgacgataagggcacctcagctcctcttgtatattcgccacgaacaaagaaacggtcttgatgtgcatgtggtactcctatgcggtggtgaaagaggagagacgatattgtgtattgggacattcgggacaaccctcaggtcgcttgttcgtcgagatcgcgaggtagaaatcgtagcattgcagaccgcaagatcaggaggctcgctgacctcgccgtctccttcaccgcctttttgcggctgcgcagcggcgccaaaccgtagagggggtcccgctggatgagcagcgatatggccgctctttttgcgctcgcgcggcagcgcctaggcctatagtccgaccccctgc

SEQ ID NO: 5273 - DNA, 628 bp, Zea mays
  misc_feature (1)..(7): n is a, c, g, or t
  misc_feature (627)..(628): n is a, c, g, or t
  Peptide Sequence Number=SeqID_12425
  Probeset Number=SeqID_19676
nnnnnnnggattttcttcacccgtccacctcgtcttgcgctcctctgtctcggcgacgactgtgctaccgccgccgccgccgcaagacttcgtcgggcactttgccggcgacgatttcccaccagctatttctactcggatccgatctatttacaagcccaacaggatcagaggaggtgatggcgaggagtgacagctgcctggcgcgcgtgggtgccggaattgctatcggtggcgcggtcggcggagccgtcggtgcttgctatggaacttttgaggcgttcagatacaaggaaaataaaaaactggaataggtcggtagtctggtcctggaagactcaaaagcatagtggaaggatatcctacatatccctggattgctaaagatcagatacattgggcaaaccaccgttggcagcgctgcgatttttgggcttttcttgggggctgggagcttgattcactgtggaaaatcctactagtttgtttccctttttttttctgaagtctgaacacacctttgtcgatgggcttcagtgaaaactattcaatgcctgtttcatgtaacagctaatagctcagggttggaaaagaacaatcaagttatgtcctaaaaaaaaaaaaaann

SEQ ID NO: 5274 - DNA, 314 bp, Zea mays
  misc_feature (1)..(5): n is a, c, g, or t
  misc_feature (11)..(12): n is a, c, g, or t
  misc_feature (15)..(20): n is a, c, g, or t
  misc_feature (23)..(23): n is a, c, g, or t
  misc_feature (25)..(25): n is a, c, g, or t
  misc_feature (34)..(35): n is a, c, g, or t
  misc_feature (40)..(41): n is a, c, g, or t
  misc_feature (45)..(46): n is a, c, g, or t
  misc_feature (49)..(49): n is a, c, g, or t
  misc_feature (55)..(64): n is a, c, g, or t
  misc_feature (68)..(75): n is a, c, g, or t
  misc_feature (77)..(95): n is a, c, g, or t
  misc_feature (97)..(98): n is a, c, g, or t
  Peptide Sequence Number=SeqID_12426
  Probeset Number=SeqID_19677
nnnnncccttnnatnnnnnnagngntatttgatnnttggnnggannagnttattnnnnnnnnnntacnnnnnnnncnnnnnnnnnnnnnnnnnnntnngatctggaccattttagatcaccgcaatatatttgtttttgatagtatacatccctgtttggctagaaccttgttattgcttgttagcaaggaaattcagttgtgggtttgttgggactaaatgtatcttttacctttttgcccagtcgcctgagtatgtttgttcttaggttacatacccttctgtttcttgtcgcgaaagtgatttgtagctta

SEQ ID NO: 5275 - DNA, 443 bp, Zea mays
  Probeset Number=SeqID_19678
gcggctcctcagttcttccgtcctcctcctccctccggtccttccctccttccggtccttccctctagattgagagcaggagctcaccggcttcctgccgcctgccgctgacgcgcagggtacacgcggccagcccagcgtcgcagccccagcgtcacagcacgtggccccgtgctgcgagcgggcggcgtggtcgtgctatcggtggcgccgcggccgccgcaggctccggcaacctccttgtcgttgtccctctccctgccagggctcgaccagcagcccgaaccatccccgccgccaacatctcaagcacaagcaagctcgctgtatgatgcaggagacaggcttcgacgcacgcaccgtgatgggcatggctgagatcgactagtttcagcagcaggggttccaagacaacgaatcgccgatcgatcccagatttcttt

SEQ ID NO: 5276 - DNA, 552 bp, Zea mays
  misc_feature (500)..(500): n is a, c, g, or t
  Peptide Sequence Number=SeqID_12427
  Probeset Number=SeqID_19679
acccgataccttctctccccgacttttccttcccttcctcgcacgacgagtgacgacgaccatccccaactccacgccgcggagccgcaccaaatctcaccctgcatctctttagggttagggttctgcccgcacttgtgaattccgttgtgaaatctctcatctcctgagtcgagaatcgcagtttcctactcggttcgtttggggaaatcagttattttcgttcggccgcgtgggctctctgaaacgtttgggttgtcggctatttcccccgagttttgaggtaagaaatcgcgttcggtctggaatttagtttttttgatgacttctgacagaaaagctgtgtttttttgttttgtgggagaaggtttgaaaaatcgtcgtaattggatcatcacgcggctgccgaactttaagtggtggtggaagtttcgtgcctcggcgtggcccccgtgctcgattcttgatcacctgcccgccccacacgctatgagcgcgangcgcgcgggctggggctcttgctgctcgggcacgcgcgcggggtccccgtgt

SEQ ID NO: 5277 - DNA, 175 bp, Zea mays
  Probeset Number=SeqID_19680
taacttgagccaacttttctgacaactcagcctccaattcctttgcttctgctaatgaagtctcgagactagttgatttatgcttgtatgcttcaagctcctcagaaagttcatcaatcttcacatgacaactactacactctcctgtagcagctttgagctcttgctcaagatc

SEQ ID NO: 5278 - DNA, 704 bp, Zea mays
  misc_feature (1)..(14): n is a, c, g, or t
  misc_feature (16)..(20): n is a, c, g, or t
  misc_feature (30)..(32): n is a, c, g, or t
  misc_feature (588)..(591): n is a, c, g, or t
  misc_feature (598)..(602): n is a, c, g, or t
  misc_feature (618)..(623): n is a, c, g, or t
  misc_feature (663)..(668): n is a, c, g, or t
  misc_feature (673)..(674): n is a, c, g, or t
  misc_feature (677)..(677): n is a, c, g, or t
  misc_feature (679)..(679): n is a, c, g, or t
  misc_feature (704)..(704): n is a, c, g, or t
  Peptide Sequence Number=SeqID_12428
  Probeset Number=SeqID_19681
nnnnnnnnnnnnnnannnnnccggggcgannnatccactcaccagcactccgtcgtcaacaccgcaatcatgggtaaaggaaagccaagaggtctcaacgccgcccgcaagctccgcaaccatcgtcgtgagggacgatgggccgacctccactacaagaagcgtctcctcggaaccgctttcaagtcttctccctttggtggttcttcccacgccaagggtatcgtccttgagaaggtcggtgttgaggccaagcagcccaactccgctatccgaaagtgtgtcagggttcagttgatcaagaacggaaagaaggtcaccgctttcgttcccaacgatggttgcttgaactttgtcgacgagaacgacgaagtcctccttgccggtttcggtcgtaagggcaaggccaagggtgatattcccggtgtgcgtttcaaggtcgtcaaggtttccggtgtcggtctgtccgcactgtggaaggagaagaaggagaagcccaggtcatagaggactcgtctgcaaggagtcaaggaaggaaacgaacgtggaccacaagcccgccatgaacgaatgatggaatccgcggannnntatgggnnnnnaccggagtctttacannnnnntatctgtgcttctactcggcatatgaaaagtcatgatatnnnnnnagagnnagntngagaatctgactcgttcaagcgccn

SEQ ID NO: 5279 - DNA, 619 bp, Zea mays
  misc_feature (1)..(1): n is a, c, g, or t
  misc_feature (619)..(619): n is a, c, g, or t
  Peptide Sequence Number=SeqID_12429
  Probeset Number=SeqID_19682
ngcacactgtgtcactgagttttaaaacctcagtcactgaccaaaaaccttcggaaaattaattttacactgtttcttttcaaagacagtaaccattggctccatggtgccatttcatcaaagccctttaaagaacatacttaaaggcactccgaatcatgaatcttttccaacatcaatatcggatgtgcaggtggcacagatagtctgtcatctacctgtgcatgtttaattcctattgattatcatcagaattccataattttaatgtctgattagacctttgagaatatatggaacgcggtttacaccacgtgcccctatttctagagaacacgctgctgaatttacagctgttctgcatacattctgtatatggcttcatctaaaacaataaaacatagaatcctatgatggcccccttcctttcagaccttcaggcagatctagaagatacctgatgcacgccctcagacacaattattcttttggaatttgcgtaactttctacggttagaggtcctttttcatacccccctcttaatagaggcgcaaaccaacctccagaaataaggcatctagatgacatgtatcatgtacctcggccgcgaccacgctn

SEQ ID NO: 5280 - DNA, 619 bp, Zea mays
  misc_feature (1)..(1): n is a, c, g, or t
  misc_feature (619)..(619): n is a, c, g, or t
  Probeset Number=SeqID_19683
nagcgtggtcgcggccgaggtacatgatacatgtcatctagatgccttatttctggaggttggtttgcgcctctattaagaggggggtatgaaaaaggacctctaaccgtagaaagttacgcaaattccaaaagaataattgtgtctgagggcgtgcatcaggtatcttctagatctgcctgaaggtctgaaaggaagggggccatcataggattctatgttttattgttttagatgaagccatatacagaatgtatgcagaacagctgtaaattcagcagcgtgttctctagaaataggggcacgtggtgtaaaccgcgttccatatattctcaaaggtctaatcagacattaaaattatggaattctgatgataatcaataggaattaaacatgcacaggtagatgacagactatctgtgccacctgcacatccgatattgatgttggaaaagattcatgattcggagtgcctttaagtatgttctttaaagggctttgatgaaatggcaccatggagccaatggttactgtctttgaaaagaaacagtgtaaaattaattttccgaaggtttttggtcagtgactgaggttttaaaactcagtgacacagtgtgcn

SEQ ID NO: 5281 - DNA, 1004 bp, Zea mays
  misc_feature (1)..(21): n is a, c, g, or t
  misc_feature (857)..(1004): n is a, c, g, or t
  Peptide Sequence Number=SeqID_12430
  Probeset Number=SeqID_19684
nnnnnnnnnnnnnnnnnnnnnggccgctcggaatctgtcgtaggctcgttcgtctgcactggcgccggcagggtctcgtcggacgacagggcctcaaaaaggctcggagagctacgccgtcgccgtcgcccccgcctggggtattcggcgatgcaagatccgccgccgacgggggaaaccccagacagtggaccgattgctccgatgtgcaatccaaagggctcaccctcccagcaagatgatgattctcgaggtggtgaagtgatgcgatcattggacgaccttccagaggatatctgccgacgtattcatgcccgaatgtcactgcaaaacgctgcccgcttggcttgtgcatcacacacattttggagatcatggagatgctatcccaaccttgacttacgtcagagaatactaggtttgaatggagatcacatcagcaaaattgaccatattctgcaaaatcactccggcgttggcatgaagaaactaaggattgaactttttgactgcgacaaggttgattcctgttatatcaatagctggcttcgtattgctgttacagcaggaattgaagagctcactctttatctgcccgctaccgctgaggacgaagcatactacagtttcccatgctcgcttttatttaatgggagtgaaaactcgattcggtatcttgacataggcatctgtgcctttcgtcccacggctgggcttggtcgctggagaagcttggcaattttatttctgagtaatgtgttgattgctgacgatgagctagagggccttctttacaattgtgctgcattggagcatttgggactcctgaattgcccggagatagtttgcctgaagannnnnnnnnnnnnnnnnnnnnnnnnnnnnnnnnnnnnnnnnnnnnnnnnnnnnnnnnnnnnnnnnnnnnnnnnnnnnnnnnnnnnnnnnnnnnnnnnnnnnnnnnnnnnnnnnnnnnnnnnnnnnnnnnnnnnnnnnnnnnnnnnnnn

SEQ ID NO: 5282 - DNA, 883 bp, Zea mays
  misc_feature (1)..(3): n is a, c, g, or t
  misc_feature (5)..(10): n is a, c, g, or t
  misc_feature (727)..(727): n is a, c, g, or t
  misc_feature (747)..(747): n is a, c, g, or t
  misc_feature (803)..(808): n is a, c, g, or t
  misc_feature (810)..(883): n is a, c, g, or t
  Peptide Sequence Number=SeqID_12431
  Probeset Number=SeqID_19685
nnnannnnnngatcacaacacaaacaaacaaacaaacaaaaaggagtagtacgactgtctagtgccaatatggctggcgtctacaccaacgacattgccattgtgcttgtggcacttctctccgtgctcgtcacgtccgtctgttctgcgcccaactacgacacctccgccgctagatcctacaactccggctggctccccgcgaaggccacctggtacggtgcgcccaccggcgccggacccaacgacaacggcggtgcttgcggcttcaagaacgtcaaccagtaccctttctcctccatgacgtcctgcggcaacgagcctctgttcgacggtggcgcaggctgcggcagctgctataagatccgatgtgtcgccgccaacaacccttcctgctccgaccagccgaggagggtggtcatcaccgacatgaactactaccccgtggccaggtaccacttcgacctcagtggcacggcgttcggggccatggccaagaacggcctcaacgacaagctccgccacgccggcatcatcgacatgcagttcaggagggtgcgatgcaacttcccgggcatgaaggtcaccttccacgtccagcgtggctccaaccccaactacctcgcggtgctcgtggaatacgccaacgtcgacggcaccgtggtccgcatggagctgatgcagaccaggaacggccgccccacggggtcctgggagccgatgcgcngctcctggggatccatctgncggatggacaccagccgcccgctgcaggggcccttctccatgcgcatcaccagcgnnnnnngnnnnnnnnnnnnnnnnnnnnnnnnnnnnnnnnnnnnnnnnnnnnnnnnnnnnnnnnnnnnnnnnnnnnnnnnnn

SEQ ID NO: 5283 - DNA, 1058 bp, Zea mays
  misc_feature (1)..(7): n is a, c, g, or t
  misc_feature (645)..(647): n is a, c, g, or t
  misc_feature (700)..(704): n is a, c, g, or t
  misc_feature (708)..(710): n is a, c, g, or t
  misc_feature (720)..(722): n is a, c, g, or t
  misc_feature (729)..(730): n is a, c, g, or t
  misc_feature (732)..(734): n is a, c, g, or t
  misc_feature (737)..(737): n is a, c, g, or t
  misc_feature (740)..(740): n is a, c, g, or t
  misc_feature (743)..(744): n is a, c, g, or t
  misc_feature (757)..(758): n is a, c, g, or t
  misc_feature (760)..(760): n is a, c, g, or t
  misc_feature (767)..(785): n is a, c, g, or t
  misc_feature (788)..(800): n is a, c, g, or t
  misc_feature (802)..(807): n is a, c, g, or t
  misc_feature (809)..(810): n is a, c, g, or t
  misc_feature (813)..(813): n is a, c, g, or t
  misc_feature (815)..(819): n is a, c, g, or t
  misc_feature (823)..(825): n is a, c, g, or t
  misc_feature (828)..(850): n is a, c, g, or t
  misc_feature (852)..(882): n is a, c, g, or t
  misc_feature (890)..(903): n is a, c, g, or t
  misc_feature (905)..(905): n is a, c, g, or t
  misc_feature (907)..(912): n is a, c, g, or t
  misc_feature (914)..(920): n is a, c, g, or t
  misc_feature (922)..(966): n is a, c, g, or t
  misc_feature (969)..(977): n is a, c, g, or t
  misc_feature (979)..(988): n is a, c, g, or t
  misc_feature (993)..(1005): n is a, c, g, or t
  misc_feature (1010)..(1014): n is a, c, g, or t
  misc_feature (1016)..(1043): n is a, c, g, or t
  misc_feature (1050)..(1050): n is a, c, g, or t
  misc_feature (1052)..(1058): n is a, c, g, or t
  Peptide Sequence Number=SeqID_12432
  Probeset Number=SeqID_19686
nnnnnnnccctctcgaaggctgcgcggccgcgaagccaaaccctagcctccgccccccctcgaatccgcatcgtcttcagcggggagggatgagcaggcgctggagcaggacgatctatgttggcaacctccctggggatatccgggagagggaggtggaggacctcttctacaagtatggccgtattgttgatattgacctgaaggttcctccaaggccgcctggctatgcttttgttgagtttgaagatcctcgtgacgccgaagatgcctgtgctggaagggatgggtacaactttgatggaaatcgtctaagagtggaacctgctcatggtgggagaggtagtggtggcccctctcatgatcgttctagcagctttggtggtggtggtggtggcggcggcggtggtggacgccggggtgtctccaggcacacggattaccgtgttctggttactggcctgccttcttctgcatcctggcaagatttaaaggaccatatgcgaagggctggtgatgtttgtttcgcagaagtgtatcatgaaggcggcggcaccctaggaattgttgactacacaaactatgatgatatgaaatatgctataaagaaactggatgacactgaatttaagaatgcattttctnnnggttatataagggtgaaggaatatgatggcaaatgtgggcgctcctactcacnnnnnaggnnnccaagtcgtnnncgcagcnnannnagnagnccnnagcaaaatctccnngngcccgcnnnnnnnnnnnnnnnnnnntcnnnnnnnnnnnnntnnnnnncnntgntnnnnntcannnggnnnnnnnnnnnnnnnnnnnnnnnannnnnnnnnnnnnnnnnnnnnnnnnnnnnnnaatggggnnnnnnnnnnnnnncnannnnnnannnnnnnannnnnnnnnnnnnnnnnnnnnnnnnnnnnnnnnnnnnnnnnnnnnccnnnnnnnnnannnnnnnnnnaaaannnnnnnnnnnnnggggnnnnntnnnnnnnnnnnnnnnnnnnnnnnnnnnnatttttntnnnnnnn

SEQ ID NO: 5284 - DNA, 965 bp, Zea mays
  misc_feature (778)..(778): n is a, c, g, or t
  misc_feature (822)..(965): n is a, c, g, or t
  Peptide Sequence Number=SeqID_12433
  Probeset Number=SeqID_19687
acacggagtgtcaagctttgaactagtgcaactttttgtgctcacacactattctagatagacaacctccatggctgctgctcctgctactcaacctcgtgtcatggtgctacccttccccgcacagggccatgtcatcccgctcatggagctgtctcgcaagctcgccgggcacggcctcgcggtagacttcgtgaacaccgagttcaaccacgacctcgtcatggaagcaatggcagagaagggagcaattcctgatgggatccacatgctcaccgttccggacggcctgggccccggagacgaccacgcggacatcggcaagtttgtcaaggacctgcccgccgccatgtccggccgcctcgaggagatgatccgatccaggaagattaagtgggtgatcgtggatgtgtccatgagctgggcactgcaggtggccaccacggcgggtgcccgtgttgcctcgttctcgacctactccgcggccgtgtttgctctcaggatgaacctccccaaattgatacaggatggcgttcttgatgaaagtggggatgtgaaggggcaggagcagatcaagatgatgccgcccatcgacgcgtcggagatcccctgggtcagcctggccagcaccagcgcccctgagaggcgcagaaacaacatcgagaacgtcctcaagaccaacctgtcgatgccactcgccgaggtggtcatcctcaacacttccttggagttggaacccgacgctctggccctcctccccaacgcgctgcctctcggncccgctagtggcgcccacgtcgaggccagccggacacttcttgnnnnnnnnnnnnnnnnnnnnnnnnnnnnnnnnnnnnnnnnnnnnnnnnnnnnnnnnnnnnnnnnnnnnnnnnnnnnnnnnnnnnnnnnnnnnnnnnnnnnnnnnnnnnnnnnnnnnnnnnnnnnnnnnnnnnnnnnnnnnnnnn

SEQ ID NO: 5285 - DNA, 1028 bp, Zea mays
  misc_feature (1)..(19): n is a, c, g, or t
  misc_feature (620)..(623): n is a, c, g, or t
  misc_feature (636)..(638): n is a, c, g, or t
  misc_feature (645)..(1028): n is a, c, g, or t
  Peptide Sequence Number=SeqID_12434
  Probeset Number=SeqID_19688
nnnnnnnnnnnnnnnnnnnagccactcccgctttcctctccccgcgccaccttggcatcatcattaccgacatatccagctgatcttcacctcccgctttcccgcccctcgatcgccggccggccgaaaccatccgtccatcaatccatgggctccaaacccgcgggcgcggcagggggccaagcagcaggcgaaggaggagtccatggcggacgtgtacagcggccacgagctgacgccgctgcagaagcacgccgccttcttcgacacgaacagggacggcatcatctacccctccgagacctaccaagggctgcgcgccatcggctgcggcgtcgtgctgtccgccgccggcaccgtcttcatcaacggcttcctcgcgtccaagacggtaccggcgaacgtgaagcccccagctttcaagttccccatctacgtgaagaccattcagcagagcaagcatgggagcgatacagacgtgtacgatacccagggcaggtttgttcctgaaaagtttgaggagatattcaagaagcatgcccacactaggcctgatgccctaacggacaaagagcctgggggagatgcttaaagcaaacagggatcctaaagatttcagnnnnacgggtgggcgcnnncgtagannnnnnnnnnnnnnnnnnnnnnnnnnnnnnnnnnnnnnnnnnnnnnnnnnnnnnnnnnnnnnnnnnnnnnnnnnnnnnnnnnnnnnnnnnnnnnnnnnnnnnnnnnnnnnnnnnnnnnnnnnnnnnnnnnnnnnnnnnnnnnnnnnnnnnnnnnnnnnnnnnnnnnnnnnnnnnnnnnnnnnnnnnnnnnnnnnnnnnnnnnnnnnnnnnnnnnnnnnnnnnnnnnnnnnnnnnnnnnnnnnnnnnnnnnnnnnnnnnnnnnnnnnnnnnnnnnnnnnnnnnnnnnnnnnnnnnnnnnnnnnnnnnnnnnnnnnnnnnnnnnnnnnnnnnnnnnnnnnnnnnnnnnnnnnnnnnnnnnnnnnnnnnnnnnnnnnnnnnnnnnnn

SEQ ID NO: 5286 - DNA, 1188 bp, Zea mays
  misc_feature (18)..(23): n is a, c, g, or t
  misc_feature (784)..(1188): n is a, c, g, or t
  Peptide Sequence Number=SeqID_12435
  Probeset Number=SeqID_19689
acttttcgctcgccgaannnnnnttccatgctccagcagcaggcaacctccaattttccattatagtattgctcccgctagggttccagccgcctccatggaatccgcggccgcctgtagatccttcaccagccgcctctttggaccgcctctcctcccgcagccgggagtgcttggtctcgggcgcgtctggccgcctgcgccgagggtttgagttattgcatgtggtggcaccaagcatgaggcgacaactgcattacttgcaaggaagttacaaaatctatgggtcatcataatcgtgactttctcgcaagttgtgcagttgctgtctcaagcttgctgactccgtttgccagaccgcaatgtgaaacaggaaatttagtcaggaaatgcctaaatgatccaataaatggttgaattgggccactcatgtcttcttaaatacgttcaaggaaattgggaacgtattcttaattttgagaacttgtttccagatgtaaaactttaatcggatatctctacactttaaagagtactagtggattaaggatacaagagtgcatcctaagttgcaatggttgtatccacggcaagaacaattatgtgtctacgagaacctccaattgatgcaccatgtgaagtcatgttgacatttttttttcttctctttggtaaggttatggaataaattttgtttcccctagtattgtgtgagtggtgtatatattcactaaacaaggttcttccattcctctgttcccatatgccgctgctgcaccatcannnnnnnnnnnnnnnnnnnnnnnnnnnnnnnnnnnnnnnnnnnnnnnnnnnnnnnnnnnnnnnnnnnnnnnnnnnnnnnnnnnnnnnnnnnnnnnnnnnnnnnnnnnnnnnnnnnnnnnnnnnnnnnnnnnnnnnnnnnnnnnnnnnnnnnnnnnnnnnnnnnnnnnnnnnnnnnnnnnnnnnnnnnnnnnnnnnnnnnnnnnnnnnnnnnnnnnnnnnnnnnnnnnnnnnnnnnnnnnnnnnnnnnnnnnnnnnnnnnnnnnnnnnnnnnnnnnnnnnnnnnnnnnnnnnnnnnnnnnnnnnnnnnnnnnnnnnnnnnnnnnnnnnnnnnnnnnnnnnnnnnnnnnnnnnnnnnnnnnnnnnnnnnnnnnnnnnnnnnnnnnnnnnnnnnnnnnnnnnnnnnnn

SEQ ID NO: 5287 - DNA, 1284 bp, Zea mays
  misc_feature (1)..(21): n is a, c, g, or t
  misc_feature (768)..(1284): n is a, c, g, or t
  Probeset Number=SeqID_19690
nnnnnnnnnnnnnnnnnnnnncaagctagctgctccgcactaaatcacttacgcacaagaagaagtcgagacgaagacgatgggatctctctccggcgtccttgcctttgccgtcctggcggcgctcgccgccggcggctcctgcgcctcaaacgtgccgcccggccccgacatcacggcggactacaaccaaccgtaccgtcccgccaaggccacctggtacggcctgcccaccggctccggccccgaagacaacggcggcgcgtgcgggatcaaggacgtgaacctgtctccctacaacggcctgatcgcctgcggcaacctccccatcttcaaggacggcaagggttgcggctcctgcttccagatcaggtgcaccaaccattcggcgtgctccaagaagccggtgggggtggtcatcaccgacatgaactacgagctcctctcgccgtatcgcttcgacctgtccggcaagtccttcggcgccatggccaagtcggggaaggagcaggagctccgcagcgccggcatgatcgacctgcagttcaggagggtgcggtgccagtacgcgcccggcaccaagatcgtcttccacgtggagaagggctcccacgccaactacctcgcagtgctggtgaagttcgtcgcccatgaaggcaccatcgtgcagatggagatcagggagaagaactccaagcagtggaagccgatgcagcactcgtggggagctatctggagggtggacagggtcgagccgctcgtgggccnnnnnnnnnnnnnnnnnnnnnnnnnnnnnnnnnnnnnnnnnnnnnnnnnnnnnnnnnnnnnnnnnnnnnnnnnnnnnnnnnnnnnnnnnnnnnnnnnnnnnnnnnnnnnnnnnnnnnnnnnnnnnnnnnnnnnnnnnnnnnnnnnnnnnnnnnnnnnnnnnnnnnnnnnnnnnnnnnnnnnnnnnnnnnnnnnnnnnnnnnnnnnnnnnnnnnnnnnnnnnnnnnnnnnnnnnnnnnnnnnnnnnnnnnnnnnnnnnnnnnnnnnnnnnnnnnnnnnnnnnnnnnnnnnnnnnnnnnnnnnnnnnnnnnnnnnnnnnnnnnnnnnnnnnnnnnnnnnnnnnnnnnnnnnnnnnnnnnnnnnnnnnnnnnnnnnnnnnnnnnnnnnnnnnnnnnnnnnnnnnnnnnnnnnnnnnnnnnnnnnnnnnnnnnnnnnnnnnnnnnnnnnnnnnnnnnnnnnnnnnnnnnnnnnnnnnnnnnnnnnnnnnnnnnnnnnnnnnnnnnnnnnnnnnnnnnnnnn

SEQ ID NO: 5288 - DNA, 795 bp, Zea mays
  misc_feature (1)..(8): n is a, c, g, or t
  misc_feature (10)..(14): n is a, c, g, or t
  misc_feature (635)..(636): n is a, c, g, or t
  misc_feature (683)..(683): n is a, c, g, or t
  misc_feature (698)..(700): n is a, c, g, or t
  misc_feature (731)..(732): n is a, c, g, or t
  misc_feature (754)..(759): n is a, c, g, or t
  misc_feature (766)..(767): n is a, c, g, or t
  misc_feature (770)..(786): n is a, c, g, or t
  Peptide Sequence Number=SeqID_12436
  Probeset Number=SeqID_19691
nnnnnnnnannnnngctagcaagcccacctagctcagccacaacccagtacactcttgctggctacttgtttcatcagcatagcaatggcgccctccaaggtcgccctcttcctcgccctgaacctggtcctcatggcagccgcgcatggctgcgggtcgtactgcggcaacacaccggccatcccagtgccaaccccgccgatggccatgcccccgcccgtcatcccagtcccaaccccgccgacgaccggaggcggcagcggcccctgctcgatcaacacgctgaagctgaaggcgtgcgccaacgtactgaacctgctaaagctcaacctcggcgtgccggcaagcgaggactgctgccccctgctgagcgggcttgccgacctcgaagccgccgtctgtctctgcaccgccatcaacgccaacgtcctcggcatcaagctcaacgtccctgtcgacctcgtgctcctcctcaaccagtgcggcaagacttgccccgccgacttcacctgccccagctgatccacccatcatccatcgatcgatgcatcacaaaccatgcatcgtcgtggccacactcgtcactggtttgcatgtcatacgcatgcagttacatattttgtttcctcttccnnttggtcgtcatcacactcgtcatttataagatactctcgttgatcantgcatttcgatatgnnntcatctaaatgcatggtttgcatattttgtnnaatgatatacatacttgtacannnnnntggaatnnaannnnnnnnnnnnnnnnngactgaacc

SEQ ID NO: 5289 - DNA, 795 bp, Zea mays
  misc_feature (1)..(187): n is a, c, g, or t
  misc_feature (782)..(786): n is a, c, g, or t
  misc_feature (788)..(795): n is a, c, g, or t
  Peptide Sequence Number=SeqID_12437
  Probeset Number=SeqID_19692
nnnnnnnnnnnnnnnnnnnnnnnnnnnnnnnnnnnnnnnnnnnnnnnnnnnnnnnnnnnnnnnnnnnnnnnnnnnnnnnnnnnnnnnnnnnnnnnnnnnnnnnnnnnnnnnnnnnnnnnnnnnnnnnnnnnnnnnnnnnnnnnnnnnnnnnnnnnnnnnnnnnnnnnnnnnnnnnnnnnnnnnnnnncatgcgtatgacatgcaaaccagtgacgagtgtggccacgacgatgcatggtttgtgatgcatcgatcgatggatgatgggtggatcagctggggcaggtgaagtcggcggggcaagtcttgccgcactggttgaggaggagcacgaggtcgacagggacgttgagcttgatgccgaggacgttggcgttgatggcggtgcagagacagacggcggcttcgaggtcggcaagcccgctcagcagggggcagcagtcctcgcttgccggcacgccgaggttgagctttagcaggttcagtacgttggcgcacgccttcagcttcagcgtgttgatcgagcaggggccgctgccgcctccggtcgtcggcggggttgggactgggatgacgggcgggggcatggccatcggcggggttggcactgggatggccggtgtgttgccgcagtacgacccgcagccatgcgcggctgccatgaggaccaggttcagggcgaggaagagggcgaccttggagggcgccattgctatgctgatgaaacaagtagccagcaagagtgtactgggttgtggctgagctaggtgggcttgctagcnnnnntnnnnnnnn

SEQ ID NO: 5290 - DNA, 952 bp, Zea mays
  misc_feature (13)..(17): n is a, c, g, or t
  misc_feature (360)..(360): n is a, c, g, or t
  misc_feature (362)..(362): n is a, c, g, or t
  misc_feature (601)..(952): n is a, c, g, or t
  Peptide Sequence Number=SeqID_12438
  Probeset Number=SeqID_19693
gcgacgccgcacnnnnnccatcgccgacgaaaccacggagcgcgcccacggcggataaatttgggcgcgggcgggaaggagacacgcgcggacgacgagagagaaaccccacagaccgctccaaaccccacccacgcccctcccctcccccaaaactccgccgccgccggtcgccatggagaggaagcaggccgactacagcaacctggacgagaggtacaccatccagggggagaggtaccagggccagcagtacagccacatctactacacccgcctccaccacatgcgcaccctcctccacgtcctcgtcccctcccggaagccgcacctccccgtcactacagtgcttggactcgnanaaggaaaagattgtgtgcttgttgggactttatacaagcacatgaaactgaagccttctattctcgatgaatactcaaaggagaggtcggcaatccctcttgttaagccacacaatttcatgcattctgatgataatcttattctggaagatgaaagtggaagagttgcacttgcaggagccatacctccagcagcttatgtgactggagttgtagtagctcttcatgggaaggaaacnnnnnnnnnnnnnnnnnnnnnnnnnnnnnnnnnnnnnnnnnnnnnnnnnnnnnnnnnnnnnnnnnnnnnnnnnnnnnnnnnnnnnnnnnnnnnnnnnnnnnnnnnnnnnnnnnnnnnnnnnnnnnnnnnnnnnnnnnnnnnnnnnnnnnnnnnnnnnnnnnnnnnnnnnnnnnnnnnnnnnnnnnnnnnnnnnnnnnnnnnnnnnnnnnnnnnnnnnnnnnnnnnnnnnnnnnnnnnnnnnnnnnnnnnnnnnnnnnnnnnnnnnnnnnnnnnnnnnnnnnnnnnnnnnnnnnnnnnnnnnnnnnnnnnnnnnnnnnnnnnnnnnnnnnnnnnnnnnnnnnnnnnnnnnnnn

SEQ ID NO: 5291 - DNA, 1011 bp, Zea mays
  misc_feature (1)..(9): n is a, c, g, or t
  misc_feature (11)..(17): n is a, c, g, or t
  misc_feature (701)..(701): n is a, c, g, or t
  misc_feature (724)..(726): n is a, c, g, or t
  misc_feature (745)..(752): n is a, c, g, or t
  misc_feature (757)..(757): n is a, c, g, or t
  misc_feature (762)..(762): n is a, c, g, or t
  misc_feature (766)..(769): n is a, c, g, or t
  misc_feature (772)..(773): n is a, c, g, or t
  misc_feature (778)..(1011): n is a, c, g, or t
  Peptide Sequence Number=SeqID_12439
  Probeset Number=SeqID_19694
nnnnnnnnnannnnnnngaccttcatatatacgaaggtgcaacagccacagtgctagcagctagcaatggcgtctagagcagcagcggccgccgtggtcatcctggccttggtgtgtgccgcgcagccgtccctctcggcggccactgccgccgggggtctgtcccctgacttccacgcgacgacgtgcccgtccctgcagcaaatcgtggcgttccacgtgggggaggccttcaagaacgactcaggcgtggcgccggccctcatccgcatcctcttccacgactgcttcccgcagggctgcgacgcgtcggtgctcatcgagggccccggcaccgagcaggacgagatccccaacaagacgctccgtagagtggcgctggacctcattgaccgcatccgtatgcgcgtgcacagcgcctgtagccgcacggtctcgtgcgccgacatcaccgtgctcgccacccgcgagtcgctcgtcctggccggcgggccccgcttcgacgtcgccctcggccggcgcgactccttcttcccggcgtccaaggaccaggtcggcctgctgccggcgcccttccacccggtggacaccctcatcaagtccttcggcgaccgcggcctgaacgtggcggacctggtgtccctctccggcgcgcacaccttcggggtcgcccactgcggggccttcagggaccggttcangccggtgttcgacacgagcccannnatcgaccccaagttcgccnnnnnnnngcggnacaantgcnnnnaannacatnnnnnnnnnnnnnnnnnnnnnnnnnnnnnnnnnnnnnnnnnnnnnnnnnnnnnnnnnnnnnnnnnnnnnnnnnnnnnnnnnnnnnnnnnnnnnnnnnnnnnnnnnnnnnnnnnnnnnnnnnnnnnnnnnnnnnnnnnnnnnnnnnnnnnnnnnnnnnnnnnnnnnnnnnnnnnnnnnnnnnnnnnnnnnnnnnnnnnnnnnnnnnnnnnnnnnnnnnnnnnnnnnnnnnnnnnn

SEQ ID NO: 5292 - DNA, 334 bp, Zea mays
  Peptide Sequence Number=SeqID_12440
  Probeset Number=SeqID_19695
gatccgcactgggatgcttttctccccccagaaaactaagaaatgtaatgtgtctttacgttgcacgaaacgcacgagcatgcctcgtagcagcgctagatcgaacagtatatcccgtcgcgatccagtcctctccttgaacgcgcacctctccacgagccaccaaagcaaattggcgaaaactctagagttcctctccttccaaatggtacaagagatgagatgcttatgggacaggagccaccagtccagtagcgatgtcgtgttggtcagtagcagatgctgcataccatcgatcctgacgcggccatcgatcgtgtagcccaggttttta

SEQ ID NO: 5293 - DNA, 334 bp, Zea mays
  Probeset Number=SeqID_19696
taaaaacctgggctacacgatcgatggccgcgtcaggatcgatggtatgcagcatctgctactgaccaacacgacatcgctactggactggtggctcctgtcccataagcatctcatctcttgtaccatttggaaggagaggaactctagagttttcgccaatttgctttggtggctcgtggagaggtgcgcgttcaaggagaggactggatcgcgacgggatatactgttcgatctagcgctgctacgaggcatgctcgtgcgtttcgtgcaacgtaaagacacattacatttcttagttttctggggggagaaaagcatcccagtgcggatc

SEQ ID NO: 5294 - DNA, 647 bp, Zea mays
  misc_feature (9)..(14): n is a, c, g, or t
  Peptide Sequence Number=SeqID_12441
  Probeset Number=SeqID_19697
ccggccggnnnnnnctccgctgcccttgccccccatttcgattcaggacccagcgaattctaacagaacccggcgtgtccatgtcatccgacccctccccatgcgagtctattaacagtctcctgccgctcttcccggccgggcggatgggacagtgtcgttgtcaggagggtcattccttcggataaccgttgcctcttcaacgctgtgggctacgtgatggagcacaaccgaaataaggcttctgagctcagacaggtcatagcagcaacagtcgctggtgatcctgagaaattcaatgaggtgtttcttggcaaaccaaatgaagcgtattgtgcttggattttggatcctggaaagtggggaggagccattgagctctctattctatccgaatactacgggcgtggaatcccagcatatgacattcaacccacccgttgggttctctatggccaggagaaaaaatttcggggaagggcccatgccctttaatgagggtttgcattatgatgctctccattgggccccgggggaaggggcccccgaaaaattttacccaaaaaattttcccccaaaaacaggggcggtctcttgggccccaaaaaaggcttcccccccccctttggggggggggcccaaaataa

SEQ ID NO: 5295 - DNA, 930 bp, Zea mays
  misc_feature (1)..(36): n is a, c, g, or t
  misc_feature (841)..(843): n is a, c, g, or t
  misc_feature (848)..(852): n is a, c, g, or t
  misc_feature (877)..(882): n is a, c, g, or t
  misc_feature (884)..(887): n is a, c, g, or t
  misc_feature (889)..(891): n is a, c, g, or t
  misc_feature (893)..(893): n is a, c, g, or t
  misc_feature (899)..(904): n is a, c, g, or t
  misc_feature (912)..(915): n is a, c, g, or t
  misc_feature (917)..(930): n is a, c, g, or t
  Peptide Sequence Number=SeqID_12442
  Probeset Number=SeqID_19698
nnnnnnnnnnnnnnnnnnnnnnnnnnnnnnnnnnnnaacgctctccgccctctctcgcccgcattccccaatccaatccgcggcggcatcggcggcgacaccaccaccaccgggaagctccgccccttctccgtctcccttcccgtcccctcccctcccctccagacgcgcccgaatcgcgccgcagatttcgccgccccgccgccccccgcgcctcccccgatttcggcggaacagccgctagggtttcgattcgccagggccggcgctcgggatcgggttcgggccctgaccgggggccgccttcgtcgtccgggggcacaatccgccgcccctcccccctgcttcctggcacggcaggagccatttccggggaaggatacggcaatggaggggcagatgttcggtggcggcaaatggggctcgtcgccctaccctggccccaacgccaacatcaacgccagtaacgagaatcagttcctgttcgatgccaaggccgcgccgcagcagcttcaactctttgggagcaactcagttggcaccagtggatattataactacaatggaaatgacaacccatatgttatgaaccaaccaagaaagacaagcaattgtacagcggatgaaaagaagctcaagcttcagatgtccttgaacaactttcatgcaggagatgccgaccggttggcatgtactggtaattcaagtgttgtgtctactgggctgaaattgtcctatgaggataatgagcataattcttccttcacgtctggtactggaagcatgtcttccttgacttcccgacaccttttggtcatgatattatgacagaaatggagannnggaannnnngagattgactattatttgagaagcnnnnnngnnnnannnantagggnnnnnnaagagatnnnncnnnnnnnnnnnnnn

SEQ ID NO: 5296 - DNA, 930 bp, Zea mays
  misc_feature (1)..(14): n is a, c, g, or t
  misc_feature (16)..(19): n is a, c, g, or t
  misc_feature (27)..(32): n is a, c, g, or t
  misc_feature (38)..(38): n is a, c, g, or t
  misc_feature (40)..(42): n is a, c, g, or t
  misc_feature (44)..(47): n is a, c, g, or t
  misc_feature (49)..(54): n is a, c, g, or t
  misc_feature (79)..(83): n is a, c, g, or t
  misc_feature (88)..(90): n is a, c, g, or t
  misc_feature (895)..(930): n is a, c, g, or t
  Peptide Sequence Number=SeqID_12443
  Probeset Number=SeqID_19699
nnnnnnnnnnnnnngnnnnatctcttnnnnnnccctantnnntnnnncnnnnnngcttctcaaataatagtcaatctcnnnnnttccnnntctccatttctgtcataatatcatgaccaaaaggtgtcgggaagtcaaggaagacatgcttccagtaccagacgtgaaggaagaattatgctcattatcctcataggacaatttcagcccagtagacacaacacttgaattaccagtacatgccaaccggtcggcatctcctgcatgaaagttgttcaaggacatctgaagcttgagcttcttttcatccgctgtacaattgcttgtctttcttggttggttcataacatatgggttgtcatttccattgtagttataatatccactggtgccaactgagttgctcccaaagagttgaagctgctgcggcgcggccttggcatcgaacaggaactgattctcgttactggcgttgatgttggcgttggggccagggtagggcgacgagccccatttgccgccaccgaacatctgcccctccattgccgtatccttccccggaaatggctcctgccgtgccaggaagcaggggggaggggcggcggattgtgcccccggacgacgaaggcggcccccggtcagggcccgaacccgatcccgagcgccggccctggcgaatcgaaaccctagcggctgttccgccgaaatcgggggaggcgcggggggcggcggggcggcgaaatctgcggcgcgattcgggcgcgtctggaggggaggggaggggacgggaagggagacggagaaggggcggagcttcccggtggtggtggtgtcgccgccgatgccgccgcggattggattggggaatgcgggcgagagagggcggagagcgttnnnnnnnnnnnnnnnnnnnnnnnnnnnnnnnnnnnn

SEQ ID NO: 5297 - DNA, 957 bp, Zea mays
  misc_feature (1)..(7): n is a, c, g, or t
  misc_feature (721)..(721): n is a, c, g, or t
  misc_feature (723)..(731): n is a, c, g, or t
  misc_feature (733)..(747): n is a, c, g, or t
  misc_feature (749)..(760): n is a, c, g, or t
  misc_feature (772)..(787): n is a, c, g, or t
  misc_feature (793)..(807): n is a, c, g, or t
  misc_feature (812)..(817): n is a, c, g, or t
  misc_feature (820)..(848): n is a, c, g, or t
  misc_feature (850)..(861): n is a, c, g, or t
  misc_feature (867)..(870): n is a, c, g, or t
  misc_feature (873)..(873): n is a, c, g, or t
  misc_feature (878)..(880): n is a, c, g, or t
  misc_feature (883)..(886): n is a, c, g, or t
  misc_feature (891)..(926): n is a, c, g, or t
  misc_feature (930)..(933): n is a, c, g, or t
  misc_feature (935)..(936): n is a, c, g, or t
  misc_feature (945)..(954): n is a, c, g, or t
  misc_feature (956)..(957): n is a, c, g, or t
  Peptide Sequence Number=SeqID_12444
  Probeset Number=SeqID_19700
nnnnnnnttccacacacgaatcaacttgcctacaagtaccacctccccgcctctgctatttgcagacccaagctataccaccaaggccacactccacagctcatagcaagcaagcattgaccaatctatcatggcgaggcttcagctttacgccatagcggcctgcgccgtcctcctcgccctcgccgccccctccctcgccggcgaccccgacatgctccaggacgtctgcgtcgccgacctggcatccccgatcaagatcaacgggttcccgtgcaaggccaacatcacggcggacgacttcttcttcgccggtctcaagaaggccggcaacaccaacaaccctgcaggttcgatcgtcacggcggccaacgtgcagtcattccccggggtgaacacgctcggcgtgtccatggcccgcatcgactacgcggtcggagggcagaacccgccgcacacccacccgcgcgccaccgagatcatcttcgtcaccaagggaaccctcgaggtgggcttcatcaccaccgccaacaagctcttcactaggttcgtcaccgtcggagaggtgttcgtcttcccgcgtggcctcgtgcacttccagcagaacaggggacatcgccccgcctccgtcatcgccgccttcaacagccagctccagggcacacaagccatcgccaccacactcttcgctgccacaccacagtgccaaccgacgtggtgnannnnnnnnncnnnnnnnnnnnnnnngnnnnnnnnnnnntggggaaggagnnnnnnnnnnnnnnnnccccgnnnnnnnnnnnnnnnagacnnnnnnagnnnnnnnnnnnnnnnnnnnnnnnnnnnnngnnnnnnnnnnnnggggannnnggnaacannngannnnatttnnnnnnnnnnnnnnnnnnnnnnnnnnnnnnnnnnnncatnnnntnncagtggtcnnnnnnnnnncnn

SEQ ID NO: 5298 - DNA, 851 bp, Zea mays
  misc_feature (1)..(2): n is a, c, g, or t
  misc_feature (7)..(10): n is a, c, g, or t
  misc_feature (832)..(832): n is a, c, g, or t
  misc_feature (835)..(836): n is a, c, g, or t
  misc_feature (841)..(846): n is a, c, g, or t
  misc_feature (851)..(851): n is a, c, g, or t
  Peptide Sequence Number=SeqID_12445
  Probeset Number=SeqID_19701
nncccgnnnntcagagattcctcatgctacatgtagactgacaaaaaccctaccaggatcatcatcaacttcccggcgcgacggaatggacgaagatcgattccggcgctgcagctcgaagacagcgaggcgtcgtctgcgcagcctcctcgtccttgccgcagactacctcaagtacctcttcacgaaccggcgccgactcctccacaaggtggcgaggcgtacccacgccgtcgtctcctcctaccacggcaagagcaacaagcgtctgccgccatactgccctcctcgcgcgttaatggagcacgagttctcgtgtagcgacagccctagccccgcgttccttgcggccaagagactccagtcacggctgaagcggggtgccgccgccagcgctgccgtctcttcctgctttggtgccaccgttggggcctcgtacgggtcgccaccggcgacacaggaggacgatgtggttgaggaggaagatgaggctgatgggtcggcctgctacgagcttgagcctgacgtggactacagggcggaggagttcatcaatatgttctatgagcagctcagggcgcagaactttcccccagttttgcaacgctcgccatgacgcgcgacgctgagacatgagagctgagagatcgagggcgtgcgtacgtcaggtacgtgtcaagaggagaggagtacgttcgtactttcgatgaggaaggacaggccagcttgtatcactttattttgatttctacatgagtgtttgtgacttgtaactaagtgtactacgtacacatgtgggctacggatatacctattgagtacaaataaatgntanntgcgnnnnnnttccn

SEQ ID NO: 5299 - DNA, 942 bp, Zea mays
  misc_feature (14)..(16): n is a, c, g, or t
  misc_feature (776)..(777): n is a, c, g, or t
  misc_feature (781)..(782): n is a, c, g, or t
  misc_feature (805)..(807): n is a, c, g, or t
  misc_feature (811)..(813): n is a, c, g, or t
  misc_feature (815)..(815): n is a, c, g, or t
  misc_feature (820)..(828): n is a, c, g, or t
  misc_feature (831)..(834): n is a, c, g, or t
  misc_feature (836)..(836): n is a, c, g, or t
  misc_feature (838)..(842): n is a, c, g, or t
  misc_feature (844)..(846): n is a, c, g, or t
  misc_feature (850)..(851): n is a, c, g, or t
  misc_feature (858)..(861): n is a, c, g, or t
  misc_feature (863)..(867): n is a, c, g, or t
  misc_feature (877)..(880): n is a, c, g, or t
  misc_feature (886)..(888): n is a, c, g, or t
  misc_feature (890)..(897): n is a, c, g, or t
  misc_feature (899)..(899): n is a, c, g, or t
  misc_feature (909)..(915): n is a, c, g, or t
  misc_feature (919)..(921): n is a, c, g, or t
  misc_feature (933)..(939): n is a, c, g, or t
  Peptide Sequence Number=SeqID_12446
  Probeset Number=SeqID_19702
gcgggccgggaaannngattagggtccttgcaccagttaagcttttgtgtaaaaggaacaccacacaaaccttagacaaagccccttttttggtacatcaactaccaagtattgagccatgaaggttgggagccagatgaagcagatggggaagctgaacaaggcgctcaaggagaagagggccaagctctacatcatccaccgctgcgtcgtcatgctcctccgctggagtgattgatccatccgtcgatctgttcgccgcagatcgatcggtgatcaatcgtttgtttcagccgatcagtcccttctgttttggatctttttttgccctgccgatgatgcattcggcagggttgcagattccagcggcatggccgatatgtagtgcatgcatggatgttattcattcatgatgcatgcattgcgctgcctatgttcgcattttaggagggattgatcggttgatgggttgagattttcatttccatttgtcttttcacttgcttctctggaggcaggggtgtgaggagaggacgccggaccactcagctacaaaggttgatgtgcttcctttctcttccacaaatggaaaaggttgatatagataccagttcatttcgttgctgggactccagttcaattggctacaaatgctggcgatgctgatcacacgcatgattctgaagaagatcgaagataagaagaagattaaataagacgctgatctcatggattattctgctgggatgttgcttttcgttctgatccttgtattnnaatnntgctgtccaggacatggtttctnnncttnnngntgtannnnnnnnngtnnnncncnnnnngnnnattnnatctttnnnntnnnnnaaaaataaannnnggggcnnngnnnnnnnnanttttactacnnnnnnnaaannnaaaaaaaaaaannnnnnnggg

SEQ ID NO: 5300 - DNA, 942 bp, Zea mays
  misc_feature (4)..(10): n is a, c, g, or t
  misc_feature (22)..(24): n is a, c, g, or t
  misc_feature (28)..(34): n is a, c, g, or t
  misc_feature (44)..(44): n is a, c, g, or t
  misc_feature (46)..(53): n is a, c, g, or t
  misc_feature (55)..(57): n is a, c, g, or t
  misc_feature (63)..(66): n is a, c, g, or t
  misc_feature (76)..(80): n is a, c, g, or t
  misc_feature (82)..(85): n is a, c, g, or t
  misc_feature (92)..(93): n is a, c, g, or t
  misc_feature (97)..(99): n is a, c, g, or t
  misc_feature (101)..(105): n is a, c, g, or t
  misc_feature (107)..(107): n is a, c, g, or t
  misc_feature (109)..(112): n is a, c, g, or t
  misc_feature (115)..(123): n is a, c, g, or t
  misc_feature (128)..(128): n is a, c, g, or t
  misc_feature (130)..(132): n is a, c, g, or t
  misc_feature (136)..(138): n is a, c, g, or t
  misc_feature (161)..(162): n is a, c, g, or t
  misc_feature (166)..(167): n is a, c, g, or t
  misc_feature (927)..(929): n is a, c, g, or t
  Probeset Number=SeqID_19703
cccnnnnnnntttttttttttnnntttnnnnnnngtagtaaaantnnnnnnnncnnngccccnnnntttatttttnnnnnannnnaaagatnnaatnnncnnnnngngnnnnacnnnnnnnnntacancnnnaagnnnagaaaccatgtcctggacagcannattnnaatacaaggatcagaacgaaaagcaacatcccagcagaataatccatgagatcagcgtcttatttaatcttcttcttatcttcgatcttcttcagaatcatgcgtgtgatcagcatcgccagcatttgtagccaattgaactggagtcccagcaacgaaatgaactggtatctatatcaaccttttccatttgtggaagagaaaggaagcacatcaacctttgtagctgagtggtccggcgtcctctcctcacacccctgcctccagagaagcaagtgaaaagacaaatggaaatgaaaatctcaacccatcaaccgatcaatccctcctaaaatgcgaacataggcagcgcaatgcatgcatcatgaatgaataacatccatgcatgcactacatatcggccatgccgctggaatctgcaaccctgccgaatgcatcatcggcagggcaaaaaaagatccaaaacagaagggactgatcggctgaaacaaacgattgatcaccgatcgatctgcggcgaacagatcgacggatggatcaatcactccagcggaggagcatgacgacgcagcggtggatgatgtagagcttggccctcttctccttgagcgccttgttcagcttccccatctgcttcatctggctcccaaccttcatggctcaatacttggtagttgatgtaccaaaaaaggggctttgtctaaggtttgtgtggtgttccttttacacaaaagcttaactggtgcaaggaccctaatcnnntttcccggcccgc

SEQ ID NO: 5301 - DNA, 1260 bp, Zea mays
  misc_feature (1)..(15): n is a, c, g, or t
  misc_feature (773)..(778): n is a, c, g, or t
  misc_feature (787)..(791): n is a, c, g, or t
  misc_feature (841)..(844): n is a, c, g, or t
  misc_feature (847)..(849): n is a, c, g, or t
  misc_feature (856)..(859): n is a, c, g, or t
  misc_feature (870)..(876): n is a, c, g, or t
  misc_feature (878)..(878): n is a, c, g, or t
  misc_feature (886)..(886): n is a, c, g, or t
  misc_feature (889)..(899): n is a, c, g, or t
  misc_feature (902)..(1260): n is a, c, g, or t
  Peptide Sequence Number=SeqID_12447
  Probeset Number=SeqID_19704
nnnnnnnnnnnnnnncgggccggaaaaattctcatctctcatctgaaccggtctgctgctctgcaagactgcaaccaagtctgtgcccacaagagtgtcccgatctcgacggccctcgctgacatcagcccatgaccaggtgaccaaacctaagctctcacggccatggcgagggcgaaggcaccgaggcggaagccgccgcaggcggtctcccgacggctcctcggattttgcgggctgagcttcgcggcggcgttgtacgtggggattgactacctgcggtacctctcgccgacatggcacaaccggctgcagccggtgctctgggcggcgctggcgctcgccgccgccgcgcgcgcaccgttctaccgccactgggatgtcgagctacgggcggtgcttcccttcctcggttccatcgtcttcatgctcagcgccttcctcatcgagatgatctccgtccgcttcgtctccgtcctgatggggctccagtggcacggatctgctgctccacttcctgacactggccaatgggtgcttctagctttgaatgagaagcttcctggaagtgttgttgatctattgagagctcatgttatcactcttcaccattatttgatgttatttatgatgttggggttctcagtgctgttcgattgcatcaaggcacctggtcttggaatagccacaagatatatgttcaccatggcagtcggacggttgcttcggacggcaacttttgttggtacaattcttccatctgcaagaccttnnnnnngctgcaggnnnnnatcaaatacctgggcaccctcatccctgggcgcaaaaaaatattatgttnnnnatnnnttctgannnnatgctatttcnnnnnnncntaggacantgnnnnnnnnnnngcnnnnnnnnnnnnnnnnnnnnnnnnnnnnnnnnnnnnnnnnnnnnnnnnnnnnnnnnnnnnnnnnnnnnnnnnnnnnnnnnnnnnnnnnnnnnnnnnnnnnnnnnnnnnnnnnnnnnnnnnnnnnnnnnnnnnnnnnnnnnnnnnnnnnnnnnnnnnnnnnnnnnnnnnnnnnnnnnnnnnnnnnnnnnnnnnnnnnnnnnnnnnnnnnnnnnnnnnnnnnnnnnnnnnnnnnnnnnnnnnnnnnnnnnnnnnnnnnnnnnnnnnnnnnnnnnnnnnnnnnnnnnnnnnnnnnnnnnnnnnnnnnnnnnnnnnnnnnnnnnnnnnnnnnnnnnnnnnnnnnnnnnnnnnnnnnnnnnnnn

SEQ ID NO: 5302 - DNA, 814 bp, Zea mays
  misc_feature (2)..(3): n is a, c, g, or t
  misc_feature (6)..(7): n is a, c, g, or t
  misc_feature (569)..(571): n is a, c, g, or t
  misc_feature (585)..(586): n is a, c, g, or t
  misc_feature (590)..(594): n is a, c, g, or t
  misc_feature (596)..(814): n is a, c, g, or t
  Peptide Sequence Number=SeqID_12448
  Probeset Number=SeqID_19705
cnncgnncgggcccttcccctcccagatccgatctccgccgccggtcgccggccggagcaccgccatggcgctcagcctccgcaagaagcagctcgatttgatcacgcggatgctccacctgaaccagcagcagccgtcgccggacggcggcggcggggaggacgatgaggaggcctacaagatcctggtgatggacgggccctgcatctcgctcctctcgccggtgctccgcgtcggcgacctccgcaagcacggcgtcaccctccacctcaacatcgacaaggcgcgccagcaggtcgccgacgcgcccgcggtctacctcgtccgccccacgcccgccaacgccgaccgcatcgccgccgacgccgccgcggggctctacgcctccttccacgtcaacttctccacctccctcccgaggcccgtcctcgaccgcctcgccgccgccaccgccgcgtcccgctccgcgcaccgcgtcgcccgcgtcgccgaccagtacctcgacttcgtctgcctcgaggacggcctcttctcgctcgcccagccgcgcgcctacgtcgccctcaannncccggccgccggcnnctcnnnnntnnnnnnnnnnnnnnnnnnnnnnnnnnnnnnnnnnnnnnnnnnnnnnnnnnnnnnnnnnnnnnnnnnnnnnnnnnnnnnnnnnnnnnnnnnnnnnnnnnnnnnnnnnnnnnnnnnnnnnnnnnnnnnnnnnnnnnnnnnnnnnnnnnnnnnnnnnnnnnnnnnnnnnnnnnnnnnnnnnnnnnnnnnnnnnnnnnnnnnnnnnnnnnnnnnnnnnnnnnn

SEQ ID NO: 5303 - DNA, 942 bp, Zea mays
  misc_feature (1)..(3): n is a, c, g, or t
  misc_feature (5)..(6): n is a, c, g, or t
  misc_feature (665)..(668): n is a, c, g, or t
  misc_feature (686)..(687): n is a, c, g, or t
  misc_feature (689)..(692): n is a, c, g, or t
  misc_feature (700)..(700): n is a, c, g, or t
  misc_feature (725)..(733): n is a, c, g, or t
  misc_feature (751)..(755): n is a, c, g, or t
  misc_feature (762)..(765): n is a, c, g, or t
  misc_feature (767)..(770): n is a, c, g, or t
  misc_feature (779)..(780): n is a, c, g, or t
  misc_feature (787)..(792): n is a, c, g, or t
  misc_feature (796)..(829): n is a, c, g, or t
  misc_feature (837)..(841): n is a, c, g, or t
  misc_feature (843)..(856): n is a, c, g, or t
  misc_feature (858)..(858): n is a, c, g, or t
  misc_feature (860)..(860): n is a, c, g, or t
  misc_feature (863)..(865): n is a, c, g, or t
  misc_feature (867)..(872): n is a, c, g, or t
  misc_feature (874)..(876): n is a, c, g, or t
  misc_feature (878)..(880): n is a, c, g, or t
  misc_feature (882)..(885): n is a, c, g, or t
  misc_feature (890)..(897): n is a, c, g, or t
  misc_feature (899)..(905): n is a, c, g, or t
  misc_feature (911)..(924): n is a, c, g, or t
  misc_feature (926)..(942): n is a, c, g, or t
  Peptide Sequence Number=SeqID_12449
  Probeset Number=SeqID_19706
nnnanngaatcttcggtttctacctacctaacgcccaggccccttgctgctccacgccggactcgccaccggaggaggagggccaagataaacaaaaccgaatccgaataaagccggcaagtcaatgcagttcgcgatcaccaccgccgtctccgcgaacccgcatctgaagcctctggtctccttcccgcggccgtcgcccccgcaccgggtccgagtccaccctccttgccaccgcctgaacacgagggcgagcgtcatggcctcctcgtcgccgctggagctcaccatcacgcgccccgacgactggcacctccacctccgtgacggcgacgtgatggccgcggtgctcccccacagcgcgaggcactttgagagagccatcgtgatgcccaacctgaagccaccggttactacaacggcacgtgcgatcgcgtacagagatgagatcctcaaggcgctgcctcccgggagcagcttcgtgccgctcatgacgctctacctcacggacaggactagcccggaggaaattaagatcgcaagaaagagtggtgtggtttttgctgtcaagttgtatcctgctggagcaactactaactcccaagatggcgtaactgatattttggggaaatgcttgcctgtccttgaagagatggtcaagcagnnnntgcctttacttgttcatnnannnnaatatatncctcatgtcgacacctttgaccgtnnnnnnnnnttcattgagaaaaatatnnnnncaaattnnnnannnncttctttanntgaaaannnnnnattnnnnnnnnnnnnnnnnnnnnnnnnnnnnnnnnnnttgtgacnnnnngnnnnnnnnnnnnnngncncannnannnnnntnnnannnannnnccttnnnnnnnngnnnnnnnatagannnnnnnnnnnnnngnnnnnnnnnnnnnnnnn

SEQ ID NO: 5304 - DNA, 782 bp, Zea mays
  misc_feature (3)..(3): n is a, c, g, or t
  misc_feature (689)..(691): n is a, c, g, or t
  misc_feature (701)..(703): n is a, c, g, or t
  misc_feature (715)..(717): n is a, c, g, or t
  misc_feature (728)..(731): n is a, c, g, or t
  misc_feature (743)..(750): n is a, c, g, or t
  misc_feature (759)..(759): n is a, c, g, or t
  misc_feature (761)..(779): n is a, c, g, or t
  Peptide Sequence Number=SeqID_12450
  Probeset Number=SeqID_19707
cgngccgggccggggctcataccttagcttggactgtttgccgtacgatgtcctcctcctcctccaccccagcctttccgccgcaagagggcgatgccgaaaccaacgaggagctctacgggcagttcaccgagctggcgtcctcctggccgtgctccgggggcctctccagggcgaaactgctctaccgccatgagaagggctggtacagcaccctgcctccgatggtcggcgcgatggtcgccgacgcacgcttcgccgcgcgcccctcggacatcgtcgtcgccaccatgcccaagtccggcaccacgtggatgaaggcgctcctctactccacggtccaccggagggagcacaccccgggcggccccggccacccgttcaactccctcggcccgcacgactgcgtccgccacctggagtaccagctctacacgcgcaacagggtcccggacctcgacgggctcccggacccgaggctcctcgccacgcacgtcccgctcgcgtcgctgccgaggtccgtcgccgcgtcggggtgccggatcgtgtacgtgtgccgcgaccccaaggacaccctggtctcgacgtggagcttcgtgaacaagttcagggccgaggacgggctggagccgatcccggtcgaggccgccgccggctacttctgcgacggcgtgtcggcgtccgggccnnnctgggaccannncctcgggtactnnngcgcgcacctnnnnaaccccgagcgnnnnnnnntcttccggnannnnnnnnnnnnnnnnnnncct

SEQ ID NO: 5305 - DNA, 414 bp, Zea mays
  Peptide Sequence Number=SeqID_12451
  Probeset Number=SeqID_19708
agtaatcacttatcttttatatatagaaccatgctgcatggctcaatggctgcattagttacagtctacaacatgcttgccctagagaacgcagcagcaatcctgaccattgtttcttttaacacagtaggcgccttcactcttgtggccctttatttggcagtaagcagcgcacacatcatttacgcagggtcccgaagttccatagcattgctcctttatccttccagggcagcagcctccggcttggcaagatgggaaggtaggcatggtcccaagaaccaagaacaaagcagcagccaggtacacgatcctagtacagatcttgattgacgatgccatggagacgggagaatgttgctaccgtttcgttttcctgatcagctgggctacttttggatgtatatttcgcat

SEQ ID NO: 5306 - DNA, 414 bp, Zea mays
  Peptide Sequence Number=SeqID_11921
  Probeset Number=SeqID_19709
atgcgaaatatacatccaaaagtagcccagctgatcaggaaaacgaaacggtagcaacattctcccgtctccatggcatcgtcaatcaagatctgtactaggatcgtgtacctggctgctgctttgttcttggttcttgggaccatgcctaccttcccatcttgccaagccggaggctgctgccctggaaggataaaggagcaatgctatggaacttcgggaccctgcgtaaatgatgtgtgcgctgcttactgccaaataaagggccacaagagtgaaggcgcctactgtgttaaaagaaacaatggtcaggattgctgctgcgttctctagggcaagcatgttgtagactgtaactaatgcagccattgagccatgcagcatggttctatatataaaagataagtgattact

SEQ ID NO: 5307 - DNA, 860 bp, Zea mays
  misc_feature (1)..(1): n is a, c, g, or t
  misc_feature (9)..(11): n is a, c, g, or t
  misc_feature (586)..(589): n is a, c, g, or t
  misc_feature (613)..(615): n is a, c, g, or t
  misc_feature (627)..(627): n is a, c, g, or t
  misc_feature (629)..(629): n is a, c, g, or t
  misc_feature (635)..(645): n is a, c, g, or t
  misc_feature (649)..(649): n is a, c, g, or t
  misc_feature (654)..(656): n is a, c, g, or t
  misc_feature (660)..(662): n is a, c, g, or t
  misc_feature (667)..(673): n is a, c, g, or t
  misc_feature (680)..(680): n is a, c, g, or t
  misc_feature (682)..(682): n is a, c, g, or t
  misc_feature (696)..(735): n is a, c, g, or t
  misc_feature (739)..(749): n is a, c, g, or t
  misc_feature (754)..(767): n is a, c, g, or t
  misc_feature (775)..(821): n is a, c, g, or t
  misc_feature (823)..(827): n is a, c, g, or t
  misc_feature (830)..(845): n is a, c, g, or t
  misc_feature (852)..(859): n is a, c, g, or t
  Peptide Sequence Number=SeqID_11922
  Probeset Number=SeqID_19710
ngggccggnnntttggcccatcggcatgcttctgtggggttgcgcaggtgaaggctgcatcgtgttctctctcttccattattcccatcgagccagccacctctcgtctgctcatggcgccgccacagccaacctccactacgatgcgcctgcgacggaagcgacgtccggggcgctagtccttttccactacggcggccaaaccacccggatccgggtcatcttccactctggcggccagatcagttcgagtttgggtaacaccagatctgccgaggacgcggtcctcgcccacggatctggccgggggaaatcattttcttcattgtttggccggtggagttgcaggcttccctcagcgtcacagagcaggaaatatgacgtgctggagaaccagccggcgccggacaaagcgagggattcgccggggtgcacgcgtgcatcaaagctaccggcgacagttcgttttggttgagagagcgtgctttccaagtgaataatctgaatgatagcacctctcactattttttctcttagctgtttgggtttgtgtctgaccatagctagtgagattattttttggctnnnnattctgaaatcccgatgaactatnnnccactgaatttncnataatnnnnnnnnnnnaccngatannnacannntgatnnnnnnntcatgcngnttgggctggtttgnnnnnnnnnnnnnnnnnnnnnnnnnnnnnnnnnnnnnnnnatannnnnnnnnnnatgcnnnnnnnnnnnnnnattatttnnnnnnnnnnnnnnnnnnnnnnnnnnnnnnnnnnnnnnnnnnnnnnntnnnnnctnnnnnnnnnnnnnnnntttattnnnnnnnnc

SEQ ID NO: 5308 - DNA, 860 bp, Zea mays
  misc_feature (2)..(9): n is a, c, g, or t
  misc_feature (16)..(31): n is a, c, g, or t
  misc_feature (34)..(38): n is a, c, g, or t
  misc_feature (40)..(86): n is a, c, g, or t
  misc_feature (94)..(107): n is a, c, g, or t
  misc_feature (112)..(122): n is a, c, g, or t
  misc_feature (126)..(165): n is a, c, g, or t
  misc_feature (179)..(179): n is a, c, g, or t
  misc_feature (181)..(181): n is a, c, g, or t
  misc_feature (188)..(194): n is a, c, g, or t
  misc_feature (199)..(201): n is a, c, g, or t
  misc_feature (205)..(207): n is a, c, g, or t
  misc_feature (212)..(212): n is a, c, g, or t
  misc_feature (216)..(226): n is a, c, g, or t
  misc_feature (232)..(232): n is a, c, g, or t
  misc_feature (234)..(234): n is a, c, g, or t
  misc_feature (246)..(248): n is a, c, g, or t
  misc_feature (272)..(275): n is a, c, g, or t
  misc_feature (850)..(852): n is a, c, g, or t
  misc_feature (860)..(860): n is a, c, g, or t
  Probeset Number=SeqID_19711
gnnnnnnnnaataaannnnnnnnnnnnnnnnagnnnnnannnnnnnnnnnnnnnnnnnnnnnnnnnnnnnnnnnnnnnnnnnnnnnaaataatnnnnnnnnnnnnnngcatnnnnnnnnnnntatnnnnnnnnnnnnnnnnnnnnnnnnnnnnnnnnnnnnnnnncaaaccagcccaancngcatgannnnnnnatcannntgtnnntatcnggtnnnnnnnnnnnattatngnaaattcagtggnnnatagttcatcgggatttcagaatnnnnagccaaaaaataatctcactagctatggtcagacacaaacccaaacagctaagagaaaaaatagtgagaggtgctatcattcagattattcacttggaaagcacgctctctcaaccaaaacgaactgtcgccggtagctttgatgcacgcgtgcaccccggcgaatccctcgctttgtccggcgccggctggttctccagcacgtcatatttcctgctctgtgacgctgagggaagcctgcaactccaccggccaaacaatgaagaaaatgatttcccccggccagatccgtgggcgaggaccgcgtcctcggcagatctggtgttacccaaactcgaactgatctggccgccagagtggaagatgacccggatccgggtggtttggccgccgtagtggaaaaggactagcgccccggacgtcgcttccgtcgcaggcgcatcgtagtggaggttggctgtggcggcgccatgagcagacgagaggtggctggctcgatgggaataatggaagagagagaacacgatgcagccttcacctgcgcaaccccacagaagcatgccgatgggccaaannnccggcccn

SEQ ID NO: 5309 - DNA, 818 bp, Zea mays
  misc_feature (1)..(6): n is a, c, g, or t
  misc_feature (8)..(9): n is a, c, g, or t
  misc_feature (682)..(684): n is a, c, g, or t
  misc_feature (721)..(721): n is a, c, g, or t
  misc_feature (723)..(725): n is a, c, g, or t
  misc_feature (733)..(734): n is a, c, g, or t
  misc_feature (736)..(736): n is a, c, g, or t
  misc_feature (745)..(745): n is a, c, g, or t
  misc_feature (750)..(758): n is a, c, g, or t
  misc_feature (760)..(768): n is a, c, g, or t
  misc_feature (774)..(777): n is a, c, g, or t
  misc_feature (781)..(787): n is a, c, g, or t
  misc_feature (792)..(794): n is a, c, g, or t
  misc_feature (796)..(818): n is a, c, g, or t
  Peptide Sequence Number=SeqID_11923
  Probeset Number=SeqID_19712
nnnnnnanntcaccaccaccaccacaggacgacccatccgaggagtgtgctcgatctaccaagaagaacgatccatggcgcggcaactcgttgctgcggtggccgctctggtggccgtgtgcgccctggcggcggccgccggcgtccaggcccagccgccgaggaagctgccgcccaactaccacatgatcagcccgggcaagttcgggcagaggagccagcagctgtcgtgcaaggacaccaacggcaggaaggcgggctgcatgggcaagtgcgacaagcgctgccccaaccagtgcatcgtcctctgccccagctgcaagacatactgcatgtgcgacttctacgccggcgtgtcctgcggtgacccgcgcttcaccggcggcgacggcaacaacttctacttccacggcaagaaggaccaggacttctgcatcgtctccgacgccgacctccacatcaacgcccacttcatcggcaagcgcaacccctccatgagccgcggcttcacctggatccaggccctcggcatccgcttcgcgcaccaccgtctcttcatgggagccaagaataccaccagctggaacggcgacgtcgaccacctcgagatgtccttcgacgatgcggccatcgagatcccgatcgaggtcggcgcacggtggcagtcggccgcggtgccagnnntgaccgtcacgaggaccgcggcgaccaacggagtgangnnncacctganngncgtgttcgncatcnnnnnnnnnannnnnnnnncatcannnngggnnnnnnncgcannncnnnnnnnnnnnnnnnnnnnnnnn

SEQ ID NO: 5310 - DNA, 293 bp, Zea mays
  Peptide Sequence Number=SeqID_11924
  Probeset Number=SeqID_19713
taacgcgttatcagcactttgctctctaccgagcggttctcccgacgtcgtccatggccgggcttcgcctggtgccatctccccgggcatcgttccgctctgtaccggggcatcggtccgtggtggcgcacacagggatgtgcccgtcgctgaagcacgtgaagcgaatgagcgatgcggatggccttctcagtctcacgtcgtctttttctcccgcggcgaggctgaacaacagcgcctccgtggctggagcaaccacgccgatggactgcatgggcacacgctcgtggatc

SEQ ID NO: 5311 - DNA, 293 bp, Zea mays
  Probeset Number=SeqID_19714
gatccacgagcgtgtgcccatgcagtccatcggcgtggttgctccagccacggaggcgctgttgttcagcctcgccgcgggagaaaaagacgacgtgagactgagaaggccatccgcatcgctcattcgcttcacgtgcttcagcgacgggcacatccctgtgtgcgccaccacggaccgatgccccggtacagagcggaacgatgcccggggagatggcaccaggcgaagcccggccatggacgacgtcgggagaaccgctcggtagagagcaaagtgctgataacgcgtta

SEQ ID NO: 5312 - DNA, 546 bp, Zea mays
  Peptide Sequence Number=SeqID_11925
  Probeset Number=SeqID_19715
cgttgctgtcggaccgaagggagtgtatccgggtcagaatttgtgaaggaagatttgcattgttgatacgagaggtatgcacgcttattttgttttcattatgcttctttcattctttgacatgaatctataacacattgccctttctcttcccttcaatattttgctagcctataagggaaggaaattttattatccagccaaaggttgattttgatattagtgccagtactgttgcagggcttcttaagcttggttaccaagctgttgcatatattgaagcttctgcggtgatttaccaagatggaaaggttattatgttccttaaccagtgtagctcttttttttatttagagaaaaggatgcatacttgcctaccactaaatggacaaagtcttttttatttttgtaaaagtctccctactcctgtgctattatgccattattgcttgcttgtacaaagatttatcctttagtattattgctgagtatgcatgattaaggcttaaataacttaggaattgtgaattttgctggcacatttcc

SEQ ID NO: 5313 - DNA, 546 bp, Zea mays
  Peptide Sequence Number=SeqID_11926
  Probeset Number=SeqID_19716
ggaaatgtgccagcaaaattcacaattcctaagttatttaagccttaatcatgcatactcagcaataatactaaaggataaatctttgtacaagcaagcaataatggcataatagcacaggagtagggagacttttacaaaaataaaaaagactttgtccatttagtggtaggcaagtatgcatccttttctctaaataaaaaaaagagctacactggttaaggaacataataacctttccatcttggtaaatcaccgcagaagcttcaatatatgcaacagcttggtaaccaagcttaagaagccctgcaacagtactggcactaatatcaaaatcaacctttggctggataataaaatttccttcccttataggctagcaaaatattgaagggaagagaaagggcaatgtgttatagattcatgtcaaagaatgaaagaagcataatgaaaacaaaataagcgtgcatacctctcgtatcaacaatgcaaatcttccttcacaaattctgacccggatacactcccttcggtccgacagcaacg

SEQ ID NO: 5314 - DNA, 713 bp, Zea mays
  misc_feature (605)..(607): n is a, c, g, or t
  misc_feature (622)..(624): n is a, c, g, or t
  misc_feature (626)..(628): n is a, c, g, or t
  misc_feature (633)..(645): n is a, c, g, or t
  misc_feature (647)..(647): n is a, c, g, or t
  misc_feature (651)..(652): n is a, c, g, or t
  misc_feature (656)..(659): n is a, c, g, or t
  misc_feature (664)..(679): n is a, c, g, or t
  misc_feature (686)..(691): n is a, c, g, or t
  misc_feature (693)..(694): n is a, c, g, or t
  misc_feature (696)..(710): n is a, c, g, or t
  misc_feature (713)..(713): n is a, c, g, or t
  Peptide Sequence Number=SeqID_11927
  Probeset Number=SeqID_19717
gttggatcctgtttttgttttcaaaaatccagggttttgttcacaatcatgcatcaggatttgcaccaaaatgaatccatccctgcttcaaggcactaatgcggggcttgccgcgccctggacgcccgcgccgctggccggccacgaccgcttcgcctaccagcccatcacggagcgcgcggactacgcctggccgaatggcgcgcggctggccgtctacctggggttcaacatcgagcatttcgcttttggcgaggggctgggcgccgagctgggcccggcctcgccgcacccggacgtgctcaattacgcctggcgcgagtacggcaaccgggtcggcgcgtggcgctgcctggaactgtttgacgcgttggggctgcccgcgggggcgctgatcaacaccgcgctgtatgaccattgccccgagctggtggacgcctgcctggcgcgtggcgatgagctgatcggccacggttacagcaacgcgcatcggcagggagggctgggcgaggccgaggaaagggcgctgctggaacattgccgcgaccgcatcggccgccacgccggcagcgccccgaccggctggctgtcgccctggatttcannntgccgcgcaaccccnnncnnnctggnnnnnnnnnnnnntnctcnncacnnnnaactnnnnnnnnnnnnnnnnccctacnnnnnngnnannnnnnnnnnnnnnnctn

SEQ ID NO: 5315 - DNA, 946 bp, Zea mays
  misc_feature (1)..(1): n is a, c, g, or t
  misc_feature (3)..(5): n is a, c, g, or t
  misc_feature (9)..(23): n is a, c, g, or t
  misc_feature (26)..(31): n is a, c, g, or t
  misc_feature (37)..(39): n is a, c, g, or t
  misc_feature (41)..(42): n is a, c, g, or t
  misc_feature (47)..(49): n is a, c, g, or t
  misc_feature (51)..(51): n is a, c, g, or t
  misc_feature (54)..(58): n is a, c, g, or t
  misc_feature (60)..(68): n is a, c, g, or t
  misc_feature (70)..(72): n is a, c, g, or t
  misc_feature (75)..(76): n is a, c, g, or t
  misc_feature (78)..(79): n is a, c, g, or t
  misc_feature (86)..(87): n is a, c, g, or t
  misc_feature (90)..(90): n is a, c, g, or t
  misc_feature (93)..(96): n is a, c, g, or t
  misc_feature (111)..(111): n is a, c, g, or t
  misc_feature (114)..(116): n is a, c, g, or t
  misc_feature (139)..(139): n is a, c, g, or t
  misc_feature (942)..(946): n is a, c, g, or t
  Peptide Sequence Number=SeqID_11928
  Probeset Number=SeqID_19718
ntnnngggnnnnnnnnnnnnnnncannnnnngccccnnntnnagcgnnntncgnnnnntnnnnnnnnnannnggnnanncaataannagnagnnnngtcccatgaaaaagnccnnncccgctcctcgaagacctcaagncgattctgccgaccatcgctgccaatgccttccaggccgagcaggaccgcaaggttcccgacgagaacattgcgctgctcaagagcatcggcatgcaccgtgcctttcaacccaaaccctttggcggcatggaaatctcgctgccgcagtttgccgactgcatcgccttgctcgccggcgcctgtgccagcaccgcctgggccatgagcctgttgtgcacccacagccatcaactggcgctgttttccgccaagctgcagcaggaagtctgggacgataacccgaacgccacggccagtagcagcatcgcgccgtttggccgcactgaagaagttgaagggggtgtgctgttcagcggtgaaatgggctggagcagcggttgcgatcacgccgagtgggcgattgtcggttttcgtcgtaaaaacgccgaaggctctcaggattactgctttgcggtgctgccgcgcagcgattatcagattcgtgatgactggttcgccgccggcatgaagggcagcggcaccaagaccctgatcatcgacaacgtgcgggtgcccgaacatcgcatccagaaagccaaggacatgatggaaggcaagtccgccggtttcggtttgtaccctgacagcaagattttctactcgccgtaccgtccgtatttcgccagcggtttctccaccgtcagcctgggggtggccgagcgcatgcttgaggtgttccgcgaaaaaaccaagacccgcgtacgtgcctacaccggcgcggcggtgggggctgcgaccccggcgttgatgcgcctggcggannnnn

SEQ ID NO: 5316 - DNA, 928 bp, Zea mays
  misc_feature (1)..(8): n is a, c, g, or t
  misc_feature (12)..(25): n is a, c, g, or t
  misc_feature (27)..(36): n is a, c, g, or t
  misc_feature (39)..(39): n is a, c, g, or t
  misc_feature (41)..(41): n is a, c, g, or t
  misc_feature (43)..(49): n is a, c, g, or t
  misc_feature (55)..(56): n is a, c, g, or t
  misc_feature (58)..(60): n is a, c, g, or t
  misc_feature (63)..(63): n is a, c, g, or t
  misc_feature (68)..(68): n is a, c, g, or t
  misc_feature (78)..(80): n is a, c, g, or t
  misc_feature (85)..(86): n is a, c, g, or t
  misc_feature (97)..(99): n is a, c, g, or t
  misc_feature (101)..(102): n is a, c, g, or t
  misc_feature (924)..(928): n is a, c, g, or t
  Peptide Sequence Number=SeqID_11929
  Probeset Number=SeqID_19719
nnnnnnnntaannnnnnnnnnnnnnannnnnnnnnnagngncnnnnnnngccgtnncnnncgncgtcntccatcgagnnntaatnngccgaacgcannngnnaggagcatgcccgggtctgcgcggacacacgtccgccgggtctgctgcggcgcctggggttatggcgcgatgagcggttggtgcgccgcgcgctgaaaatcgccggcgagccggggctgatcctcgacctggcatgcggtaccgggcggttttggccagtgctggccgagcacagcaaccgggtgatcctcgcgtcggacaactcccaggacatgctcgaccacgcccgcactcaccacgcgccgggcttgctcaagcggatcaagaccttccagggctcggcgttttccatcggcctgtcggccaacgcggtggattgcattttttgcctggagttgtttcgccatgtgcccacgccagaagggcgcctggccctgctcggggagtttcaccgggtgagccgtgacacggtgatcgtctcggtcaacagtgacagcggctaccgggctgtgcagcccgcactggcggcagttgccagccatcgggcgcaggtggaagcggagtttcgccaggccggtttcaaggtcctcaatcaacaggaattcctgcccggctcggccatgtggcgcgtgtacgtcctgcgtaagagaggataagcaccggctgtcggactattcttcagctcctgtaagagttttcatggcggatgctgtactgcgaatgctcgcaactccctttcgcgatatatactgcgcgccattcttcaagggagagccgtgtggccatcgatattcactggatctgcgacaacgatagcctcggccagcactgcgccgaatggcagcagttgccattcgtcgccctcgacaccgaattcatgcnnnnn

SEQ ID NO: 5317 - DNA, 1056 bp, Zea mays
  misc_feature (1)..(1): n is a, c, g, or t
  misc_feature (6)..(13): n is a, c, g, or t
  misc_feature (15)..(15): n is a, c, g, or t
  misc_feature (23)..(26): n is a, c, g, or t
  misc_feature (795)..(800): n is a, c, g, or t
  misc_feature (802)..(804): n is a, c, g, or t
  misc_feature (823)..(826): n is a, c, g, or t
  misc_feature (847)..(847): n is a, c, g, or t
  misc_feature (855)..(860): n is a, c, g, or t
  misc_feature (865)..(866): n is a, c, g, or t
  misc_feature (868)..(868): n is a, c, g, or t
  misc_feature (870)..(873): n is a, c, g, or t
  misc_feature (882)..(883): n is a, c, g, or t
  misc_feature (885)..(887): n is a, c, g, or t
  misc_feature (889)..(895): n is a, c, g, or t
  misc_feature (897)..(901): n is a, c, g, or t
  misc_feature (903)..(908): n is a, c, g, or t
  misc_feature (913)..(913): n is a, c, g, or t
  misc_feature (915)..(915): n is a, c, g, or t
  misc_feature (917)..(940): n is a, c, g, or t
  misc_feature (942)..(943): n is a, c, g, or t
  misc_feature (945)..(972): n is a, c, g, or t
  misc_feature (975)..(998): n is a, c, g, or t
  misc_feature (1002)..(1051): n is a, c, g, or t
  misc_feature (1056)..(1056): n is a, c, g, or t
  Peptide Sequence Number=SeqID_11930
  Probeset Number=SeqID_19720
ngtccnnnnnnnncngggtcgannnntggccgacttgtgtgtgttggccaccccgcatatcgccggctacagcctggacggcaggcagcgcggtacggcgcagatctaccaggcgttatgccggtatcttggccaggaggcgatcattcaactcagcgacttgctgccggagccgtggttggccgaagttaccctcaacgccaataccgacccggcctgggcgctggcggccctgtgccgtggcgtttacgacccgcgccgtgatgacgcggattttcgccgcagcctggtaggcaccgtggacgagcagcgcaaggcgtttgatcaactgcgcaagctctacccgccgcggcgcgagattgagggtttgaaggtgcgaatcagcggcgactctgcggccttgtctaacatcgtggcggcattgggcgcgcaggcaatctgaaggcataaaaaacccggccatcaaggccgggtttaaaagagcgtgggcgattcagcctcgcttggcaggcttgaccaatttctgttccagttcggcgcaggcgctctggatcatctcttcggtgatttgcacttcgcggccttgagcgtcgatgtacgagcaaggcaactgctgcggctggcggatcacttcaatcttggcattgctgctgttttgcaaggacatggcccgtctcctcatcaggttgtgtacctattgtaaaatcaccgcgtgaccgcgttgttacaactcctttcacggtcagcagatcgaatgcccagtccagcagaaaccgatacaaatttccagccggnnnnnngnnngatagcctctagggcctannnnccggtaagcataattaacctnactcattnnnnnntcgcnnangnnnncccccatgnngnnntnnnnnnncnnnnntnnnnnncctcncngnnnnnnnnnnnnnnnnnnnnnnnncnncnnnnnnnnnnnnnnnnnnnnnnnnnnnncgnnnnnnnnnnnnnnnnnnnnnnnngggnnnnnnnnnnnnnnnnnnnnnnnnnnnnnnnnnnnnnnnnnnnnnnnnnnggggn

SEQ ID NO: 5318 - DNA, 420 bp, Zea mays
  misc_feature (418)..(420): n is a, c, g, or t
  Peptide Sequence Number=SeqID_11931
  Probeset Number=SeqID_19721
ggcctggtgcagtcccagcaaggcagcatcgcggcgttggcctcggagatcgatcaatcggtgcgggtgatcaaccagttggccatcgacagccaatccatcagtcgcgtgctggaagtgatcaagagcatcgccgaacagaccaatttgctggcgctgaatgccgccattgaggccgcgcgtgccggtgagcaaggacgcggtttcgccgtggtagccgatgaggtgcgcactttggcccggcgtactcagcactccaccgaggaaatcgagcagatgattgccaagctccacagtggcgtcggcgcagcggtgaaggccatgggcaccagccacgagatggccaatggcacggtggggcagtcggagaaagtccagcaggccctggaaaatatcctcggcgcagtaggcatgatcnnn

SEQ ID NO: 5319 - DNA, 790 bp, Zea mays
  misc_feature (1)..(14): n is a, c, g, or t
  misc_feature (16)..(28): n is a, c, g, or t
  misc_feature (30)..(76): n is a, c, g, or t
  misc_feature (79)..(92): n is a, c, g, or t
  misc_feature (94)..(95): n is a, c, g, or t
  misc_feature (97)..(98): n is a, c, g, or t
  misc_feature (100)..(105): n is a, c, g, or t
  misc_feature (111)..(117): n is a, c, g, or t
  misc_feature (119)..(123): n is a, c, g, or t
  misc_feature (128)..(132): n is a, c, g, or t
  misc_feature (137)..(137): n is a, c, g, or t
  misc_feature (144)..(147): n is a, c, g, or t
  misc_feature (154)..(156): n is a, c, g, or t
  misc_feature (165)..(168): n is a, c, g, or t
  misc_feature (192)..(192): n is a, c, g, or t
  misc_feature (194)..(194): n is a, c, g, or t
  misc_feature (209)..(210): n is a, c, g, or t
  Peptide Sequence Number=SeqID_11932
  Probeset Number=SeqID_19722
nnnnnnnnnnnnnngnnnnnnnnnnnnngnnnnnnnnnnnnnnnnnnnnnnnnnnnnnnnnnnnnnnnnnnnnnnnatnnnnnnnnnnnnnnanncnngnnnnnnaaggtnnnnnnngnnnnngaccnnnnnaaacngcgctannnngcgcggnnntccctcggnnnnattccatagaagcgcggccgtccnancaagcgctcgcagtnnccgcaagcatccggcataaccataaatggagacaaccatgacccccatgccccggatttcgcagcaacgcagcacccccaatccgcgtctcgcacgcgccctcgtcgcgctgaccgcggtcgccggcctgtccctcggcggccccgcccaggcccagaccgcccccgccgccatctccgacgatatcgtccgcctcggcctgatcctggacatgagcggcatctacgccgacgtgaccggcaagggcagcgccaccgccgcgcagatggccatcgacgacttcggcggcaccgtgctcggcaagaagatcgacctgctggtggccgaccaccagaacaaggccgacatcgccgcggcccgcgcccgcgagtggtacgacacgcagaaggtggacgccatcatggacgtggccggctcggccccggcgctggcggtgctggaagtggcgcgcgagaaaaagaagatcgtggtcttcagcggccccggcaccgagcgcatcaccaacgacctgtgctcgccctattcggtgcactacacctatgacacctggtcgctggccaacaccaccgcccgcgccacc

SEQ ID NO: 5320 - DNA, 892 bp, Zea mays
  misc_feature (1)..(4): n is a, c, g, or t
  misc_feature (774)..(774): n is a, c, g, or t
  misc_feature (776)..(776): n is a, c, g, or t
  misc_feature (798)..(802): n is a, c, g, or t
  misc_feature (809)..(809): n is a, c, g, or t
  misc_feature (811)..(811): n is a, c, g, or t
  misc_feature (817)..(822): n is a, c, g, or t
  misc_feature (835)..(835): n is a, c, g, or t
  misc_feature (840)..(840): n is a, c, g, or t
  misc_feature (842)..(842): n is a, c, g, or t
  misc_feature (844)..(845): n is a, c, g, or t
  misc_feature (847)..(850): n is a, c, g, or t
  misc_feature (855)..(867): n is a, c, g, or t
  misc_feature (871)..(871): n is a, c, g, or t
  misc_feature (873)..(876): n is a, c, g, or t
  misc_feature (879)..(881): n is a, c, g, or t
  misc_feature (892)..(892): n is a, c, g, or t
  Peptide Sequence Number=SeqID_11933
  Probeset Number=SeqID_19723
nnnngggtgtgccctttgagttctggcaaggcgatgccgatgtgcagcgctggctggtgcgactgggctggtgcgaagagggcgcggtgccggtattcgaggagggcgctttactgggcgcggcgaggggattgcgggaagtgatccggctgttgctggagcaacgcaaggccggccagcagggtgatcctgctgcgttgaatgcatttttgcgcaaggccgtcagccatccgcagctggtttggccggcgccgggcgagttgcgcctggagcgccagcgcaaacagcaaaccgctgagcagttcctggcaccgatcgccgaagccgcggcgacgttgctggtggaaggggatttcggtttgatccgcacctgcgaacaccccgagtgcgtgctgtggttctacgaccggaccaagggccacaagcgccgctggtgcagcatggcgctgtgtggcaaccggcataaggtggccgagtttcgcaagcgcaaactcttgtagcggtcgtcaggcaccggccgggctttcgcgctcgagcaactgccgcttgcgctcaacgccccagcggtagcccgatagattaccgtcggcgcgcaccacccgatggcagggaatcgccacggccaggctgttggcaccgcacgcctgggccacggcgcgataggcggtcggggcgccgatgcgctgggcaatctctgcatagctggcggtgcaacccaccgggatttctcgcaaggcctgccagacccgttcctgaaacgcagtgccgcgcagntncaggggcaagttcaggcccagnnnnngcgcctngntaaagnnnnnnacttgggcgatcnattgntngnngnnnngatcnnnnnnnnnnnnnttgncnnnnggnnnctgatcctgcn

SEQ ID NO: 5321 - DNA, 916 bp, Zea mays
  misc_feature (1)..(1): n is a, c, g, or t
  misc_feature (9)..(42): n is a, c, g, or t
  misc_feature (48)..(57): n is a, c, g, or t
  misc_feature (61)..(68): n is a, c, g, or t
  misc_feature (71)..(71): n is a, c, g, or t
  misc_feature (76)..(78): n is a, c, g, or t
  misc_feature (89)..(89): n is a, c, g, or t
  misc_feature (95)..(99): n is a, c, g, or t
  misc_feature (111)..(111): n is a, c, g, or t
  misc_feature (115)..(118): n is a, c, g, or t
  misc_feature (124)..(125): n is a, c, g, or t
  misc_feature (138)..(139): n is a, c, g, or t
  misc_feature (142)..(142): n is a, c, g, or t
  misc_feature (150)..(153): n is a, c, g, or t
  misc_feature (187)..(188): n is a, c, g, or t
  misc_feature (910)..(916): n is a, c, g, or t
  Peptide Sequence Number=SeqID_11934
  Probeset Number=SeqID_19724
ncaaagtgnnnnnnnnnnnnnnnnnnnnnnnnnnnnnnnnnntttggnnnnnnnnnncaannnnnnnnccnggctnnncacttttcgcnaactgnnnnnctccatcacgcncatnnnnaccctnngcggacagcgggnncancgacgaannnnagacccaggaagagatcgaccgactgcgtcacgnntggggcctggcgtcgccgcaaaacgattggctgtcacgcctgggcgtcgataccgaactggacctgttcgaccagttgcaactcaacgccgtgatcgaaacatgcctccagtccgacagcatttccgatgccggacgacgcctgttcggtgtttcccgacaagccaaggcgcaaccaaacgatgccgaccgactacgcaaatacctggcgaggttttcgattgagtggaaacagttggcggagttgaagggctgacggatacctagagcgcagcagcctggccttgtgccgcctgaaacaacgcatcggcagtctcctgaatttcttcacgctgccacaccttgcccaaccactcgattggaatgccctgcacgccgtaatacgcaccagccaactgacccacgatcgccgcagtagtgtcggcgtcatcccccaggtttgccgcagccagcacggcctcggcaaagctgttggtgtgataaaaacaccatagcgcagcttcaagcgaagccaccgcgtaaccagaaccaacgatgtcgctgcgcgccttatcgaggtagtgcccatcagcaatgtccacaactttgggttcgctcaagtccagatagtcaacctttagtacctgcgctttcgaatccccacgcagcgcattggaaatacactccgccagcaccaggcagcactcaatcgcctccaacgcgccatgagtagtgcgggaactnnnnnnn

SEQ ID NO: 5322 - DNA, 676 bp, Zea mays
  misc_feature (1)..(40): n is a, c, g, or t
  misc_feature (51)..(54): n is a, c, g, or t
  misc_feature (62)..(62): n is a, c, g, or t
  misc_feature (64)..(66): n is a, c, g, or t
  misc_feature (104)..(105): n is a, c, g, or t
  misc_feature (659)..(660): n is a, c, g, or t
  misc_feature (662)..(666): n is a, c, g, or t
  misc_feature (669)..(672): n is a, c, g, or t
  misc_feature (676)..(676): n is a, c, g, or t
  Peptide Sequence Number=SeqID_11947
  Probeset Number=SeqID_19725
nnnnnnnnnnnnnnnnnnnnnnnnnnnnnnnnnnnnnnnnacgtgagctgnnnnaaagagtncnnngatgttcaagagtgacatgaccctgcaggagcgagctnnctcgctcctgcagaagctctaagctaattccataaaattatttattttattttttatagatcaatatcatctaactgagttgacccttggagagccggagtccgcgctgctcaagtcttatccgctcaggaatctataaaaatgaacacgctgaaactggcccgcaacctcctctcggccatgggcctcgctgtcctctccctaagcgctcaatccgctgacctcaccatcggctacatcaacggcatcgacccgatcaaacgcgccatcgccgatggtgaatatgaaaaaggtatcggccagaagatcgattggcgcaaattcgacgcgggcccggccgtcctggccgccatggcttccggtgatgtgcagatcggcaacctgggttccagcccattggctgcggcggcttcgcgaaacatgccgctggtggcgttcattgtcagcgcgcagattcgcagttccgaggccctggtggttcgcgacggcagcgggatcaagacccctgatgacctgatcggcaaaaccattgccgtaccctttgtggtttgccnncnnnnntcnnnnaccn

SEQ ID NO: 5323 - DNA, 743 bp, Zea mays
  misc_feature (1)..(2): n is a, c, g, or t
  misc_feature (4)..(8): n is a, c, g, or t
  misc_feature (11)..(40): n is a, c, g, or t
  misc_feature (44)..(47): n is a, c, g, or t
  misc_feature (51)..(54): n is a, c, g, or t
  misc_feature (65)..(69): n is a, c, g, or t
  misc_feature (71)..(71): n is a, c, g, or t
  misc_feature (73)..(79): n is a, c, g, or t
  misc_feature (85)..(97): n is a, c, g, or t
  misc_feature (99)..(101): n is a, c, g, or t
  misc_feature (110)..(110): n is a, c, g, or t
  misc_feature (120)..(121): n is a, c, g, or t
  Peptide Sequence Number=SeqID_11948
  Probeset Number=SeqID_19726
nngnnnnnttnnnnnnnnnnnnnnnnnnnnnnnnnnnnnncggnnnngcgnnnngaacggcaatnnnnncnannnnnnnaaaggnnnnnnnnnnnnntnnnctttcctcncccttccgtnncggcgcccggcccgccgccgcgcgctggcgctacgccgcatgcctgccgctgatcctgctgggcgcccaggcgctggccgcgccgcagccgtgcgaagcgccgccgcccggcccgcgcgacctggaaggcaccggctactacaccgacgccgcccactcgcagatcgaccccgcgctgcaggcccgcaaccaggcccagacccggccgctgaacgactacgcccgccgcgtcgccgacctttccgacgcctacctggcccacggcgacgccgccgccggccaatgcgcgctgacgtggctggcatcctgggccaaggacggcgccatgctcggccgcatgatccacggcaacaacgaccaggccgactacctgcgccaatggacccatggcgccgccgccctggcctatctgaagacgctgccgctggccacgccggcgcaacgcggcctcatcgggccctggctcgaacagctgtcgcgcgccaacctggcctactgggaagacccccggcaccagcgcaacaaccattactactggaccggcgtcggcatcctggccaccgccatcgccaacgacgacgccggcctgcgccgcggcgcgcaggcgatctaccggaaaggc

SEQ ID NO: 5324 - DNA, 575 bp, Zea mays
  misc_feature (1)..(2): n is a, c, g, or t
  misc_feature (4)..(24): n is a, c, g, or t
  misc_feature (26)..(108): n is a, c, g, or t
  misc_feature (116)..(119): n is a, c, g, or t
  misc_feature (122)..(126): n is a, c, g, or t
  misc_feature (134)..(134): n is a, c, g, or t
  misc_feature (145)..(147): n is a, c, g, or t
  misc_feature (149)..(153): n is a, c, g, or t
  misc_feature (158)..(159): n is a, c, g, or t
  misc_feature (161)..(161): n is a, c, g, or t
  misc_feature (173)..(173): n is a, c, g, or t
  misc_feature (175)..(176): n is a, c, g, or t
  misc_feature (180)..(184): n is a, c, g, or t
  misc_feature (204)..(205): n is a, c, g, or t
  misc_feature (222)..(227): n is a, c, g, or t
  misc_feature (229)..(229): n is a, c, g, or t
  misc_feature (572)..(575): n is a, c, g, or t
  Peptide Sequence Number=SeqID_11949
  Probeset Number=SeqID_19727
nntnnnnnnnnnnnnnnnnnnnnncnnnnnnnnnnnnnnnnnnnnnnnnnnnnnnnnnnnnnnnnnnnnnnnnnnnnnnnnnnnnnnnnnnnnnnnnnnnnnnnnnnnagccatcnnnngtnnnnncagttcgncctagacgccnnngnnnnncgcgnncngcgctcgttgcngnncgcnnnnntggtgttggtggtggtgtcnntgacctggctgctgcgnnnnnngngcccgatcatccacctgccaacgcctgaggaactggagcgcgccaccaagatcctgatgaactcggcgcaacccgatggcggcctggcactgaccggcgacaaagccctgctgtttcaccccaacgacgaagcgttcctgatgtacgctcgtcgcggtcgcagcctggtggcgttgtatgacccgatcggcccgaccctgcaacgggccgagatgatctggcagttccgcgacctgtgcgacattcaccacgcccgtccggtgttctaccaggtgcgcgccgagaacctgccgtattacatggacatcggcttgaccgcgatcaagctgggtgaagaagcccnnnn

SEQ ID NO: 5325 - DNA, 960 bp, Zea mays
  misc_feature (1)..(3): n is a, c, g, or t
  misc_feature (706)..(707): n is a, c, g, or t
  misc_feature (804)..(805): n is a, c, g, or t
  misc_feature (852)..(855): n is a, c, g, or t
  misc_feature (857)..(857): n is a, c, g, or t
  misc_feature (859)..(861): n is a, c, g, or t
  misc_feature (863)..(863): n is a, c, g, or t
  misc_feature (865)..(865): n is a, c, g, or t
  misc_feature (873)..(876): n is a, c, g, or t
  misc_feature (878)..(878): n is a, c, g, or t
  misc_feature (884)..(891): n is a, c, g, or t
  misc_feature (893)..(901): n is a, c, g, or t
  misc_feature (907)..(907): n is a, c, g, or t
  misc_feature (911)..(929): n is a, c, g, or t
  misc_feature (931)..(960): n is a, c, g, or t
  Peptide Sequence Number=SeqID_11950
  Probeset Number=SeqID_19728
nnngagccaacactcgacgctgccgcagacgaagaagaaccgcaggaataagcggacacacagggggcggatgaagattcgcccccttgttgtttgtcccttttgaaaatgttgaaaccccgaattattgcaccaccccaccagatcagagtgagattggatgtgagcaagagagcctataacttctgtgccggtcccgcggcgcttcctgaagcagtcctgcagcgcgcgcagggtgaactcctcgactggcatggaaaaggcctctccgtgatggaaatgagccatcgcagcgatgagttcgtgtccattgccaccaaggccgagcaggatatgcgcgacttgctggacatcccgtctgactacaaagtgttgttcctgcagggtggcgcgagccagcagtttgctcagatcccgctgaacctgctgccggaaagtggcactgccgactatatcgataccggtatctgggggcagaaggctattgaagaggcgtcccgttacggtcacgtcaatgtggcgggtactgccaaaccttacgactacttcgcgatccccggtcagaacgagtggaagctctcgaaagacgcggcgtacgtccactacgtagcgaacgaaaccatcggcggcctggaattcgactgggtgccggaagtgggcgatgttccgctggtatgcgacatgtcgtcggacatcctctcgcggnntatcgatgtgtccaagtacggcatgatctacgccggtgcgcagaagaacatcggcccgagcggcatcctggtcaacatcatccgtgaagacctgctnnggcgtgcgcgctcgctgtgcccgaccatgctcaactacaaggtcgcnnnngntnnngncncgatgtannnnancccgcnnnnnnnncnnnnnnnnnctgtcnggcnnnnnnnnnnnnnnnnnnnannnnnnnnnnnnnnnnnnnnnnnnnnnnnn

SEQ ID NO: 5326 - DNA, 165 bp, Zea mays
  misc_feature (1)..(1): n is a, c, g, or t
  Peptide Sequence Number=SeqID_11951
  Probeset Number=SeqID_19729
nagtcacccctgtcgcgcacgatcaaggagttggaagaagatctgggtgcgcctttgttcgcgcgcaccacgcgcagcacccgattgacgcgagccggaaggctgttgctcgaacacgtgccacgcgtgttcgctgcactagatcaagcccgcgccagcgtgtgc

SEQ ID NO: 5327 - DNA, 165 bp, Zea mays
  misc_feature (165)..(165): n is a, c, g, or t
  Peptide Sequence Number=SeqID_11952
  Probeset Number=SeqID_19730
gcacacgctggcgcgggcttgatctagtgcagcgaacacgcgtggcacgtgttcgagcaacagccttccggctcgcgtcaatcgggtgctgcgcgtggtgcgcgcgaacaaaggcgcacccagatcttcttccaactccttgatcgtgcgcgacaggggtgactn

SEQ ID NO: 5328 - DNA, 1086 bp, Zea mays
  misc_feature (1)..(46): n is a, c, g, or t
  misc_feature (803)..(808): n is a, c, g, or t
  misc_feature (865)..(865): n is a, c, g, or t
  misc_feature (871)..(871): n is a, c, g, or t
  misc_feature (879)..(884): n is a, c, g, or t
  misc_feature (886)..(886): n is a, c, g, or t
  misc_feature (891)..(922): n is a, c, g, or t
  misc_feature (926)..(943): n is a, c, g, or t
  misc_feature (945)..(953): n is a, c, g, or t
  misc_feature (958)..(980): n is a, c, g, or t
  misc_feature (985)..(996): n is a, c, g, or t
  misc_feature (1000)..(1012): n is a, c, g, or t
  misc_feature (1014)..(1018): n is a, c, g, or t
  misc_feature (1020)..(1022): n is a, c, g, or t
  misc_feature (1026)..(1037): n is a, c, g, or t
  misc_feature (1041)..(1060): n is a, c, g, or t
  misc_feature (1065)..(1075): n is a, c, g, or t
  misc_feature (1079)..(1086): n is a, c, g, or t
  Peptide Sequence Number=SeqID_11953
  Probeset Number=SeqID_19731
nnnnnnnnnnnnnnnnnnnnnnnnnnnnnnnnnnnnnnnnnnnnnntgaagctggacaacaatatctatgacatgtccggcggggcaatcctcggtaatctggtgaccgccttcggtacagataccatcatcgtctccggcggcaacatcggtggcaatatcagcaccagtggcggcaacgacagcattaccgtgagtggcggcgtcatcagtggcgagatccgcgccagtgtcggtaatgacaccttcaactggatcaatggtggccagatcaattccgccgtgctgatgggcgacggcgacgacaccgcactgatcagcggcctcaatgaaaccctgctcggcactacgccttcgattgacggcggcctgggcaatgaccaactgaccttcgacaacaccacttccagcaccgccgcccggtatatcgggtgggaaacagtcaaccttaacaacaactcgcgtttcgacctggccggcgactttttcctcggcgacagtgccagcaataccggcaccttcaacatcgatggcagcagcaccctgggcgtgacgcaaggcagtatccgcccctacaccgcaggcgcactggccaccctgaataatgccggcaccctcgacatgaccagccgcagcaacagcgccaccgatacgttgacggtgtacggcaactacgtgggcaacaatgggcagctttggttgcaaaccgtgctgggcgacgagaactcggctaccgacaaactggttgtgtctgacgggaccatcagcgggcacacacaaatgaccgtgagcaatctcggcgnnnnnngcggtctcacgcaaaacagcgggatcgaagtggtgcaagccctcaacggtgccaccngcagcnccgatgcnnnnnntntgaannnnnnnnnnnnnnnnnnnnnnnnnnnnnnnntgcnnnnnnnnnnnnnnnnnncnnnnnnnnngaaannnnnnnnnnnnnnnnnnnnnnnggggnnnnnnnnnnnntttnnnnnnnnnnnnncnnnnncnnnccannnnnnnnnnnngggnnnnnnnnnnnnnnnnnnnnccccnnnnnnnnnnncccnnnnnnnn

SEQ ID NO: 5329 - DNA, 871 bp, Zea mays
  misc_feature (1)..(1): n is a, c, g, or t
  misc_feature (4)..(11): n is a, c, g, or t
  misc_feature (13)..(24): n is a, c, g, or t
  misc_feature (26)..(80): n is a, c, g, or t
  misc_feature (85)..(91): n is a, c, g, or t
  misc_feature (95)..(131): n is a, c, g, or t
  misc_feature (140)..(140): n is a, c, g, or t
  misc_feature (143)..(150): n is a, c, g, or t
  misc_feature (152)..(152): n is a, c, g, or t
  misc_feature (154)..(161): n is a, c, g, or t
  misc_feature (163)..(170): n is a, c, g, or t
  misc_feature (174)..(177): n is a, c, g, or t
  misc_feature (185)..(187): n is a, c, g, or t
  misc_feature (189)..(189): n is a, c, g, or t
  misc_feature (871)..(871): n is a, c, g, or t
  Peptide Sequence Number=SeqID_11954
  Probeset Number=SeqID_19732
ncannnnnnnntnnnnnnnnnnnntnnnnnnnnnnnnnnnnnnnnnnnnnnnnnnnnnnnnnnnnnnnnnnnnnnnnnnncgtgnnnnnnncgcnnnnnnnnnnnnnnnnnnnnnnnnnnnnnnnnnnnnncgggataanctnnnnnnnncnannnnnnnngnnnnnnnncaannnnaagatcannnangcggcgatggacgccgcgttggagaacctgcacgtcgccgccacggttgaggcgctgcacgactgcgacctggtggtggaagccatcgtcgaaaacctcgacgccaagcgcggcctgttgcagcagttggaaggcgtggtcagcgcgggttgcatcctcgccaccaacacctcgtcgctgtcggtcacggccatcgccaccggctgccaacaccctgagcgggtcgccggtctgcatttcttcaacccggtgccgttgatgcgcgttgtcgaagtgatcgacggcctggccacggcgccaaaggtcggcgatgacctgctggccttcgtggcccgcaccggccatcgcggtgtgcgtgccaaggacacccccggctttatcgtcaaccacgccggccgtgcctacggtaccgaagccttgaagatgctcgatgaaggcattgccgagcgcggcgatatcgaccgtatcctgcgtgagggcgcaggctttcgcatgggcccgctggaattgctggacctcaccgggctcgacgtttcccacccggtgatggagtcgatctacaaccagttctatcaagaggcgcgctacaaaccgtcgcccctgacccgccagatgctggcgggcggacgcctggggcgcaagagcgggcagggcttctaccgttatgaaaatggccaggttn

SEQ ID NO: 5330 - DNA, 823 bp, Zea mays
  misc_feature (821)..(823): n is a, c, g, or t
  Peptide Sequence Number=SeqID_11955
  Probeset Number=SeqID_19733
gtgtgggaaatcccgccgagcgggcaggggctggtggcgctgatggcgctgaagattctggaaggtttcagctttgatcaccgtgacagccagcagacctggcatcgtcagctggaggcgatgaagcttgcctacagcgatggcttgcactacatcactgacccgctgcatatgcgggtggcggtggcggatttgctcagtgatgggtacagctcccggcggcgcgagcagataggggagcaggcccagccacccaagcctggtgatcctcacgccagtggcacggtgtacctggccaccgccgatgcggaaggcaatatggtttcgtttatccagagcaattaccacgggtttggctccggtgtggtgttgcccgacagtggtattgcgctgcagaaccgagggcaggagttcagccttgatccggggcatgccaattgcctgatgcctgggaaaaagacgttccacaccatcattcctgggttccttacccgggatggccaggctctcggaccgtttggtgtgatgggcgggtatatgcagcctcaggggcatgtgcagatggtgatgaatctggtggatttcggtcttaatccccaggcggcccttgatgcaccgcgttggcagtggttgggggagatgaaggtgggcatcgagcagggggcgtcgcgggatttggccaatgccctggctcggcgtgggcaccaggtgcagattgccagtgacctgacggacttcgggcgtgggcagattatcctgcgggatccagtcagtggagtgctgtgtggtgggaccgagccccgggcggattccatattgcnnn

SEQ ID NO: 5331 - DNA, 950 bp, Zea mays
  misc_feature (1)..(3): n is a, c, g, or t
  misc_feature (788)..(788): n is a, c, g, or t
  misc_feature (790)..(794): n is a, c, g, or t
  misc_feature (814)..(815): n is a, c, g, or t
  misc_feature (817)..(818): n is a, c, g, or t
  misc_feature (824)..(827): n is a, c, g, or t
  misc_feature (829)..(829): n is a, c, g, or t
  misc_feature (833)..(834): n is a, c, g, or t
  misc_feature (838)..(839): n is a, c, g, or t
  misc_feature (841)..(850): n is a, c, g, or t
  misc_feature (853)..(857): n is a, c, g, or t
  misc_feature (859)..(859): n is a, c, g, or t
  misc_feature (862)..(863): n is a, c, g, or t
  misc_feature (872)..(885): n is a, c, g, or t
  misc_feature (888)..(899): n is a, c, g, or t
  misc_feature (905)..(906): n is a, c, g, or t
  misc_feature (912)..(924): n is a, c, g, or t
  misc_feature (926)..(937): n is a, c, g, or t
  misc_feature (939)..(939): n is a, c, g, or t
  misc_feature (941)..(941): n is a, c, g, or t
  misc_feature (943)..(944): n is a, c, g, or t
  misc_feature (949)..(950): n is a, c, g, or t
  Peptide Sequence Number=SeqID_11956
  Probeset Number=SeqID_19734
nnnggggcgacgcccaaagcgccgcagcctgtgccgaggcccacttgcgcgcggcagcacggcgtttgcacctggaattgcccgccatcaattaaacgatccaaacccttttgaagcgtgccgtcgggcacgccgtttttttaacaaaatcattagtctgacaacctgataagcagactgaaatgcgtaggtacctaaaacaatgatttatgacttttgcatcatcggcggcggcatcgtcggcctggccaccgcgatggagttgctcaagcgccagcccaacgcttccttggtgatcctggaaaaggaaaccctcctggccaagcaccagaccggccacaacagcggcgtgatccatgccggtatctactacgcgccgggcagcctcaaggccgacttgtgcaaacgcggcgccgaagccaccaagcagttctgcaccgagcacgggatcaagttcgaggtgtgcggcaagttgctggtggcctcgaccccactggaagtgcagcggatggaagcgctgtacgcccgctcgcagctcaacggaatgaaggtcgaacgcctggacgccgaccagttgcgccagcgcgaaccgaacatcgtcggactgggcggattgtttctcgacgccaccggtatcgtcgattaccgcgaagtctgcgaaaccatggcccgggtcatccgccgtgccggtggggaaatctgcctggaacgcaccgtgacctccatcgtcgaggacactgacaaagtcaccgtcagcactcggggtgaaagctggcaggccaagcacntnnnnntgtgtgcaggtttgcaatcnnanngtctgnnnntnatgnnccanntnnnnnnnnnncannnnntnatnnccccggttnnnnnnnnnnnnnnttnnnnnnnnnnnngggaanngaaaannnnnnnnnnnnncnnnnnnnnnnnnancngnnttccnn

SEQ ID NO: 5332 - DNA, 279 bp, Zea mays
  misc_feature (1)..(5): n is a, c, g, or t
  misc_feature (13)..(15): n is a, c, g, or t
  Peptide Sequence Number=SeqID_11957
  Probeset Number=SeqID_19735
nnnnngggtcgannntggcgcgcgacggcgtcaacggcctgcacctggcgctggaaggcgcctacgacctgatcgtgctggacgtgatgctgcccggcgtggacggcttcggcatcctggccgccgtgcgcgccaacaaggacaccccgatcctgatgctgaccgcgcgcgacgccgtcgaggaccgcgtgcgcggcctcgaaggcggcgccgacgactacctggtcaagcccttcgccttctccgaactgctggcgcgcgtgcaggccctgctgcggc

SEQ ID NO: 5333 - DNA, 189 bp, Zea mays
  Peptide Sequence Number=SeqID_11958
  Probeset Number=SeqID_19736
tatacccaccacgttacattttcttttactattagtgcgacaagtcattgttgctccgtccaattcaacaacctcaaacaccatagagtccattatgctaatgtggttttagaaacgatctaatgcttgcaagagccaataacacaagagatgagcaccctgtggactgtggtagtgcccgcgcggatc

SEQ ID NO: 5334 - DNA, 189 bp, Zea mays
  Probeset Number=SeqID_19737
gatccgcgcgggcactaccacagtccacagggtgctcatctcttgtgttattggctcttgcaagcattagatcgtttctaaaaccacattagcataatggactctatggtgtttgaggttgttgaattggacggagcaacaatgacttgtcgcactaatagtaaaagaaaatgtaacgtggtgggtata

SEQ ID NO: 5335 - DNA, 453 bp, Zea mays
  misc_feature (291)..(294): n is a, c, g, or t
  misc_feature (304)..(308): n is a, c, g, or t
  misc_feature (312)..(316): n is a, c, g, or t
  misc_feature (322)..(324): n is a, c, g, or t
  misc_feature (326)..(326): n is a, c, g, or t
  misc_feature (329)..(331): n is a, c, g, or t
  misc_feature (348)..(350): n is a, c, g, or t
  misc_feature (356)..(358): n is a, c, g, or t
  misc_feature (362)..(393): n is a, c, g, or t
  misc_feature (397)..(406): n is a, c, g, or t
  misc_feature (415)..(417): n is a, c, g, or t
  misc_feature (419)..(423): n is a, c, g, or t
  misc_feature (425)..(443): n is a, c, g, or t
  misc_feature (447)..(453): n is a, c, g, or t
  Peptide Sequence Number=SeqID_11959
  Probeset Number=SeqID_19738
ttgccatgcagcaccagaaagcgctgcacttcggcgatgtcggtgtttttggtggtgacgaacgacaggcgcgaggactcgttgtccaggtaccagtcggcgtgggcaggcacggcggcagcggccagcagcaggacggccatgggtttgaacaggcacataaagactcttggggcaaaaaacctggacgaaccttaagcgcaatgtaacgagcggcgcaaatccaatgtgggagcaggcttgtgtgggagcgggcttgctcgctcccacatgagctgtatttcaggccannnnctgctgcacnnnnngaannnnngattcnnngntgnnnaggtgcaggctcagcannncgttcnnntccnnnnnnnnnnnnnnnnnnnnnnnnnnnnnnnngctnnnnnnnnnncgcccattnnncnnnnncnnnnnnnnnnnnnnnnnnnatcnnnnnnn

SEQ ID NO: 5336 - DNA, 453 bp, Zea mays
  misc_feature (1)..(7): n is a, c, g, or t
  misc_feature (11)..(29): n is a, c, g, or t
  misc_feature (31)..(35): n is a, c, g, or t
  misc_feature (37)..(39): n is a, c, g, or t
  misc_feature (48)..(57): n is a, c, g, or t
  misc_feature (61)..(92): n is a, c, g, or t
  misc_feature (96)..(98): n is a, c, g, or t
  misc_feature (104)..(106): n is a, c, g, or t
  misc_feature (123)..(125): n is a, c, g, or t
  misc_feature (128)..(128): n is a, c, g, or t
  misc_feature (130)..(132): n is a, c, g, or t
  misc_feature (138)..(142): n is a, c, g, or t
  misc_feature (146)..(150): n is a, c, g, or t
  misc_feature (160)..(163): n is a, c, g, or t
  Peptide Sequence Number=SeqID_11960
  Probeset Number=SeqID_19739
nnnnnnngatnnnnnnnnnnnnnnnnnnngnnnnngnnnaatgggcgnnnnnnnnnnagcnnnnnnnnnnnnnnnnnnnnnnnnnnnnnnnnggannngaacgnnntgctgagcctgcacctnnncancnnngaatcnnnnnttcnnnnngtgcagcagnnnntggcctgaaatacagctcatgtgggagcgagcaagcccgctcccacacaagcctgctcccacattggatttgcgccgctcgttacattgcgcttaaggttcgtccaggttttttgccccaagagtctttatgtgcctgttcaaacccatggccgtcctgctgctggccgctgccgccgtgcctgcccacgccgactggtacctggacaacgagtcctcgcgcctgtcgttcgtcaccaccaaaaacaccgacatcgccgaagtgcagcgctttctggtgctgcatggcaa

SEQ ID NO: 5337 - DNA, 673 bp, Zea mays
  misc_feature (1)..(5): n is a, c, g, or t
  misc_feature (673)..(673): n is a, c, g, or t
  Peptide Sequence Number=SeqID_11961
  Probeset Number=SeqID_19740
nnnnngacgaggcattgatcgtcgagtaccagcagttgcatcaacgcatctggcccgccgtggccgaacatctgcgcagccagcacatcgtggagatgcagatctggcgcctgggcacacggctgttcatggtcatggacactgcggccgggttcagcttcgacgggttggaccacgccgcacgcgccaaccctgaagtgcaagcctgggaaaccctgatgtggcgtttccaggtgcccacgccgtggactgaccctggcggcaaatggcagtcgctgacgcagattttcagcctcaccaatcaaccgtagtacccgctgcatcgcacgccttgatcccataaaaacaacaggagaagcgtcatgttaagcaaagacacacacctggcaggtacccgcgccgtgccgacctatcgctgggcgctgatgctggtgaccagtctgttcttcctctggggcttgtcctacggtttgctggacgtcctgaacaagcatttccaggaagtcctgcacgtcagcaaggcacagtccgggctgttgcaaggtgcatatttcggcgcgtatttcctgatcgccctgccggcggggctgctgatggaccgtcacggctacaaagccgggatcctcttgggcttgtgcctgtatgcagcaggcgccttgctgttcatgccggn

SEQ ID NO: 5338 - DNA, 673 bp, Zea mays
  misc_feature (1)..(1): n is a, c, g, or t
  misc_feature (669)..(673): n is a, c, g, or t
  Peptide Sequence Number=SeqID_11962
  Probeset Number=SeqID_19741
nccggcatgaacagcaaggcgcctgctgcatacaggcacaagcccaagaggatcccggctttgtagccgtgacggtccatcagcagccccgccggcagggcgatcaggaaatacgcgccgaaatatgcaccttgcaacagcccggactgtgccttgctgacgtgcaggacttcctggaaatgcttgttcaggacgtccagcaaaccgtaggacaagccccagaggaagaacagactggtcaccagcatcagcgcccagcgataggtcggcacggcgcgggtacctgccaggtgtgtgtctttgcttaacatgacgcttctcctgttgtttttatgggatcaaggcgtgcgatgcagcgggtactacggttgattggtgaggctgaaaatctgcgtcagcgactgccatttgccgccagggtcagtccacggcgtgggcacctggaaacgccacatcagggtttcccaggcttgcacttcagggttggcgcgtgcggcgtggtccaacccgtcgaagctgaacccggccgcagtgtccatgaccatgaacagccgtgtgcccaggcgccagatctgcatctccacgatgtgctggctgcgcagatgttcggccacggcgggccagatgcgttgatgcaactgctggtactcgacgatcaatgcctcgtcnnnnn

SEQ ID NO: 5339 - DNA, 279 bp, Zea mays
  misc_feature (274)..(279): n is a, c, g, or t
  Peptide Sequence Number=SeqID_11963
  Probeset Number=SeqID_19742
accggccagctagccctgcgccagggctacacctacggcgacttccactaccgcaacgacgaccgcttcggcgacaacaccttgcccggcattcccaagcactactatcaggcgcaattgcgctacagccatcccagcggtttctacaccagcctcaatggcgagcactcatcgcgggtggcagtggactatgccaattcctactacgcggcggcctacacgctgctcggcgcgacggtcgggtatgacgcgccgaagcacgactggcaagccnnnnnn

SEQ ID NO: 5340 - DNA, 273 bp, Zea mays
  misc_feature (1)..(4): n is a, c, g, or t
  Peptide Sequence Number=SeqID_11964
  Probeset Number=SeqID_19743
nnnnaactgaccctggctaatccgttcgccggcaaggccgagctgagcatgatcgaacacatgaacagcgaccataccaaggccattgcccactacgtcgaactggccggcttgccgaccaccgagcctgcgcaactggcgggcatcgacagtgaaggcatgcacctgcgcattggccaggcactctactggctgccctttgccgagccttgcaacacgccgacacaagtacgcgaagccttggttttcctggctcacgccgaggtgtggccg

SEQ ID NO: 5341 - DNA, 900 bp, Zea mays
  misc_feature (1)..(216): n is a, c, g, or t
  misc_feature (898)..(900): n is a, c, g, or t
  Peptide Sequence Number=SeqID_11965
  Probeset Number=SeqID_19744
nnnnnnnnnnnnnnnnnnnnnnnnnnnnnnnnnnnnnnnnnnnnnnnnnnnnnnnnnnnnnnnnnnnnnnnnnnnnnnnnnnnnnnnnnnnnnnnnnnnnnnnnnnnnnnnnnnnnnnnnnnnnnnnnnnnnnnnnnnnnnnnnnnnnnnnnnnnnnnnnnnnnnnnnnnnnnnnnnnnnnnnnnnnnnnnnnnnnnnnnnnnnnnnnnnnnnnnngacaagctgcgccaggaggtcagcgagatgcgcgccaagatgcgcgacaacctcggtaccaagtccacggcggcgggaacggcggcgaatgccttcgaacccacggtggcgttcgacctcaagcaggacgccggaggtatcgtcgatattgaatttatggtgcaatacgcggctttggcgtggtctgcgcaacatccatcgttgctgcgctacaccgacaatatccgcattctggaagggctggagcaggtcgggctgatgcccgctgccgatgcccatttgctgcgcgaggtgtataaagcctaccgttccgccgctcaccgccaggccttgcagaacgaggccgggaccgttgccggggatcagttcgctgacgaacggcgccaggtgcagcgaatctggcatgaactggggttaagctgaaactatataaggcggggaggcatgagcctccccgtatcgtttgtggaaactacatgaatattctgatcgttgggcccagttgggtcggtgacatggtgatggcacagacactgttccagtgcctgaaacaacgccatcccgactgccaaatcgacgtgctcgcccccgagtggagccggccgattcttgagcgtatgcccgaggtgcgtcaggctttgagcttcccgctcggccatggtgcgctggaactggcgacccnnn

SEQ ID NO: 5342 - DNA, 575 bp, Zea mays
  misc_feature (534)..(541): n is a, c, g, or t
  misc_feature (543)..(545): n is a, c, g, or t
  misc_feature (551)..(569): n is a, c, g, or t
  misc_feature (571)..(574): n is a, c, g, or t
  Peptide Sequence Number=SeqID_11966
  Probeset Number=SeqID_19745
atcgttgaaagcggtatttccttcgacgtgctgttcggcccggcctacaagggcattcccctggccgccgcgaccgccgtggcgttggctgaacatcacgcgctggatttgccttggtgcttcaaccgcaaggaagccaaggcccatggcgaaggcggtagccttgtgggcgcgccgctcaagggcgacgtgctgatcatcgatgacgtgatcactgccggtacggcgattcgcgaagtgatgcagatcatcgcttcccaggacggcgccaaggcggctggcgtgttgatcgcgctgaaccgccaggagcgcggcaacggtgaattgtcggcgatccaggaagtggaacgtgatttcgcgattcctgtggtgagcatcgtgtcgctgaaccaggtgttgcagttcctggaagatgacccgcagctcaagcagcacttgccagcggtcaaggcctatcgcgagcagttcggcgtttagaagatccatgtgggagcgggcttgctcgcgaatacggcttgtcagttgatatatgtnnnnnnnngnnntccggnnnnnnnnnnnnnnnnnnncnnnnt

SEQ ID NO: 5343 - DNA, 747 bp, Zea mays
  misc_feature (1)..(2): n is a, c, g, or t
  misc_feature (747)..(747): n is a, c, g, or t
  Peptide Sequence Number=SeqID_11967
  Probeset Number=SeqID_19746
nnaccgccgctacccagaaaatgactgtgaatgcccagcaggcgggtatcccgctggtgtacgtcaaccgtcgcccggacatccccggcttaccggccggggtgggttatgtcggctcggacgagatcaaagcgggcgagattcagatgcgctacctcgcggaaaaaatgaacggcaagggcaacctcgcaatcatgctcggcttgctctctaacaacgccacccacaaccgcacacagggcgtgaaaaacgtactgaaggattaccccaacatccatatcgtcgaagaacaaagcgccgactggcagcgcagcaaggccatggacctgatgaacaactggatcgtctcgggcaagaaaatcgacgccgtggcggccaatgccgatgaaatggctatcggtgccgcgatggcgattacccaggccggtatgcaccctggcaaggacatcctggtgggcggcagcgacggcggacccgccggcctggatgcgatcaaaaaagatctattggtagtcacggcctatcaggacaacaagggccaggccgtcggctcgattgacctggcgctaaagatgatcagaaagcagccctacacggcggagctgaccattccctatcaacagatcaccaaggacaactatcaggcctttctcaccccttgattgttatcagcccagcgccaagcagaccggccagccccgacaaacagagcactcccactccataagcgagggtgcgccagggctn

SEQ ID NO: 5344 - DNA, 920 bp, Zea mays
  misc_feature (1)..(1): n is a, c, g, or t
  misc_feature (4)..(5): n is a, c, g, or t
  misc_feature (9)..(15): n is a, c, g, or t
  misc_feature (17)..(25): n is a, c, g, or t
  misc_feature (27)..(33): n is a, c, g, or t
  misc_feature (37)..(37): n is a, c, g, or t
  misc_feature (45)..(45): n is a, c, g, or t
  misc_feature (47)..(48): n is a, c, g, or t
  misc_feature (56)..(61): n is a, c, g, or t
  misc_feature (68)..(72): n is a, c, g, or t
  misc_feature (100)..(103): n is a, c, g, or t
  Peptide Sequence Number=SeqID_11968
  Probeset Number=SeqID_19747
nagnnggannnnnnntnnnnnnnnncnnnnnnncganctacaagngnngagcgctnnnnnnccgcgcnnnnntacctggactcggccgccgggcgcgacnnnntggtggtgaaaagccgcgccttcgtcaccggcctggtgttctccggcaaggccgcggtcggggtgaagtacgagatcgatggcgtcgagcagatcagccatgccgccaaggaagtgatcctcagtgccggtgccttcggttcgccgcagttgctgctgctcgccggcatcggtgatcaggacgagctcaaggccctcggcatcgagctgcgccaccacttgcccggggtcggcaagaacctgcaggaccacgtggccgtggcgatccagtattcgacgcccaagcagggtgtgtcgccgacccgcgcgctgtcgccgctcgggcggctgttcgtcggggcgcgctggatggccgcgcgcagtggcctgggggcgtccaactacttcgaggtgggggcgttcttccgtggcaacgaccaggtcgagtacgccaacctggagcacgaatttctccccatggtgggcgagttctaccgcggcaaggcgcgcatcaccccgggcttccagtacttcaccagcgtcatgcgcccggccagtcgtggcagcgtcaccctggcctcgaaggatcccaaggccgatccgctgatccgcctgaacttcctcaccgcgccgggcgacctggagcaactgcgcgaaggcctgcgcaagacccgggaaatgatcgcccagcgctcctgggacgaactgcgcggcgaggagctcagccccggcaagcacctgcagagcgatgccgagctggaagcctggatccgcgacaacgccggcaccactttccacgcctgttccacctgccgcatgggggtggacgagatggcggt

SEQ ID NO: 5345 - DNA, 240 bp, Zea mays
  misc_feature (1)..(5): n is a, c, g, or t
  Peptide Sequence Number=SeqID_11969
  Probeset Number=SeqID_19748
nnnnnatggagtcgtttgcccgggtgctgtcgctgcagatcgaagccgaagaaagcctccagcagaccgaggccgacttgcagcaggagcgcgaaaccgccgaactgcgcgaacaattcatcgccgtgctcggccacgacctgcgcaacccgctgtttgccatcaacgtcggcgccgaacggctgctgcgcaaacacccggacccggccaccgacaccctggtacggcacatgctggcca

SEQ ID NO: 5346 - DNA, 240 bp, Zea mays
  misc_feature (236)..(240): n is a, c, g, or t
  Peptide Sequence Number=SeqID_11970
  Probeset Number=SeqID_19749
tggccagcatgtgccgtaccagggtgtcggtggccgggtccgggtgtttgcgcagcagccgttcggcgccgacgttgatggcaaacagcgggttgcgcaggtcgtggccgagcacggcgatgaattgttcgcgcagttcggcggtttcgcgctcctgctgcaagtcggcctcggtctgctggaggctttcttcggcttcgatctgcagcgacagcacccgggcaaacgactccatnnnnn

SEQ ID NO: 5347 - DNA, 190 bp, Zea mays
  misc_feature (1)..(3): n is a, c, g, or t
  Peptide Sequence Number=SeqID_11971
  Probeset Number=SeqID_19750
nnnggcctgggccgtctgcaactgaacgaagtgctcacgtacaaaagcagccagggtctgaccctcaaggccggcgaccgcatggccagcagcaagggcctgatcctcgacgtggccagcctgaacaacggcggcgaactgctcagcgacggcaacgtgagcatcaccctgagcggcgacctgaacaata

SEQ ID NO: 5348 - DNA, 190 bp, Zea mays
  misc_feature (188)..(190): n is a, c, g, or t
  Peptide Sequence Number=SeqID_11972
  Probeset Number=SeqID_19751
tattgttcaggtcgccgctcagggtgatgctcacgttgccgtcgctgagcagttcgccgccgttgttcaggctggccacgtcgaggatcaggcccttgctgctggccatgcggtcgccggccttgagggtcagaccctggctgcttttgtacgtgagcacttcgttcagttgcagacggcccaggccnnn

SEQ ID NO: 5349 - DNA, 978 bp, Zea mays
  misc_feature (1)..(31): n is a, c, g, or t
  misc_feature (827)..(827): n is a, c, g, or t
  misc_feature (855)..(855): n is a, c, g, or t
  misc_feature (867)..(869): n is a, c, g, or t
  misc_feature (877)..(877): n is a, c, g, or t
  misc_feature (881)..(881): n is a, c, g, or t
  misc_feature (884)..(884): n is a, c, g, or t
  misc_feature (897)..(897): n is a, c, g, or t
  misc_feature (899)..(899): n is a, c, g, or t
  misc_feature (904)..(911): n is a, c, g, or t
  misc_feature (916)..(918): n is a, c, g, or t
  misc_feature (921)..(925): n is a, c, g, or t
  misc_feature (932)..(934): n is a, c, g, or t
  misc_feature (938)..(940): n is a, c, g, or t
  misc_feature (942)..(942): n is a, c, g, or t
  misc_feature (949)..(972): n is a, c, g, or t
  misc_feature (974)..(978): n is a, c, g, or t
  Peptide Sequence Number=SeqID_11973
  Probeset Number=SeqID_19752
nnnnnnnnnnnnnnnnnnnnnnnnnnnnnnnatgtgaaccccaccacacccaagcgcatcgcgaccatgccggatgcgggcggcgcgcgccaagtgtcgtacctggcggaaaactgccgggatttcgggattgagctgttggatatcctcgacaagcgccaaggcattgagcacgtgatcgccccggagcagggctttatcctgccgggcatggtgatcgccgccggcgacagccacaccaccacctacggtgccttgggcgcattcggctttggcatcggcacctcggaaatcgagcatttgctggcctcgcaaaccctggtctacaaacgcctgaaaagcctgcgcgtgaccgtggacggcgaactggcccacggcctgacctccaaggacgtgatcatggcgctgatcggcaagatcggcgcttcgggtgccaccggctacgccattgagttttgcggttcgaccattgatgccctgagcgtcgaggcgcggatgaccatctgcaacatggcggtggaagcgggcgcccgtggtgcgttcatggcgccggacgaaaaagtcttcgcctacctcaagggcaaaccccgcgcgccgaacggcgagttgtgggagcgcgccctcgtgggttggcgccaactgcactcggatgccgacgccgtgttcgacctcgaagtgcaactggacgccaccgccctggagcccatggtcacctggggcaccagccccgaccaggccgcgcccatcgggcgcccgcgtaccggacccgcaagacgtcagcgacctgatcctgcgccaggacatgcgccgcgccctgaactacatgngccttgaagccggcatgcccctgagcgngatcgtcatcannnatgcgttnatcngcncctgcaccaacgncngcatnnnnnnnntgcgnnntgnnnnnagcgtcnnncgcnnnangcacgtnnnnnnnnnnnnnnnnnnnnnnnntnnnnn

SEQ ID NO: 5350 - DNA, 972 bp, Zea mays
  misc_feature (1)..(1): n is a, c, g, or t
  misc_feature (4)..(9): n is a, c, g, or t
  misc_feature (11)..(21): n is a, c, g, or t
  misc_feature (23)..(34): n is a, c, g, or t
  misc_feature (36)..(38): n is a, c, g, or t
  misc_feature (43)..(50): n is a, c, g, or t
  misc_feature (52)..(52): n is a, c, g, or t
  misc_feature (54)..(59): n is a, c, g, or t
  misc_feature (66)..(77): n is a, c, g, or t
  misc_feature (88)..(88): n is a, c, g, or t
  misc_feature (98)..(103): n is a, c, g, or t
  misc_feature (110)..(111): n is a, c, g, or t
  misc_feature (115)..(119): n is a, c, g, or t
  misc_feature (121)..(123): n is a, c, g, or t
  misc_feature (140)..(141): n is a, c, g, or t
  misc_feature (180)..(180): n is a, c, g, or t
  misc_feature (233)..(234): n is a, c, g, or t
  misc_feature (236)..(237): n is a, c, g, or t
  misc_feature (239)..(241): n is a, c, g, or t
  misc_feature (336)..(337): n is a, c, g, or t
  misc_feature (377)..(380): n is a, c, g, or t
  misc_feature (388)..(391): n is a, c, g, or t
  Peptide Sequence Number=SeqID_11974
  Probeset Number=SeqID_19753
nctnnnnnncnnnnnnnnnnncnnnnnnnnnnnngnnncggannnnnnnncncnnnnnngcgcgcnnnnnnnnnnnngtggatcgggngcctgaaacnnnnnntcaacgnnatcnnnnnannnagttgaacgggaaatanncgccgacgagattcgccggcaactgcacaacgagcacantctgtcgttggagcaggaggcacggaagattctctcgcctgtgcaggaaaccnntnngnnnggttgagcctgtggccgagcaatcgattgcaccgcccgctgcacctgcacctgcaccggtcgctgaacccgtgcatgccgccgcgccagcaaccnngaccgaacccgcgccgacgcctgccgtgtcgcccgcgccnnnncgaccctnnnnttgccgccgcgagccccatgagcgctgataaaccggaaaccgaccagcacatgccactggtctcgcacctcaccgagttgcgtacccgcctgctgcgctgtgtcgcggcgatcttcatcatctttgccgggttgtttgccttcacccagcagatctacaccttcgtctccacgccgctgcgcaattacttgccggccggcgcgacgatgatcgccaccgatgtgtcgtcgccgttcctcacgccgttgaagctgacgatgatggtctcgctgttcctggcgattccggtgatcctgcaccagatctggggctttatcgcgccgggtctgtacaagcatgaaaaacgcatcgccgtgccgctgctggtgtcgagcatcctgctgttctacaccgggatggccttcgcctacttcctggtgttcccgctgatcttcaagttcttcgccgccgctacaccggccggtgtggagatgatgaccgacatcaccagttacctcgacttcgtgatgacgctgttcttcgcctttggcgtggccttcgaaatcccggtggccgtggtgctgctggtgtggatcggcgta

SEQ ID NO: 5351 - DNA, 927 bp, Zea mays
  misc_feature (1)..(53): n is a, c, g, or t
  misc_feature (65)..(67): n is a, c, g, or t
  misc_feature (72)..(73): n is a, c, g, or t
  misc_feature (76)..(80): n is a, c, g, or t
  misc_feature (90)..(90): n is a, c, g, or t
  misc_feature (92)..(96): n is a, c, g, or t
  misc_feature (103)..(103): n is a, c, g, or t
  misc_feature (926)..(927): n is a, c, g, or t
  Peptide Sequence Number=SeqID_11975
  Probeset Number=SeqID_19754
nnnnnnnnnnnnnnnnnnnnnnnnnnnnnnnnnnnnnnnnnnnnnnnnnnnnngggtgatcaacnnnatcanncannnnngcctgaccgncnnnnngctctcnaccaattacgattcgccgacgcgctcaggcggtggtgacagccataacttcagcggcagttatgggtttggcgacctggcagacgaccgcttcaacgtatttggcgtggtcagctacgacaagcagacgcgcctggcggccaaagaccgcgactacacctacaactaccagcccggtcgcggcctggatttcacctcgggcaccgccgccccggcaaactggagccagggtagcaacgcgaccaacccgctggctggctccggctgcaattcccccgggttgctgtcgcgcaatggcatctgccgccaaagcctgtggagttacctggacctggtgccggaaaccgaaaaaacctcggcctttgccaaagccaccggcaagctcgccgatgaccacaccgtgagccttgagtacttctgggcgcgcaacgaaaaccgcacgcagattggcccgggcaccttgatgggcgcccaggtcaatccgggtacggcgttctatccgggcaacggcatcacgccgggtccgacgggttttgccctggacccgacacaaccggtggatgtgaactggcgcgaaaccgacgccggggcgcgcaagcacgaagatgacaacaccagtcagcgcctgctgctgagcttcgaaggcaccgtggcgaactgggactacaacgtcggtgcgtcctacaaccagaacaaagtggtgcaaaccattctggacggttatgtgaacgaccagaccatcagccagggtatcgccaacggcgtgatcaacccgttcgggccgcagagtgaagcgggcagggcgttgctcgcctccagccgcnn

SEQ ID NO: 5352 - DNA, 426 bp, Zea mays
  misc_feature (1)..(8): n is a, c, g, or t
  Peptide Sequence Number=SeqID_11976
  Probeset Number=SeqID_19755
nnnnnnnnggttgttcttcgccgaagccttgccggcaccgaccttcggtacgcctggcctgctctgggcgtccctgaccctggcgctgctggcggtacccgtggtgatcgtagccaccgaagaaggcctggcgcggatccctcgcaccgtacgtgaaggttctttggcactgggggcgaccaaggcggaaacgctgtggaagatcgtgctgccgatggccagcccggcgatgatgaccggcatgatcctcgccgtggcccgcgccgccggtgaagtggcgccgctgatgctggtgggtgtggtgaaactggcgccgtcgctgccggtggacggcaactacccgtacctgcacctggaccagaagatcatgcacttgggcttccatatctatgacgtcggcttccagagccccaacgtcgaggccgc

SEQ ID NO: 5353 - DNA, 898 bp, Zea mays
  misc_feature (738)..(738): n is a, c, g, or t
  misc_feature (768)..(771): n is a, c, g, or t
  misc_feature (788)..(789): n is a, c, g, or t
  misc_feature (795)..(795): n is a, c, g, or t
  misc_feature (799)..(799): n is a, c, g, or t
  misc_feature (827)..(830): n is a, c, g, or t
  misc_feature (838)..(854): n is a, c, g, or t
  misc_feature (858)..(860): n is a, c, g, or t
  misc_feature (862)..(868): n is a, c, g, or t
  misc_feature (871)..(873): n is a, c, g, or t
  misc_feature (876)..(881): n is a, c, g, or t
  misc_feature (883)..(883): n is a, c, g, or t
  misc_feature (888)..(896): n is a, c, g, or t
  misc_feature (898)..(898): n is a, c, g, or t
  Peptide Sequence Number=SeqID_11977
  Probeset Number=SeqID_19756
tggtgatttccagcctgggcaagaaccccgagcgcgagaaggtcatcgacttctccaaggcctacgcgccgttctacctcgccgtgttcggcccgccagatgcgccaatcagtaccgttgacgacctcaagggcaaaaccatcagcgtgacccgcggcgccatcgaagacatcgagctgaccgccgttgcgcctaaagaggcgacgatcaagcgctttgaagacaacaactcgaccatcgccgcctacctcgcgggccaagtggacctgatcgccagcggcaacgtggtgatggtggccatcagcgaacgcaaccccaagcgcgtgccggcactgaaagtgaagctcaaggactcgccggtgtacgtgggcgtaaacaagaacgagccggcgctgctggacaaggtcaaccagatcctggtcgcggccaaagccgacggcagcctggaaaagaacgcaatgcagtggctcaaagagccgctgccggctgatctctgatcgcggtaacgagggttagctatggcctatcaattcgactttgtgccggttctggccaataccgatctgttgctgcgcggcgcgctgttcacccttgagctgaccgccatcggtgcagtactgggcgtggcgctgggagtcgtcggcgccgtggtgcgggcgtggaagatccagccgttcagctggatcttcggggtgtacgtcgagttgatccgcaacacgccgttcctggttcagctgnttttcatcttcttcggccttccgtccctcnnnnttgaaaatcaccgaatnncaggcnggcngtgctggcgatggtgatcaacctggggnnnntactccannnnnnnnnnnnnnnnncggnnntnnnnnnnatnnngcnnnnnnanctggnnnnnnnnngn

SEQ ID NO: 5354 - DNA, 974 bp, Zea mays
  misc_feature (1)..(2): n is a, c, g, or t
  misc_feature (663)..(974): n is a, c, g, or t
  Peptide Sequence Number=SeqID_11978
  Probeset Number=SeqID_19757
nnctacgcggttacaccgatcctgagccacggtgccactttgctcctgctggaggtgcacccccgggatcgcctgctgcgcatcaccaaggaagaggcgcaactgtccaagcaggaaaccagcaagatgctggtgcgtggcttggcccacgagatcaagaaccccctgggcgggattcgcggcgccgcacagttgctggcccgcgagctgccggacgagaacctcaaggactacaccaacgtcatcatcgaggaagccgaccgcctgcgtaacctggtggaccgcatgctcggctccaacaagctaccgtcgctggcgatgactaacgtccacgaagtattggagcgggtttgccaactggtagaggccgaaagccagggctgcatcaccttggtgcgcgactacgacccgagcattcccgacgtattgatcgaccgcgagcagatgatccaggcggtgctcaatatcgtacgcaacgccatgcaggccatcagcagccagaacgaactgcgccttggccgcatcagcctgcgcacccgcgcgctgcgccagttcaccatcggccacgtgcgccatcgcctggtgaccaaggtcgagatcatcgacaacggcccaggcatccctgcagaactgcaggaaaccatctttttcccaatggtcaannnnnnnnnnnnnnnnnnnnnnnnnnnnnnnnnnnnnnnnnnnnnnnnnnnnnnnnnnnnnnnnnnnnnnnnnnnnnnnnnnnnnnnnnnnnnnnnnnnnnnnnnnnnnnnnnnnnnnnnnnnnnnnnnnnnnnnnnnnnnnnnnnnnnnnnnnnnnnnnnnnnnnnnnnnnnnnnnnnnnnnnnnnnnnnnnnnnnnnnnnnnnnnnnnnnnnnnnnnnnnnnnnnnnnnnnnnnnnnnnnnnnnnnnnnnnnnnnnnnnnnnnnnnnnnnnnnnnnnnnnnnnnnnnnnnnnnnnnnnnnnnnnnnnnnn

SEQ ID NO: 5355 - DNA, 1603 bp, Zea mays
  misc_feature (1)..(1): n is a, c, g, or t
  misc_feature (712)..(715): n is a, c, g, or t
  misc_feature (725)..(728): n is a, c, g, or t
  misc_feature (737)..(739): n is a, c, g, or t
  misc_feature (745)..(748): n is a, c, g, or t
  misc_feature (751)..(758): n is a, c, g, or t
  misc_feature (769)..(769): n is a, c, g, or t
  misc_feature (786)..(788): n is a, c, g, or t
  misc_feature (790)..(794): n is a, c, g, or t
  misc_feature (815)..(817): n is a, c, g, or t
  misc_feature (1589)..(1603): n is a, c, g, or t
  Peptide Sequence Number=SeqID_11979
  Probeset Number=SeqID_19758
nggtcgaacaggccgctcagcgccagcgtacccttgaccacgtcgtccggcacgccgtagctcgccggccaggcgggcgcggccagcatcgcggccaggtgaccgccgggcgaactgccgccgacgtagatgcgctcgggatcgacgccgtaggccgccgcgttgtggtacagccaggccagcgccgagcgcatctcgcgcacgatttccggcagcgtcgcttcgggcgccagcgtgtattccggcaccgccaccgccgcgccggccgcgttgaaggcctcggccatcaccggcgcgtcttccttgcgctgcgcgcgccagtagccgccatggatgaacacgaacagcggcgccgggccgcggttcgccgccggcaggaacaggtccagccgctcgtcctggcccatgccgtaacgcaggttcagcaggccgggacggcgcgacttcaccgcggcggccgactcggcgtagcggcgcacgcaggcgtcgaagtccgccaccgactcgcgggcgttgtattgcacctcgcgctcggcgatggtggggaaaaagagatcgatgtccgcgtcacgcatgaatggcctgcctgtcgtcctgggaaatgatgtgttcgatgaactgcgccgtcttgcggtaatgcgccgccagcatcgccaccgagcgctcgacgtcgcgcgacagcgcggcatcgagcagctggcggtgctcgtcnnnnggagggcggnnnngccatcgtnnnccccgnnnntcnnnnnnnnggcttggggcngcgccgaagatgagcannnannnnncgtccaagcacgcggtgatcnnnctgaccaagtcggcggcgatcgagtatgcgaagaagaaaatccgcgttcaacgcggtatgcccggcggtgatcgacaccgatatgttccgccgtgcctatgaggccgacccgcgcaaagctgaatttgctgccgccatgcacccggtcgggcgtattggcaaagtcgaggaaatcgccagtgcggtgctttatctgtgcagtgacggcgctgcctttaccacaggccaggcattggcggtggacggtggtgcgaccgcgatttaggaactgatgctgatgccattcagaaaagcgttggcggcgctgtgaggcttttctgcaggtggccaggtgccctggccgaatgtgtatcaataggtaaataatccaattaaatcaatgatttaataaatcttcaccacggctgtcattgggcttctgtgcttaactggtttgggttaaatgacaacagtttaagtgagtggctcatggatttagggatcgatcgacaagcccttgtaccggtagtgcagcaaatcgtcagcgcgttggccgcctggattcgcgaaagcggagccagtcccgggacgcggttgccttccgttcggcaactggcccacgagaacctgctcagccagtccagcgtgatcgaggcgtttgagcggatggttgcccaaggcgtgctggcctcaaggcaaggcgcgggtttctgtgtggcccagccacccgccgaacgtggccttcgctgcgaaaaccaatggtatgagggcgccgagtccgggtggggcgccnnnnnnnnnnnnnnn

SEQ ID NO: 5356 - DNA, 677 bp, Zea mays
  misc_feature (1)..(1): n is a, c, g, or t
  misc_feature (674)..(677): n is a, c, g, or t
  Peptide Sequence Number=SeqID_11980
  Probeset Number=SeqID_19759
ncctgctgcggcccctgctgccgctgaaaaacctgccgctgctgccgaggcccctgcggccccggctgctgtaccggcagcgcctgccgccgctactgtccaggacattcatgttccggacatcggttcgtcgggcaaggccaagatcatcgagctgctggttaaagtcggcgacaccgtcgaagccgaccagtcgctgatcaccctggagtccgacaaagcctccatggaaatcccttcgccggctgccggcgtggtggaaagcattgccgtgaagctggaagacgaagtcggcactggtgacttcatcctcaaactgaaagtcgcgggcgcttcggctcctgctgctgccgctccagccgccgctgctccggccgccaaggctgaagctgcacctgctgccgcccctgcgcctgctgcaaaagccgaggccgcaccggctccggcggctgcacctgcgccaagcggtgccaaggttcatgccggccctgccgtgcgccaactggcccgtgaattcggcgtcgagctgagcgctgtgtcggccactggcccacacggtcgcgtgctgaaggaagacgtgcaggtttacgtcaaatccatgatgcagaaggccaaggaagctccggcagccggtggcgctaccggtggttcgggcattccgccgatccgcaccnnnn

SEQ ID NO: 5357 - DNA, 896 bp, Zea mays
  misc_feature (733)..(737): n is a, c, g, or t
  misc_feature (772)..(775): n is a, c, g, or t
  misc_feature (812)..(818): n is a, c, g, or t
  misc_feature (837)..(837): n is a, c, g, or t
  misc_feature (839)..(839): n is a, c, g, or t
  misc_feature (841)..(841): n is a, c, g, or t
  misc_feature (848)..(849): n is a, c, g, or t
  misc_feature (853)..(853): n is a, c, g, or t
  misc_feature (856)..(857): n is a, c, g, or t
  misc_feature (859)..(859): n is a, c, g, or t
  misc_feature (865)..(872): n is a, c, g, or t
  misc_feature (874)..(882): n is a, c, g, or t
  misc_feature (891)..(896): n is a, c, g, or t
  Peptide Sequence Number=SeqID_11981
  Probeset Number=SeqID_19760
gatgacggtctggccgcccagctgctgcggcagtttcgccgccaccaggcgcgccaccacgtccgcgccgccgcccgcggcgaagggcacgatcaatgtgatgggcttggcgggatagggggcctgggcccaggcgggggaaaagcccagggcgagcgcgagggcggcgcccagccgcaagcgcctcgccatgcatggcttggtcatgttgatgtctccgtatggtttttttatgtggagccattatctggacctggccatgcgagttccaatgaaaaaatattattttccatacgatggcgcgtatggcggcgtcggcggcgtcaggcggccgtattacgccgatcctggttcaaaactgatagcgcacaccgacctggccgctgtagtcgtgtttcagtttgccggcgaagctgctttcgacctggctgtaaacgcgccagttgggcgacagcctggcgttgagcgacacgttgaccagataacggctgtcgtccgccatcggattgctcaacctgtctcccggaacgctgttgttcaggatctcgacactgccgccgcgccgcaggttctgcagccggaacagccccgcggacagggtcagcgcatgctgttcgtccgactccagggtcaacccggcagcggcgccgatcttggcatagatcggcgtgctggcattgatccgcacatcgacgctgttgtcggcgccgtgcagcgtataggcgctggtgcnnnnngtggccacttcgatcgagggttcgatgaaggcgcnnnnattgaacaggttctgccgccatcccgcctgcacgctnnnnnnnagcgacgtggatcgcgcgncntngccgtcnntgtncanntngaccgnnnnnnnntnnnnnnnnncggttttcnnnnnn

SEQ ID NO: 5358 - DNA, 896 bp, Zea mays
  misc_feature (1)..(6): n is a, c, g, or t
  misc_feature (15)..(23): n is a, c, g, or t
  misc_feature (25)..(32): n is a, c, g, or t
  misc_feature (38)..(38): n is a, c, g, or t
  misc_feature (40)..(41): n is a, c, g, or t
  misc_feature (44)..(44): n is a, c, g, or t
  misc_feature (48)..(49): n is a, c, g, or t
  misc_feature (56)..(56): n is a, c, g, or t
  misc_feature (58)..(58): n is a, c, g, or t
  misc_feature (60)..(60): n is a, c, g, or t
  misc_feature (79)..(85): n is a, c, g, or t
  misc_feature (122)..(125): n is a, c, g, or t
  misc_feature (160)..(164): n is a, c, g, or t
  Peptide Sequence Number=SeqID_11982
  Probeset Number=SeqID_19761
nnnnnngaaaaccgnnnnnnnnnannnnnnnncggtcnanntgnacanngacggcnangncgcgcgatccacgtcgctnnnnnnnagcgtgcaggcgggatggcggcagaacctgttcaatnnnngcgccttcatcgaaccctcgatcgaagtggccacnnnnngcaccagcgcctatacgctgcacggcgccgacaacagcgtcgatgtgcggatcaatgccagcacgccgatctatgccaagatcggcgccgctgccgggttgaccctggagtcggacgaacagcatgcgctgaccctgtccgcggggctgttccggctgcagaacctgcggcgcggcggcagtgtcgagatcctgaacaacagcgttccgggagacaggttgagcaatccgatggcggacgacagccgttatctggtcaacgtgtcgctcaacgccaggctgtcgcccaactggcgcgtttacagccaggtcgaaagcagcttcgccggcaaactgaaacacgactacagcggccaggtcggtgtgcgctatcagttttgaaccaggatcggcgtaatacggccgcctgacgccgccgacgccgccatacgcgccatcgtatggaaaataatattttttcattggaactcgcatggccaggtccagataatggctccacataaaaaaaccatacggagacatcaacatgaccaagccatgcatggcgaggcgcttgcggctgggcgccgccctcgcgctcgccctgggcttttcccccgcctgggcccaggccccctatcccgccaagcccatcacattgatcgtgcccttcgccgcgggcggcggcgcggacgtggtggcgcgcctggtggcggcgaaactgccgcagcagctgggcggccagaccgtcatc

SEQ ID NO: 5359 - DNA, 896 bp, Zea mays
  misc_feature (743)..(744): n is a, c, g, or t
  misc_feature (746)..(747): n is a, c, g, or t
  misc_feature (749)..(750): n is a, c, g, or t
  misc_feature (761)..(762): n is a, c, g, or t
  misc_feature (766)..(767): n is a, c, g, or t
  misc_feature (773)..(776): n is a, c, g, or t
  misc_feature (778)..(788): n is a, c, g, or t
  misc_feature (790)..(801): n is a, c, g, or t
  misc_feature (806)..(806): n is a, c, g, or t
  misc_feature (811)..(814): n is a, c, g, or t
  misc_feature (826)..(831): n is a, c, g, or t
  misc_feature (833)..(834): n is a, c, g, or t
  misc_feature (836)..(896): n is a, c, g, or t
  Peptide Sequence Number=SeqID_11983
  Probeset Number=SeqID_19762
accgtgatcggggcctacgactgggaacgcggtatccggcaatgcctgcgtctggacctgagcttcgcctgggataaccgcccggccgccgccggtgatgacctgaccctggcgctggattatgccagcgtgtccgcgcgcatccaggcctttgccgagcaggcgcagttccagctggtggaaaccttcgccgagcgcctggccgaagtcttgatgagtgaattccagattccctggctgcacctcaaactgaccaagcccggcgccgttccggctgccaagggcgtgggcgtggagatcgagcgcggatgtcgctaactcaggtttaccttggtcttggcagcaatatcgagcgtgaggcccatttacgcgctggcctcgatgcgctggcgggtttcctgacggatctgcgctgttcgccggtgtttgaaagccagccggtgggcatcaagagcgggccgttcttcaatctggtggtgtcggcgtataccgacctgccgctgatggagctggaccgtcgattgaaattcatcgaggccgacaatggccgctacgccccggatcgcaagggcttgccgctggacatcgacgtgctgctgtatggcgaattggtgggtaacttcgatggcctgattctgccccgggccgaaatcctgaagaacgcgtttgtgctgtggccgctgtcgttgatggcgccggaacgtgtgcatcctgaggcaggcaagacatttgccgcgctttgnnannanncgcaaatcgannaggnnctggcnnnngnnnnnnnnnnntnnnnnnnnnnnncgttnacgcnnnntgcgctcttgtnnnnnntnnannnnnnnnnnnnnnnnnnnnnnnnnnnnnnnnnnnnnnnnnnnnnnnnnnnnnnnnnnnnn

SEQ ID NO: 5360 - DNA, 919 bp, Zea mays
  misc_feature (817)..(817): n is a, c, g, or t
  misc_feature (838)..(838): n is a, c, g, or t
  misc_feature (840)..(840): n is a, c, g, or t
  misc_feature (857)..(857): n is a, c, g, or t
  misc_feature (865)..(865): n is a, c, g, or t
  misc_feature (869)..(871): n is a, c, g, or t
  misc_feature (876)..(877): n is a, c, g, or t
  misc_feature (884)..(888): n is a, c, g, or t
  misc_feature (890)..(897): n is a, c, g, or t
  misc_feature (900)..(912): n is a, c, g, or t
  misc_feature (914)..(914): n is a, c, g, or t
  misc_feature (916)..(916): n is a, c, g, or t
  misc_feature (918)..(919): n is a, c, g, or t
  Peptide Sequence Number=SeqID_11984
  Probeset Number=SeqID_19763
tgtgccgccaccggtgccgacggcctgcatttgtctcgccagcatgcctatgacctggtgatgctcgacgtcaatttgccgttgatggatggctgggatgtgttgcaacgcatccgccagaacagcagcacgcggatcatgatgctgaccgcccagggccgcctcgccgaccggatcaagggcctggacttgggcgccgatgattacctggtcaagccgtttgaattccccgaattgctcgcgcgcgtgcggaccttgatgcgccgcagcgtgcactcgccggtgccggatgtgttgcgggtggccgacctggaactggaccagggccgccaccgggcgtttcgcggcttgcagcgcattgacctgaccaccaaggagttcgccctgctgcatttgctgatgcgtcagagcggcgtggtgctgtcccgcacgcagatcatctcgttcgtatgggacatgaactttgattgcgacaccaatgtggtggaagtgtcgatccgccgtctgcgcgcgaagatcgatgacccgttcgagcgcaagttgatccataccttgcgcggcgtgggttatgtgctggaagaccgtgaatgacggtcaggcgtgcacctcgtcgtgctcgtcatgctgaaaaccttcgccttcgatctggatcgtggcgtgggaaatatcgaattgctcatgcagtaactccgtcacctggctgaggatctgttgctcggcgccttgcgccgaatccgccaccaagtgagtgctcagcacatttttgccgctggtgagggcccagatgtgcaggtcgtgcacgtccttgaccccgggnacgccgcgaattgcctgttcnancttgtcgatgtcgatgncgtccggnacgnnntgcannagcacgnnnnngnnnnnnnngannnnnnnnnnnnntncntnn

SEQ ID NO: 5361 - DNA, 602 bp, Zea mays
  misc_feature (1)..(2): n is a, c, g, or t
  misc_feature (4)..(4): n is a, c, g, or t
  misc_feature (10)..(14): n is a, c, g, or t
  misc_feature (16)..(23): n is a, c, g, or t
  misc_feature (602)..(602): n is a, c, g, or t
  Peptide Sequence Number=SeqID_11985
  Probeset Number=SeqID_19764
nncnggaatnnnnncnnnnnnnnaccggaaacaccctgcgcgccaacggcctggaaccccaggactttatcgctgacatcagctcccgcctgatcgtcaacaaagcttccatgaaaatgcagcacgcccgtatccaggcgttgatcgacaccctgcgcaaggcagtggagtctcgacaccgcggttgactcacccgcgcggccctaagccgcgcccgtctatccgcctcatagccagaattctcaggtgcccaagcggaaacgactgctagtttagggcgcctgagtttttgccaattctattgaggccctcgctatgaccacgtccactgcaattgcccgactcaacgctgccgacccggatttcgcccatcatctggatcatctgctgagctgggaaagcgtgtccgacgatacggtcaaccagcgggtgctcgacatcatcaaggccgtgcgcgagcgcggtgacgcggcgctggtggacttcacccggcagttcgatggcctggacgtcccctccatggccgacctgatcctgccccgcgaacgcctggaactggccttgacccgcatcaccgcgccccagcgcgaagccctggaagn

SEQ ID NO: 5362 - DNA, 886 bp, Zea mays
  misc_feature (1)..(3): n is a, c, g, or t
  misc_feature (9)..(21): n is a, c, g, or t
  misc_feature (23)..(26): n is a, c, g, or t
  misc_feature (30)..(35): n is a, c, g, or t
  misc_feature (37)..(42): n is a, c, g, or t
  misc_feature (67)..(68): n is a, c, g, or t
  misc_feature (78)..(81): n is a, c, g, or t
  misc_feature (84)..(88): n is a, c, g, or t
  misc_feature (128)..(129): n is a, c, g, or t
  misc_feature (886)..(886): n is a, c, g, or t
  Peptide Sequence Number=SeqID_11986
  Probeset Number=SeqID_19765
nnntgatcnnnnnnnnnnnnngnnnncaannnnnnannnnnncatgctgcgcaaggtgccggacatnntgatcggcannnnggnnnnnatgatcgaacaactgaacgccggcaacctggacctcaagnnagttgaagtcctggtgctcgacgaagccgaccgcatgctcgacatgggctttgccgacgacgtgcagcgcctggtacaagagtgcgtgaaccgccagcagaccatgctgttctcggccaccaccggtggttcgaccctgcgtgacatggttgccaaggtcctgaacaaccccgagcacttgcaggtcaacaatgtcagcgacctgaactcgaccacccgtcagcagatcatcaccgctgaccacaacgtgcacaaagagcagatcctcaactggttgctggccaacgagacctatcagaaggccatcgtgttcaccaacacccgggccatggccgaccgtatctacggtcgcctggtggctcaggagtacaaggcgttcgtcctgcacggtgaaaaagaccagaaggaccgcaagctggccatcgaccgcctcaagcaaggcggcgtgaagatcctggtggccaccgacgttgccgcccgcggcctggacgtggatggcctggacatggtgatcaacttcgacatgccccgcagcggcgacgaatacgtacaccgtatcggtcgtaccgggcgtgccggcaacgatggcctggcgatctcgctgatctgccatggcgactggaacctgatgtcgagcatcgagcgctacttgaagcagtcgttcgagcgccgcaccatcaaggaagtcaaaggcacctacggcgggccgaagaaggtcaaggcgtcgggcaaggctgttggcgtgaagaagaaaaan

SEQ ID NO: 5363 - DNA, 336 bp, Zea mays
  misc_feature (1)..(5): n is a, c, g, or t
  Peptide Sequence Number=SeqID_11987
  Probeset Number=SeqID_19766
nnnnncgaactcggcatcgacgtgcagcggctgggtggcgcggcgttcgtgttcgaggatgccgatgcgggcgtcgagcgcgagcccggataggatgatgcggcgagtgggcatgatgaaaacctgggtggaatcccggaattgtaaggcggcggcggaccgggccggcgcgctggctacaattcggccatggccggacgcccgcgcggggacggcgaacaagggatgaaatgcaacagatgcacgatgcggtcattgtaggcggcggcccggccggcgcctcctgcgccctctggctggcccggctgggcctggcgccgctgctggtcgaggcca

SEQ ID NO: 5364 - DNA, 336 bp, Zea mays
  misc_feature (332)..(336): n is a, c, g, or t
  Peptide Sequence Number=SeqID_11988
  Probeset Number=SeqID_19767
tggcctcgaccagcagcggcgccaggcccagccgggccagccagagggcgcaggaggcgccggccgggccgccgcctacaatgaccgcatcgtgcatctgttgcatttcatcccttgttcgccgtccccgcgcgggcgtccggccatggccgaattgtagccagcgcgccggcccggtccgccgccgccttacaattccgggattccacccaggttttcatcatgcccactcgccgcatcatcctatccgggctcgcgctcgacgcccgcatcggcatcctcgaacacgaacgccgcgccacccagccgctgcacgtcgatgccgagttcgnnnnn

SEQ ID NO: 5365 - DNA, 851 bp, Zea mays
  misc_feature (814)..(816): n is a, c, g, or t
  misc_feature (845)..(845): n is a, c, g, or t
  misc_feature (848)..(851): n is a, c, g, or t
  Peptide Sequence Number=SeqID_11989
  Probeset Number=SeqID_19768
tgatgtaccaggccgtgaactccgggcgtgccgacaccgccgccaccgaccagtcctcggtcaagtacctgatggtgcaaaacccgggccgctaccgcagcccggcctacgcctggagcccccagacctacgcgtgcgccgtaaagcgtggcgaccaggactggctgaacttcgtcaacaccgcgctgcacgaagccatgaccggcgtggagttcccgatgtacaaggcctcgttcaagcaatggttcggtgtggatctgccagagcctgcgatcggtttcccggttgagttcaagtaattcgtaaacactgggggcgtcgctgacggcgccccaatcaggtactgctgaccatgaactatcagttgaactttgccgctgtgtggcgcgacttccccagcttgctggcggggctcggcctcggccttgaactggcactgctgtccatcgccatcggttgcgtgatcggcctgttgatggcgtttgccatgctgtccagacaccgcgcgctgcgcatcgtggcctcggtgtatgtgacggtgatccgcaacaccccgatcctggtgctgatcctgttgatctacttcgccttgcccagcctcgggatccggctggacaagatcccctcgttcatcatcaccctgtcgctgtacgccggtgcctacctcaccgaagtattccgcgcaggcctcttgaacattcccaaggggttgcgtgaagcgggcctggccatcggcttgggcgaatggcgcatccgcgcgtacatcaccgtgccgctgatgctgcgcaatgtgttgccggcgctgtcgaacacnnnatctcgctgttcaaggacacctcccctcnggnnnn

SEQ ID NO: 5366 - DNA, 993 bp, Zea mays
  misc_feature (1)..(2): n is a, c, g, or t
  misc_feature (25)..(25): n is a, c, g, or t
  misc_feature (96)..(100): n is a, c, g, or t
  misc_feature (104)..(106): n is a, c, g, or t
  misc_feature (445)..(446): n is a, c, g, or t
  misc_feature (783)..(785): n is a, c, g, or t
  misc_feature (859)..(862): n is a, c, g, or t
  misc_feature (870)..(872): n is a, c, g, or t
  misc_feature (881)..(883): n is a, c, g, or t
  misc_feature (891)..(894): n is a, c, g, or t
  misc_feature (898)..(907): n is a, c, g, or t
  misc_feature (918)..(932): n is a, c, g, or t
  misc_feature (934)..(939): n is a, c, g, or t
  misc_feature (941)..(954): n is a, c, g, or t
  misc_feature (958)..(966): n is a, c, g, or t
  misc_feature (969)..(970): n is a, c, g, or t
  misc_feature (973)..(981): n is a, c, g, or t
  misc_feature (983)..(983): n is a, c, g, or t
  misc_feature (985)..(991): n is a, c, g, or t
  Peptide Sequence Number=SeqID_11990
  Probeset Number=SeqID_19769
nncgagctgccgctctgacgaggcnattgcgcaacaccccgtgcgcgggccaaaaaaaatgccgcattgcggcatttttcgttagcggaaattggnnnnnagtnnncagcgtaattgcaggggttgggcggacattccaataccgcatggagccattccgcttgcgcttttgcgtcacgcaatcgcaagaagacgcccataaactcaaagggttatactttcatccatacggctttcaaggcttgtacgcgccttctgcccctgctatccgctaaacgggaagcccgtgtcgcggaaggatttcctgcatcgtaatcgagtgaagcactcgtaaaggtgaagcgattatgtcttcggaaatagaatccctatccacgtcttacttgtttgggggaaatgccccctacgttgaggagctttacgaagcctacctcgacaaccccgnntcggtacctgacaactggcgcgaatacttcgaccagctgcagcacgctcccgcgaccgacggccaggaatccacccgcgaccaggcccacgctcccatcgtcgaatcgttcgcccagcgcgccaaggccaatgccttcgtgcaacgcgccgccgaacccgatctgagcgtcgcctccaagcaagtctcggtgcaatcgctgatcgccgcctaccgctcgctgggttcgcgctgggccgacctggatccgctcaagcgccaggaacgtcccccgatccccgaactcgatccggccttctacggcctgaccgaagccgacctggaccagacctactcgnnnaccaacacctacttcacgaccgccagcaccatgacgctgcgcgacatcctgaaggcgctgcgcgacacgtactnnnncagcatcnnngctgaattnnngcacatcnnnnaccnnnnnnnnnngcgctggatcnnnnnnnnnnnnnnnannnnnntnnnnnnnnnnnnnnactnnnnnnnnnaanngcnnnnnnnnntncnnnnnnnga

SEQ ID NO: 5367 - DNA, 1001 bp, Zea mays
  misc_feature (1)..(27): n is a, c, g, or t
  misc_feature (34)..(44): n is a, c, g, or t
  misc_feature (47)..(47): n is a, c, g, or t
  misc_feature (49)..(55): n is a, c, g, or t
  misc_feature (57)..(60): n is a, c, g, or t
  misc_feature (62)..(70): n is a, c, g, or t
  misc_feature (72)..(72): n is a, c, g, or t
  misc_feature (75)..(82): n is a, c, g, or t
  misc_feature (85)..(104): n is a, c, g, or t
  misc_feature (109)..(109): n is a, c, g, or t
  misc_feature (112)..(112): n is a, c, g, or t
  misc_feature (114)..(116): n is a, c, g, or t
  misc_feature (152)..(152): n is a, c, g, or t
  misc_feature (228)..(229): n is a, c, g, or t
  misc_feature (999)..(1001): n is a, c, g, or t
  Peptide Sequence Number=SeqID_11991
  Probeset Number=SeqID_19770
nnnnnnnnnnnnnnnnnnnnnnnnnnngatcccnnnnnnnnnnnccngnnnnnnngnnnncnnnnnnnnnanaannnnnnnnacnnnnnnnnnnnnnnnnnnnnaaacncgnannngaaatcgacgagcgcctggcgatgatcatcgacccngatgctcgccaccggtagctcgatggttgccaccatcgacctgctgaaaaaagccggttgcaaggacatccgcgcnnatgtgctggtagccgctcccgaaggcatcgccgccgtcgagaaagcccacccggacgtgttgatctacaccgcgtccatcgatgaacgcctgaacgaacacggctacatcatcccgggcctgggcgacgccggcgacaagatcttcggtaccaagcagaaggacgcgtgaccatgcaggatgaattcaacgacccgctttggcgccagatcctgtctggcgcacagatgctcttcgtagcatttggcgcgctggtgttgatgccgctgatcaccggtctcgatccaaacgtcgccctgtttaccgcaggcttgggcaccttgttgttccaagtggtcaccgggcgccaagtcccggtgttcctggcgtcgagctttgcgtttatcaccccgatcattctcgccaaaggccaattcggcctcgcggcgaccatgggcggcgtgatggcggcaggtttcgtttacaccttcctggggctggcggtgaagatcaagggcaccggtttcatcgaccggctgctgccgccggtggtgatcgggccggtgattatctccatcggcctggccatggcgccgattgccgccaacatggcgatgggcaaggcgggtgacggtagcgagttgatccactaccagaccgccatgctgatctcgatgccggcgctgctgaccacattgatcgtggcggtattcggcaaaggcattttccgcctggtgccgatcatctccggcgtgctggtgggtttcgccatgtcgttctacttcggtgtannn

SEQ ID NO: 5368 - DNA, 620 bp, Zea mays
  misc_feature (120)..(123): n is a, c, g, or t
  Peptide Sequence Number=SeqID_11992
  Probeset Number=SeqID_19771
tgagcttcgctcgggataccaaaaacagaaggaaagaggatttaactatggccaccaagaaacccaagggattgggtcgcggacttgacgctttgctgggcgccgacgcgcccgccatcnnnnacatcggcaaggccccggccaagcccgagggtctgccgtccaccctgcctgtttcgaagatgcgggccggcaagtatcagccgcgcacccgcatggacgagggcgcgttgggcgagctggccgagtcgattcgcacacaaggcatcatgcaacccattcttgtgcgcgcgctgggcgatgcgcccggccattacgaaatcatcgcgggcgaacgccgtttccgcgccgcgcagctggccggcctgaaggaagtgccggtgctggtgcgcgaagtcgccgacgaaaacgcggccgtcatggcgctgatcgagaacatccagcgcgaagacctgaacccgctggaagaggcgcatggcgtgcgccgcctgctggacgaattcggcctgacccacgagcaggccgcccaggccatcggccgctcgcgctcggccaccagcaacctgctgcgcctgttgaacctggctgccgcggtgcagaccatgctgctggccggcgac

SEQ ID NO: 5369 - DNA, 578 bp, Zea mays
  misc_feature (1)..(4): n is a, c, g, or t
  misc_feature (370)..(372): n is a, c, g, or t
  misc_feature (390)..(390): n is a, c, g, or t
  misc_feature (392)..(392): n is a, c, g, or t
  misc_feature (407)..(408): n is a, c, g, or t
  misc_feature (473)..(474): n is a, c, g, or t
  misc_feature (476)..(478): n is a, c, g, or t
  misc_feature (516)..(518): n is a, c, g, or t
  misc_feature (521)..(546): n is a, c, g, or t
  misc_feature (551)..(558): n is a, c, g, or t
  misc_feature (565)..(571): n is a, c, g, or t
  misc_feature (574)..(574): n is a, c, g, or t
  misc_feature (576)..(578): n is a, c, g, or t
  Peptide Sequence Number=SeqID_11993
  Probeset Number=SeqID_19772
nnnnggttgtagacgttggtccattcgggatgatggttcagcttctcggcgaacatcgccacccgcgccatgaacccgaaggcggcgttgaaattggcgaagcggaagcgcttttcgatcgcgtcgcgcatcgcgacggcctgccaaccggacagggccgcgaccgcgatgtcggtgccgatacgggcagggggaaacatgctcatggcgaactccaggaaaggccaggaaagagcgccgcgccgttcgcgccggcaacggcccggcgcgccatcgcggccggcggcatgccgccggcgcacggcgggcgcggcgcccgcatgctactactgcttgaccgcgtacaggtagatctcgacccggcggttcnnngcccggccgtcggcggtngngttgtcgccgatcgnntcgttgggcccgcgcccttcgatcgtcagccgcgtcgccgccacgccctgctcgcgacagatagnncnnnacgctgcgcgcccgcttcaccgacaaagtctggctgtnnnccnnnnnnnnnnnnnnnnnnnnnnnnnncaccnnnnnnnngcgcagnnnnnnntgntnnn

SEQ ID NO: 5370 - DNA, 578 bp, Zea mays
  misc_feature (1)..(3): n is a, c, g, or t
  misc_feature (5)..(5): n is a, c, g, or t
  misc_feature (8)..(14): n is a, c, g, or t
  misc_feature (21)..(28): n is a, c, g, or t
  misc_feature (33)..(58): n is a, c, g, or t
  misc_feature (61)..(63): n is a, c, g, or t
  misc_feature (101)..(103): n is a, c, g, or t
  misc_feature (105)..(106): n is a, c, g, or t
  misc_feature (171)..(172): n is a, c, g, or t
  misc_feature (187)..(187): n is a, c, g, or t
  misc_feature (189)..(189): n is a, c, g, or t
  misc_feature (207)..(209): n is a, c, g, or t
  misc_feature (575)..(578): n is a, c, g, or t
  Peptide Sequence Number=SeqID_11994
  Probeset Number=SeqID_19773
nnnancannnnnnnctgcgcnnnnnnnnggtgnnnnnnnnnnnnnnnnnnnnnnnnnnggnnnacagccagactttgtcggtgaagcgggcgcgcagcgtnnngnnctatctgtcgcgagcagggcgtggcggcgacgcggctgacgatcgaagggcgcgggcccaacganncgatcggcgacaacncnaccgccgacggccgggcnnngaaccgccgggtcgagatctacctgtacgcggtcaagcagtagtagcatgcgggcgccgcgcccgccgtgcgccggcggcatgccgccggccgcgatggcgcgccgggccgttgccggcgcgaacggcgcggcgctctttcctggcctttcctggagttcgccatgagcatgtttccccctgcccgtatcggcaccgacatcgcggtcgcggccctgtccggttggcaggccgtcgcgatgcgcgacgcgatcgaaaagcgcttccgcttcgccaatttcaacgccgccttcgggttcatggcgcgggtggcgatgttcgccgagaagctgaaccatcatcccgaatggaccaacgtctacaaccnnnn

SEQ ID NO: 5371 - DNA, 756 bp, Zea mays
  misc_feature (1)..(3): n is a, c, g, or t
  Peptide Sequence Number=SeqID_11995
  Probeset Number=SeqID_19774
nnngtcagcctgtcgttcgacgcctcgctgctcgcgggaaaggaatccgccgggttgcggggaagttttgaggtggaggcgggtttccgccgcatcctgcaaggcagcggattcgaagcggtggcgcgtgcgccggggcgctacatgctgcgcggcttgccgaaggcggcaggctcggacgccaccgatgtgacccagctgaacgccgtcaccgtcagcggctaccgcgaaggcgacgcgcccaaccggggctacaccgtcagcagcacgtccagcgccaccaagctagacctggcgccgaaggaaacgccgcagagcatcaccacgttcacggcgcagcagattcaggatcaggggttgttgacgctgagcgaggtgcttgaccagactccaggcatcacgttggtgaccgctggcgttgaaggcgctggcagccaaccggtctactcgcgcacctttcctgtcagatcggtgcagatggacggagtcatggccagcagctatatcctgtccggctcgtcgaatggcgacatcggcatgcaggattcctttctatatgaacgtatcgacgtgattcgtggctccaccagcctgaccggcggcgaaggcgacgcttcggccagtctgaacttcgtgcgcaaacatccctatctggatcgtcacctgtcggcgaacctgaaatacggcagctggaacaatcgccgcgccgagctggacctctccacgccgatcaatgacaggttgcgcgtgcgaatc

SEQ ID NO: 5372 - DNA, 251 bp, Zea mays
  misc_feature (1)..(2): n is a, c, g, or t
  Peptide Sequence Number=SeqID_11996
  Probeset Number=SeqID_19775
nngatgcgctgcacgatctcggaggtgcgggccacgtcgatgtccagcgtcacctcgggatggctgcgccagtagccgggcagcacccggtcgaacatcagctcgacgaagccttcgcccagcaccaggtcgatgtggccgcgctccgccttgcgcaggctgtcgatttccgagaagaagctttcctggatgttctgctggcgcttcacgtagcgcgccaggatgtggccggcgtcggtcggcaccacgcc

SEQ ID NO: 5373 - DNA, 251 bp, Zea mays
  misc_feature (250)..(251): n is a, c, g, or t
  Peptide Sequence Number=SeqID_11997
  Probeset Number=SeqID_19776
ggcgtggtgccgaccgacgccggccacatcctggcgcgctacgtgaagcgccagcagaacatccaggaaagcttcttctcggaaatcgacagcctgcgcaaggcggagcgcggccacatcgacctggtgctgggcgaaggcttcgtcgagctgatgttcgaccgggtgctgcccggctactggcgcagccatcccgaggtgacgctggacatcgacgtggcccgcacctccgagatcgtgcagcgcatcnn

SEQ ID NO: 5374 - DNA, 214 bp, Zea mays
  misc_feature (2)..(6): n is a, c, g, or t
  Peptide Sequence Number=SeqID_11998
  Probeset Number=SeqID_19777
gnnnnngacaaaattcacgctgacggtgatcaacgccactgccagcgccggcagcaacgggctgatgtcgccgaaggtaatcagcaccgcattgtcgcggaccatgctgccccaatcggcggtgggcggttgaatgcccaggccaaggaacgacagcgcgctgataaacaaaaacacgaagcaaaagcgcaggccgaattcggcaatcaacggc

SEQ ID NO: 5375 - DNA, 214 bp, Zea mays
  misc_feature (209)..(213): n is a, c, g, or t
  Peptide Sequence Number=SeqID_11999
  Probeset Number=SeqID_19778
gccgttgattgccgaattcggcctgcgcttttgcttcgtgtttttgtttatcagcgcgctgtcgttccttggcctgggcattcaaccgcccaccgccgattggggcagcatggtccgcgacaatgcggtgctgattaccttcggcgacatcagcccgttgctgccggcgctggcagtggcgttgatcaccgtcagcgtgaattttgtcnnnnnc

SEQ ID NO: 5376 - DNA, 303 bp, Zea mays
  Peptide Sequence Number=SeqID_12000
  Probeset Number=SeqID_19779
tgatccgcgagggcgtggacctggccctgcgcgtgcggaccaagctggataccgatgccgaactggtggtgcgccacctgggcacggcacgcggcacgctggtggccagccccggctacctgcagcgtcacggcgcgcccgacaccccgcaggacctggcctcgcacaccacgctgagtttcagcgatccacagaacgaggtgcgctggccgctgcgcaacgacaagggcgaggaagtgcatatcgagctgaagccgcagctgtcttgcaatgacttcatcgtgctggtggaggccgccgtgc

SEQ ID NO: 5377 - DNA, 726 bp, Zea mays
  misc_feature (1)..(15): n is a, c, g, or t
  misc_feature (19)..(22): n is a, c, g, or t
  misc_feature (25)..(29): n is a, c, g, or t
  misc_feature (34)..(35): n is a, c, g, or t
  misc_feature (40)..(40): n is a, c, g, or t
  misc_feature (723)..(726): n is a, c, g, or t
  Peptide Sequence Number=SeqID_12001
  Probeset Number=SeqID_19780
nnnnnnnnnnnnnnnattnnnnatnnnnnccccnntactnctccgccctgcactaccgcgaagcgttgccgtttcgcctctcaccgctgtccggggccgcgcgcccggtgcgctgcgccaccatgcagttgattgaacggccacgggcttacgtgcacttgccgacggcttcgcttcagttgatttatgacttgcgcctggaagtgcccaaggaagcaaagtccctgagcctgtttcatgtggacgagcgcctggagggtgaccaactggtggcccgcctggaccggcaacgcccggacctgtacctgatgccgctcaaggacggacagccgtgtgcagagctgtataccttgaagaaggatcagctgtatccggcgagtacgcgagggttgtatctggcagagagctttgcccaacaggaaggctgggtggtgcgtgatgaaaggatccgctggaaagattggctacgccagcaagggctgagtgcgccagagaaagagtcgaaattgaagcggttgaccggcaaggccaagctgcttttgaagaaaatcgtcccgcacaagcgcgctcggtaacctgcggcaagggagcacgctcccctgccactgtcggtcagttactgcggattttttccacgattgccgtggtcgagctgttttcaaccagccccaacactttgaccttgccgccataagcactgacgatatcggcaccgaccacctnnnn

SEQ ID NO: 5378 - DNA, 306 bp, Zea mays
  Peptide Sequence Number=SeqID_12002
  Probeset Number=SeqID_19781
gatctgcgccgtgctgatctggcattgacgcccgttcgggtttacgcggatcgaaccatttagattaaagtatacaatgttcagaaattacctcagacggccaatttccgggcatcccggccagcccggcaaaggaaggacttccgtggacgagctttcgcagcaggcatttctgaatcacatcggcggcgaatgggtcgcctgcgcctcgggcgcgacggcgccgaacctgaacccggccgacagcgccgacgtggtggggcggttccagcaatcggacgccaccgatggcgcccgcgccgtggc

SEQ ID NO: 5379 - DNA, 306 bp, Zea mays
  Peptide Sequence Number=SeqID_12003
  Probeset Number=SeqID_19782
gccacggcgcgggcgccatcggtggcgtccgattgctggaaccgccccaccacgtcggcgctgtcggccgggttcaggttcggcgccgtcgcgcccgaggcgcaggcgacccattcgccgccgatgtgattcagaaatgcctgctgcgaaagctcgtccacggaagtccttcctttgccgggctggccgggatgcccggaaattggccgtctgaggtaatttctgaacattgtatactttaatctaaatggttcgatccgcgtaaacccgaacgggcgtcaatgccagatcagcacggcgcagatc

SEQ ID NO: 5380 - DNA, 467 bp, Zea mays
  misc_feature (1)..(2): n is a, c, g, or t
  Peptide Sequence Number=SeqID_12004
  Probeset Number=SeqID_19783
nngaggccctgcccaagcgggccgccttcttcgacgaatcgctcaagggcctgtcggccaccgacatcgacacgctgaaccgcgtgctgaacgtgctggaagagaatttcctgcgcgccgccagcggcaacaagggcgagtaaccacgcccagggccgcccagggcagcccgccaacggtcgcgaccaaagccatccccccgtgccgctacgcgcgggcaaagccccgccattcgtccgtgccattgacacccggaaaggttattgaataacattcaattaatctattgattgttatttcatcttgccggaatccccgcatgccttctgacctcctgcttcgcgccgtgctgatcggcgtcggcgccaccctcgtcatggatctgtgggcgctgctgctcaagcgcctgttcaacgcgccgtcgctggactacgccatggtcggccgctggatcggccacctgccgc

SEQ ID NO: 5381 - DNA, 467 bp, Zea mays
  misc_feature (466)..(467): n is a, c, g, or t
  Peptide Sequence Number=SeqID_12005
  Probeset Number=SeqID_19784
gcggcaggtggccgatccagcggccgaccatggcgtagtccagcgacggcgcgttgaacaggcgcttgagcagcagcgcccacagatccatgacgagggtggcgccgacgccgatcagcacggcgcgaagcaggaggtcagaaggcatgcggggattccggcaagatgaaataacaatcaatagattaattgaatgttattcaataacctttccgggtgtcaatggcacggacgaatggcggggctttgcccgcgcgtagcggcacggggggatggctttggtcgcgaccgttggcgggctgccctgggcggccctgggcgtggttactcgcccttgttgccgctggcggcgcgcaggaaattctcttccagcacgttcagcacgcggttcagcgtgtcgatgtcggtggccgacaggcccttgagcgattcgtcgaagaaggcggcccgcttgggcagggcctcnn

SEQ ID NO: 5382 - DNA, 765 bp, Zea mays
  misc_feature (1)..(20): n is a, c, g, or t
  misc_feature (27)..(28): n is a, c, g, or t
  misc_feature (30)..(30): n is a, c, g, or t
  misc_feature (32)..(34): n is a, c, g, or t
  misc_feature (39)..(41): n is a, c, g, or t
  misc_feature (43)..(45): n is a, c, g, or t
  misc_feature (52)..(60): n is a, c, g, or t
  misc_feature (64)..(66): n is a, c, g, or t
  misc_feature (69)..(72): n is a, c, g, or t
  misc_feature (100)..(102): n is a, c, g, or t
  misc_feature (763)..(765): n is a, c, g, or t
  Peptide Sequence Number=SeqID_12006
  Probeset Number=SeqID_19785
nnnnnnnnnnnnnnnnnnnnctgcatnncngnnncttcnnncnnntggcggnnnnnnnnntggnnnacnnnncccgggcggacgcgttcctgcccatcgnnngtcccttgttcacggagccagcatgacccccgttttcggcatcgccggccgctcaggcagcggcaagaccaccctgatcgaggccatgctgccgctgctgggcgcgcgcggcctgaaggtcagcgtcatcaagcacagccaccacgacttcgagatggagccgcccggcaaggacagcgcgcgctttcgccaggccggggcgcaggaggtgatggtggcgtcgccgttccgctacgccatcgtgcacgagctgcgcggcgcgcccgagccgccgctggccgagcaggtggcccgcctggcgccggccgacctggtgctggtcgagggcttcaagcaggccgccatcccccgcatcgaggtctaccgcccggcgctgggcaagccgccgctgcacgccgaggacggcagcttcctggccgtcgtgaccgacgcggcgctcgataccggcttgccctgcctgccgctgaacgatccggcggcggtggcggacttcatcgcgcgcacggtggggcggggctgaactacacttgaggctgtggaccgcgcggcgccatgctcgcctcgcgaccgtcccgaccccgcccatccgccagcccatttcatgaccacgcccgaccattcccccgacgcccagggcctgccgtcgccgcggcaccggctnnn

SEQ ID NO: 5383 - DNA, 1095 bp, Zea mays
  misc_feature (1)..(195): n is a, c, g, or t
  misc_feature (200)..(200): n is a, c, g, or t
  misc_feature (209)..(212): n is a, c, g, or t
  misc_feature (214)..(214): n is a, c, g, or t
  misc_feature (226)..(227): n is a, c, g, or t
  misc_feature (238)..(239): n is a, c, g, or t
  misc_feature (249)..(253): n is a, c, g, or t
  misc_feature (260)..(265): n is a, c, g, or t
  misc_feature (269)..(271): n is a, c, g, or t
  misc_feature (288)..(290): n is a, c, g, or t
  Peptide Sequence Number=SeqID_12007
  Probeset Number=SeqID_19786
nnnnnnnnnnnnnnnnnnnnnnnnnnnnnnnnnnnnnnnnnnnnnnnnnnnnnnnnnnnnnnnnnnnnnnnnnnnnnnnnnnnnnnnnnnnnnnnnnnnnnnnnnnnnnnnnnnnnnnnnnnnnnnnnnnnnnnnnnnnnnnnnnnnnnnnnnnnnnnnnnnnnnnnnnnnnnnnnnnnnnnnnnnnnnnnnnnngcacnggcgcgcannnntncgcatcggtagnngaagtcgttgnngcattgcgcnnnnngcgcgcnnnnnncgtnnngataaagggatcgcgcnnnatgcgcatggagcgggtagtgacggcttttatttccaatgacggacaagcgtccaaggggcagggggacaaccatgctgcttgagatcgcccgtctgctttccgatgatgtgcgcgcgctgggcgtgttcgagtacatcacgctgcgcgcggtgctggcgtgcgccacggcgttgctgatcggcctggtggccggtccgcgcgtgatccgcaagctgaccgagatgaagatcggccaggccgtgcgttcgtacggtccggaaacccacctggtcaagaccggcacccccaccatgggcggcgtgctgatcctgatttccatcgccatcagcacgttgttgtgggctgactggaccaaccgtttcgtgtgggtggtgctgctggtgacgttcggctttggctggatcggctggatggacgattaccgcaaggtggtctatcgcgatccggaaggcatgccggcgcgccagaagttcttctggcaggcgaccatcggcctggtggccgcggtctatctggcgttcgccgtgtcggcgcccgccaacaccgaactgtggccgctcttcaaagcctgggtgggaagcggcttcacgatgtcgctgccgacgcgcgccgacctgatcgtgccgttcttcaagaccgtcagctatccgctgggcgtgctcggcttcgtggcgctgacctgggccgtgatcgtcggcaccagcaacgccgtcaacctgaccgacggcctcgatggcctggcgatcatgcccaccgtgatggtcggcagcgcgctcggcatcttcgcctacgtggtcggccgc

SEQ ID NO: 5384 - DNA, 784 bp, Zea mays
  misc_feature (1)..(2): n is a, c, g, or t
  misc_feature (784)..(784): n is a, c, g, or t
  Peptide Sequence Number=SeqID_12008
  Probeset Number=SeqID_19787
nncgtttttcggccgcaacctgctgcaagacaacccgttgccgccacgggtagtggtgggcaattaccagtacctggggttgttcgacggcaatgacctggcgattctcagcccacgccaaggcctgcgccgccatgaccaggcactgggcgacagccacgagtcccgtgtgggcagcgatgacccgttgattcagcgagccattacttactaccagggcgccagttatggctacaaacaacagttgttgagctggagggtacccaaggacgaggttcccaaagtgagtacgcgctaaccaaaatgccccggccaggtctgaccggggctttttttagagtctgagttcaccatgcacgcaatcgctgttcgtccgggatcccaacccctcaatttttggctgtgcctcggtgtgccagccatgctggcggtggtcatgctgttgctggagctgacgtcgctggacatggacgttgccaagctgttttacaacgcctccgaaggcggctttgtgggccggcacagtttttttctagaggacattcttcacgatcgcgccaagcagatggtgatcgtgttttcggtgctggcgatcgccgggtttgccggggcctttattgttgagcggcttaagccctaccgccgggaattgggctgcctggtgctctcgctggccctggctacctcgtttgtttcgccgttgaagaccgtgaccggggtgcaatgcccgtggagcgtcaaggagttcggcggccaggagacttacagcgagctgctgagcccn

SEQ ID NO: 5385 - DNA, 978 bp, Zea mays
  misc_feature (1)..(2): n is a, c, g, or t
  misc_feature (813)..(816): n is a, c, g, or t
  misc_feature (847)..(847): n is a, c, g, or t
  misc_feature (850)..(850): n is a, c, g, or t
  misc_feature (855)..(860): n is a, c, g, or t
  misc_feature (862)..(866): n is a, c, g, or t
  misc_feature (878)..(884): n is a, c, g, or t
  misc_feature (886)..(901): n is a, c, g, or t
  misc_feature (903)..(916): n is a, c, g, or t
  misc_feature (919)..(926): n is a, c, g, or t
  misc_feature (928)..(978): n is a, c, g, or t
  Peptide Sequence Number=SeqID_12009
  Probeset Number=SeqID_19788
nnggtcaaacccgtgctcttgagcgcttgggcgacactttcggctagctgcaaatggtcttcgaccagaaggacacgcatgggtttttacctcgttcgggggtggtcggcgccacgctttgccggggagtttacaggcgcaacctgtgctgtgaagcccgaaaacattgaaagacgactgaaaggttagtgaaagcttcgccctttagcatccagccacggtgggtttcgcctgccgagctatttcacccatagcgcccgaaaaacgcctcgaagcgttttcgccaaaataagaacaataaacggagtacacccacgatgctgcgcacacagccgcctgctcgttcttctcgtttcacccagaccgcccttgccagtgctgccgcctttgccggcttttcgcctgtaggccaagccgcctttttcgaggacagcaccgccaccctcgaaacccgcaacatgtacttcaatcgcgactttcgcgatggcaccagcgcacaacaatccaagcgcgacgagtgggcccagggcttcatgctcaacctgcaatcgggctacaccgacggcaccgtcggcttcggcgtggatgccctgggcatgctcggggtcaagctcgactccagccccgaccgcaccggcaccggcctgctgcccacccacgatgacggccgcgccgccaacgaatattccaaactcggcctgaccggcaaagtgaagatctccgccaccgagctgaagatcggcgcactgatccccgagttgccgatcctcaagcccaacgacgggcgcatcctgccgcagacgtttgaaggcnnnntgttgagttccaaggagttcaagaacctggngtntaccnnnnnncnnnnntcttaaggaatnnnnnnntnnnnnnnnnnnnnnnnannnnnnnnnnnnnnccnnnnnnnntnnnnnnnnnnnnnnnnnnnnnnnnnnnnnnnnnnnnnnnnnnnnnnnnnnn

SEQ ID NO: 5386 - DNA, 865 bp, Zea mays
  misc_feature (1)..(61): n is a, c, g, or t
  misc_feature (63)..(70): n is a, c, g, or t
  misc_feature (76)..(77): n is a, c, g, or t
  misc_feature (80)..(82): n is a, c, g, or t
  misc_feature (87)..(89): n is a, c, g, or t
  misc_feature (91)..(91): n is a, c, g, or t
  misc_feature (97)..(98): n is a, c, g, or t
  misc_feature (121)..(122): n is a, c, g, or t
  misc_feature (141)..(143): n is a, c, g, or t
  misc_feature (863)..(865): n is a, c, g, or t
  Peptide Sequence Number=SeqID_12010
  Probeset Number=SeqID_19789
nnnnnnnnnnnnnnnnnnnnnnnnnnnnnnnnnnnnnnnnnnnnnnnnnnnnnnnnnnnnngnnnnnnnngatcannccnnnatgcnnnanctgctnnctgaaacgtctgtggataacttnntgcggcagctaaacctgcnnntgcagccggttgacggcttttcacgccattccaaccccgcgccgctgcacctgggaagttatccacagcgccaaaaaaaccagtactacgtcgccgccgtcgcacccttgggccgcctggattcggcgatgctcaggggcgccgcgcagctggccgtcgatcatggcgacgccaccctgcgtgtcacgccatggcagggcctgctgctgcccaatatccgtgacgcgacggctgtcattgaacgcctcgaacggcttggctttttgtgctcggtggaccaacccctggcgcgcctgatcgcctgcaccggctccagcggatgcgccaaaggcctggccgacaccaaggccgacgccctgcaattggcaacgctcgctcccggccacagcgtgcacctgtccggttgcccacgttcctgcgccgccgcacacaccgcgcccgtcaccttgctggcggtaagccccggccactacgacctctatttccgcgacgcaggccagcccggtttcggccgcctgaacgcgcgcactctttctattgaagcggcgggcgccttgctgcgcgcccacccacggagcaacaccgatgattgattacatccgcgacggtcaggagatctatcgcaactccttcgcgatcattcgcgcagaagccaagctggatcgcattcctgccgacctggaaaaactcgccgtgcgggtgattcatgcctgcggcatnnn

SEQ ID NO: 5387 - DNA, 486 bp, Zea mays
  misc_feature (1)..(3): n is a, c, g, or t
  Peptide Sequence Number=SeqID_12011
  Probeset Number=SeqID_19790
nnnagcggctccttttctgccgccgcacgcaaattgggccgggtaccctcggccattaacatggcggtgtcgcagcttgaagcagagctggatttattgctgtttgatcggtcaacccgcaaagcgattcctacggccgccgccaaagcactggagccccaggcacgccaggttgccagccagttaaacctgctggacgcccatgcgctccagcttcatcaggggttggaggagcgcttggtccttgcgatggcgccggagttgcaaacaggcgtatggaatcgtccgctgtccattatcgccagcgagttccccacgcttgaaatcgagattcgctccgcgtcgcatccggaggcgatgcgcatgctccatgacgggcgtgtgcaattggcactgggatttgaacgaccagggcttgacgagcgggagacgtttcttgaagcggggagccaattgttggtagccgttgcctctcctgatcatcct

SEQ ID NO: 5388 - DNA, 879 bp, Zea mays
  misc_feature (1)..(2): n is a, c, g, or t
  misc_feature (685)..(693): n is a, c, g, or t
  misc_feature (838)..(840): n is a, c, g, or t
  misc_feature (842)..(842): n is a, c, g, or t
  misc_feature (864)..(867): n is a, c, g, or t
  misc_feature (869)..(871): n is a, c, g, or t
  misc_feature (874)..(875): n is a, c, g, or t
  misc_feature (877)..(879): n is a, c, g, or t
  Peptide Sequence Number=SeqID_12012
  Probeset Number=SeqID_19791
nnagccaggcgggcgcccagcaggaactgccatttgccatggtctacggccaggccgtcatggaaatgccgctggacctgtacatcccgccggacgccttggaagtcttcctcgaagccttcgaaggcccgctggacttgctgctgtacctgatccgcaagcagaacatcaacatcctcgacatcccggtggcggaaatcacccgccagtacatgggctatgtcgagttgatgcagaccgtgcgcctggaactggctgccgagtacttggtgatggccgcgatgctcgcggagatcaagtcacgcatgctgctgccgcgttcggaaagcatcgaggcggaagaggatgacccgcgcgccgaactgatccgtcgcctgcaggagtacgaacgtttcaaggccgctgccgaaggcatcgacggcctgagccgggtgggtcgcgatgtggtggtgcccaagctcgacgcgccggaagcccgggctcgcaagctgctgccggacgtaagcctggaagaattgctgatgtccatggccgaagtactgcgccgtggcgatatgtttgaaagccaccaggtcagccgcgaggcgctgtccacccgcgagcgcatgagtgatgtactcgaccgcctcaagggcggcgggtttgtgccgtttgtcgagctgtttaccaaggaggaagggcgccnnnnnnnnngtggtgacctttatggcgatcctcgagctggtcaaggaatctttggtcgaactggtccagaatgagccttttgcggctatccacgtgcgggcgcgagccgaataaagagctgaatcgatgaatctgactgaaccccgcgaactgnnncngctgctggaggcctttctcctnnnntnnngcnngnnn

SEQ ID NO: 5389 - DNA, 270 bp, Zea mays
  misc_feature (1)..(3): n is a, c, g, or t
  misc_feature (263)..(270): n is a, c, g, or t
  Peptide Sequence Number=SeqID_12013
  Probeset Number=SeqID_19792
nnngccctgccgactcctccaacaatcacgagcgcgcgtttccatgaagatcaatttgccggtcaccggtcgaaatgtggactttgcccccgacgccaatatcctctcgaccaccgacctgactagcacaattacctacgccaaccaggacttcatcgatatcagcggctacacccgcgaggagttgttgggtacgccgcacaacctgctacgccacccggacatgccacccgctgcctttgcgcacatgtggcaggtgttgnnnnnnnn

SEQ ID NO: 5390 - DNA, 270 bp, Zea mays
  misc_feature (1)..(8): n is a, c, g, or t
  misc_feature (268)..(270): n is a, c, g, or t
  Peptide Sequence Number=SeqID_12014
  Probeset Number=SeqID_19793
nnnnnnnncaacacctgccacatgtgcgcaaaggcagcgggtggcatgtccgggtggcgtagcaggttgtgcggcgtacccaacaactcctcgcgggtgtagccgctgatatcgatgaagtcctggttggcgtaggtaattgtgctagtcaggtcggtggtcgagaggatattggcgtcgggggcaaagtccacatttcgaccggtgaccggcaaattgatcttcatggaaacgcgcgctcgtgattgttggaggagtcggcagggcnnn

SEQ ID NO: 5391 - DNA, 320 bp, Zea mays
  misc_feature (1)..(6): n is a, c, g, or t
  Peptide Sequence Number=SeqID_12015
  Probeset Number=SeqID_19794
nnnnnngggtagccttcgatggtctgggcgctgctggcgaacaccaggcgcttcacgcccgcagccacggcggcttcgaacaggtaggtggtggccaggatgttgttgggcagcaactcgtcgaaggtggcgctagcgtgagggatgccggacaggtgcacgatcacgtcaatgccgtcgagcagggcggcgagggcggttttgtcgcccaggtctgcgcggatgaaacggtgttcgccgagggcgaaatccggctcgatgcgatcggtgagggtgaagcggtagcggtctttcgacgcttcgaaaaacgtcttgccaat

SEQ ID NO: 5392 - DNA, 320 bp, Zea mays
  misc_feature (315)..(320): n is a, c, g, or t
  Peptide Sequence Number=SeqID_12016
  Probeset Number=SeqID_19795
attggcaagacgtttttcgaagcgtcgaaagaccgctaccgcttcaccctcaccgatcgcatcgagccggatttcgccctcggcgaacaccgtttcatccgcgcagacctgggcgacaaaaccgccctcgccgccctgctcgacggcattgacgtgatcgtgcacctgtccggcatccctcacgctagcgccaccttcgacgagttgctgcccaacaacatcctggccaccacctacctgttcgaagccgccgtggctgcgggcgtgaagcgcctggtgttcgccagcagcgcccagaccatcgaaggctacccnnnnnn

SEQ ID NO: 5393 - DNA, 548 bp, Zea mays
  misc_feature (17)..(19): n is a, c, g, or t
  misc_feature (29)..(38): n is a, c, g, or t
  misc_feature (56)..(58): n is a, c, g, or t
  misc_feature (79)..(82): n is a, c, g, or t
  misc_feature (87)..(88): n is a, c, g, or t
  misc_feature (90)..(90): n is a, c, g, or t
  Peptide Sequence Number=SeqID_12017
  Probeset Number=SeqID_19796
gtggtggcgggcatggnnntgctgggccnnnnnnnnnnccgcatcgcgctggcgcnnntgtatccgcgcgagcacctgnnnnaggtnntngccaccttcggtttcatcctgttcttcaacgagctgacccgcatcatctggggcccggcgcccatcagcatgggcctgccatcgtggctgtcgggcaccatcgatctgctcggcgtcacctacccgctgtaccgctttctcatcatcgtggccgggctggcggtggcggcgggctgctacgcgctgatccaccgcacgcggctgggcatgctgatccgcgccggctccaccgaccgcatgatggtgggcgcgctgggcgtgaacatcgcgcgcctgaacacgttgctgttcgtgctgggcgcggtgctggccggcgtggccggcctgatggccgggccgatcctgtcggcgcagaccggcatgggcgaaccgatcctgatcctgacgctggtggtgatcgtcatcggtggcatcggctcggtgcgcggcgccttcctggcggcgctgatggtggggct

SEQ ID NO: 5394 - DNA, 688 bp, Zea mays
  misc_feature (1)..(2): n is a, c, g, or t
  Peptide Sequence Number=SeqID_12018
  Probeset Number=SeqID_19797
nnggcgaattgtgcgcggtggacctgctgggccaggccgaacatggccccacgtcgccggcggtgctgctgaccaccagcgaaacgttggcccgcgacacgctggtcgagatcgagcggcaattgaacctgctgcccaccgcgggtatcgcggcgcaggcctgggccgattgcggcgaggtcatcgtctgcgacagcgaggcggaaatgctggccgtggccgacgaactggcgttcgagcatgtgcaggtcatgacgcgcgatccggactacttcctgaagaacctgagcaatttcggcgcgttgttcctgggcccgcgcaccaacgtcagcttcggcgacaaggtcattggcaccaatcacacgctgcccaccaaccgcgcggcgcgctatacgggcgggctgtgggtcggcaagttcctcaagacctgcacctaccagcgcgtgctgaccgacgccgccagcgcgaccatgggcgaatactgctcgcgcctgtgccacatggagaacttcgccggtcatggcgagcaggccaacatccgcgtgcgccgctacggcaaccggccggatctgccctggtaccagcccgtggaggcccaggcatgatcgccttgccccagggaccggacttcggcttgcacggccggcgcgcgctggtcacgggcggcagcggcggcatcggcctggcc

SEQ ID NO: 5395 - DNA, 311 bp, Zea mays
  misc_feature (1)..(3): n is a, c, g, or t
  Peptide Sequence Number=SeqID_12019
  Probeset Number=SeqID_19798
nnntttcgccctgcgcggcagcggtggtatggccaaggcggtggccagtgcgttgcgcgatggcggttatgccaagggcgtgattgtggcgcgtaatgaagtggcgggccgggcactggcccagagcctggggtatgagtggcaggcgcagttgggtgccttgcgcccgcagatgcttgtcaacgtgacgccgattggcatgaccggaggggcggaagcagatcagttggcgtttgaggctgatgccattgatgcggccgagaccgtattcgatgtggtggcgattccctcggaaacgccgctgatcctgc

SEQ ID NO: 5396 - DNA, 754 bp, Zea mays
  misc_feature (1)..(1): n is a, c, g, or t
  misc_feature (6)..(6): n is a, c, g, or t
  misc_feature (8)..(13): n is a, c, g, or t
  misc_feature (17)..(24): n is a, c, g, or t
  misc_feature (28)..(28): n is a, c, g, or t
  misc_feature (36)..(37): n is a, c, g, or t
  misc_feature (41)..(41): n is a, c, g, or t
  misc_feature (53)..(57): n is a, c, g, or t
  misc_feature (60)..(61): n is a, c, g, or t
  misc_feature (73)..(74): n is a, c, g, or t
  misc_feature (76)..(78): n is a, c, g, or t
  misc_feature (98)..(100): n is a, c, g, or t
  misc_feature (104)..(108): n is a, c, g, or t
  misc_feature (115)..(117): n is a, c, g, or t
  misc_feature (121)..(127): n is a, c, g, or t
  misc_feature (139)..(140): n is a, c, g, or t
  misc_feature (143)..(144): n is a, c, g, or t
  misc_feature (164)..(164): n is a, c, g, or t
  Peptide Sequence Number=SeqID_12020
  Probeset Number=SeqID_19799
ngcaanannnnnncgtnnnnnnnnagancctggcgnnccgncgccgcccgcgnnnnnggnnctgtcgttcganngnnntgcacgcccgcttcccgcgnnngatnnnnngcgacannnccgnnnnnnncgaaggcggccnntannaggacaagaaggcctacganctgctgatccagagcgaaagcggcttcctgtcggtcaccggcaccgccgacgacccggtcaaggccggctgctccatcgccgacatctcggccggcatgtacgcctattccgccatcctcaacgcgctgctgctgcgccagaagaccggcctgggcagccgcctggacgtctccatgctcgagagcatggtcgagtggatgggcttcccgatgtactacgcgttcgagggcgccacgccgccggtgcgcgccggcgcggcccatgcctcgatctatccgtacggcccgttccccaccggcgacggcaacaccatcatgctgggcctgcagaacgaacgcgaatggcgcgtgttctgcgcccaggtgctgcgccaggccgagctggccgaggacccgcgcttcgccaccaactcgctgcgcaccgccaaccgcgaggccctgcgcgcgctgatcgtcacggccttcgccgacctcagcgtgcagcaggtcaccgaccggctggaagacgcgcagatcgccaacgcccgggtcaacgacatggccggggtctgggcccacccgcagttgcgggcgcgcgaccgctggagcca

SEQ ID NO: 5397 - DNA, 325 bp, Zea mays
  misc_feature (1)..(5): n is a, c, g, or t
  Peptide Sequence Number=SeqID_12021
  Probeset Number=SeqID_19800
nnnnntacaccctgttcttccgccggctgggggatgaatcagccgcgttggccgtggcgcggttgcgcgacggctttctcgacctcaaggggtttgatgaatgggcggacctgtacaaagcccgtgtggagcgtgacgccagcggcacagaagaacagcgacgtgagcggatgcatggggtgaatccgctttatatcctgcgcaattacctggcgcagaacgccatccaggcggcagagctgggggattacagcgaagtgcgccggctgcatgaagtgctgaccaaaccgtttgaagagcagccggggatggagcaatacgccca

SEQ ID NO: 5398 - DNA, 370 bp, Zea mays
  misc_feature (366)..(370): n is a, c, g, or t
  Peptide Sequence Number=SeqID_12022
  Probeset Number=SeqID_19801
tcggcgctgtcctccggtatggcgcaagcactgcagcttggggagatgaccctcaagtcgaagctgaaccagccgctgtcggtggagatcgaattgctcgacgtcggtggcctgaccgcctccgagatcacccccagcctcgcttcgtcccaggcctttgtggatgcgggcgttgatcgccaggcgttcctgaatgaccttacgtttaccccggtggtcaacccgaacggccgcagtgtggtgcgtgtcacctccagccagccgttgcctgattcctatgtgcgtttcctgctgcaggtgcaatggcccaacggccgcctgatgcgcgactacagcgtattgctggacccggccaagttcgaccannnnn

SEQ ID NO: 5399 - DNA, 329 bp, Zea mays
  misc_feature (1)..(5): n is a, c, g, or t
  Peptide Sequence Number=SeqID_12023
  Probeset Number=SeqID_19802
nnnnngaaggaaccgggcacgatcaccacgcttttaccggtgcccggctggggcttggctgcatcggcggccgaggccactaacggtgcagcgagtgccatggcgatcgccagggaagaaagaatacgcatgcgactctccacaggccttggggcctgatcattgttgtgaaagggttaacggcgttggccggacaacacgcggtccagtgaccaggccccgccgccatacgccagcagcggcagcaacagcccggcccaggtcaggtgggtcggccaggcatcggggtacacgaacacctcgatcaccagggtcatgcccaacagcgc

SEQ ID NO: 5400 - DNA, 329 bp, Zea mays
  misc_feature (325)..(329): n is a, c, g, or t
  Peptide Sequence Number=SeqID_12024
  Probeset Number=SeqID_19803
gcgctgttgggcatgaccctggtgatcgaggtgttcgtgtaccccgatgcctggccgacccacctgacctgggccgggctgttgctgccgctgctggcgtatggcggcggggcctggtcactggaccgcgtgttgtccggccaacgccgttaaccctttcacaacaatgatcaggccccaaggcctgtggagagtcgcatgcgtattctttcttccctggcgatcgccatggcactcgctgcaccgttagtggcctcggccgccgatgcagccaagccccagccgggcaccggtaaaagcgtggtgatcgtgcccggttccttcnnnnn

SEQ ID NO: 5401 - DNA, 290 bp, Zea mays
  misc_feature (1)..(7): n is a, c, g, or t
  misc_feature (289)..(290): n is a, c, g, or t
  Peptide Sequence Number=SeqID_12025
  Probeset Number=SeqID_19804
nnnnnnngcctgtttaccctcaaagagcgcctgctgagcagcgagctgctgtgtcatgactgcctgatggccattcactcccgaccaccaatccgggtagatatcgcctgcaagcacttcgacaatgtcgctggcccaagaagtaaaatccgagaccatactggcgccggcctgaacgaacgcggaatagcccacgaacccccagggatcacagcaatatgctgcagacgctcggtagaccggcagtgctgctatccccagagctaaagctgttgcagcaatccagcgnn

SEQ ID NO: 5402 - DNA, 290 bp, Zea mays
  misc_feature (1)..(2): n is a, c, g, or t
  misc_feature (284)..(290): n is a, c, g, or t
  Peptide Sequence Number=SeqID_12026
  Probeset Number=SeqID_19805
nncgctggattgctgcaacagctttagctctggggatagcagcactgccggtctaccgagcgtctgcagcatattgctgtgatccctgggggttcgtgggctattccgcgttcgttcaggccggcgccagtatggtctcggattttacttcttgggccagcgacattgtcgaagtgcttgcaggcgatatctacccggattggtggtcgggagtgaatggccatcaggcagtcatgacacagcagctcgctgctcagcaggcgctctttgagggtaaacaggcnnnnnnn

SEQ ID NO: 5403 - DNA, 884 bp, Zea mays
  misc_feature (1)..(1): n is a, c, g, or t
  misc_feature (746)..(747): n is a, c, g, or t
  misc_feature (759)..(763): n is a, c, g, or t
  misc_feature (773)..(777): n is a, c, g, or t
  misc_feature (779)..(780): n is a, c, g, or t
  misc_feature (782)..(786): n is a, c, g, or t
  misc_feature (791)..(803): n is a, c, g, or t
  misc_feature (805)..(853): n is a, c, g, or t
  misc_feature (857)..(867): n is a, c, g, or t
  misc_feature (869)..(871): n is a, c, g, or t
  misc_feature (875)..(884): n is a, c, g, or t
  Peptide Sequence Number=SeqID_12027
  Probeset Number=SeqID_19806
ngaaccaggtctcaaggctgtcgtggttgaccgcgatggggatgctggcgtgcggtacgtcgtcgtccgccacgcccagccggttcagcgcgtcgtgctccaacagcgcggtctgctcggccagctgcaccagcacctggccatcgccggtggccgcggccggcacggtgcgctggaccagcagccggcccatgcggtcttcgagcgccttgatccgctgcgacaccgccgacggcgtcacgctcaacgccagcgcggcccgttcgaaactgccttcgcgcaccaccgcggccagggcgcgcaggttgccatgatcgatcttcataggattagttttacttaagatagtgaaggaaaattagctgtatttcatattggcggcaagcgaaaatgttgcattgccggtatgcgcgacgctgccggcccggtatcccaagcgccaccacaaggcgttgcagtcaaaaggttcgcgtcatgttcgccacgttgtcatcccccctcttcctcaccgcctgggccagcggcacggccaccgggctgggcctgttcgccgtcgtcggcgcgcaaagcgcgttcatcctgcgccagggattgatgcgcgcgcacctgctgtccgtggtcgccatctgcgcgctgatcgacgccatcttcatcttcgccagcgtctcgggcctgcaggccctgaccgcctggttcccgtggctgaccaccgcggtgctgtggttcggcgtggcgttcctgtcgtnntacgcgctgcannnnncgcgccgcgnnnnnanngnnnnnggcgnnnnnnnnnnnnngnnnnnnnnnnnnnnnnnnnnnnnnnnnnnnnnnnnnnnnnnnnnnnnnntttnnnnnnnnnnncnnnattnnnnnnnnnn

SEQ ID NO: 5404 - DNA, 320 bp, Zea mays
  Peptide Sequence Number=SeqID_12028
  Probeset Number=SeqID_19807
gccctgtggggcgccgattggccgctgctgttgcacgaaaccgccgccaatgtgctggccggcctggtgggcgtgcatgtgctggcggcggtgtttgaaagtatccaggtgcgggacaacctgcctttatccatgctcaccggccgcaggaggcgcctgccggatgaccgtgcgcagtaatccttttccccgacaggttctctatgcgcccgcttttaataatctgcagtctgctggtggtatttttcgccgcctggcaaagccatccgccccacgtgttggcaccgtttgcccaaggccccaaggacagctcgccaacc

SEQ ID NO: 5405 - DNA, 320 bp, Zea mays
  Peptide Sequence Number=SeqID_12029
  Probeset Number=SeqID_19808
ggttggcgagctgtccttggggccttgggcaaacggtgccaacacgtggggcggatggctttgccaggcggcgaaaaataccaccagcagactgcagattattaaaagcgggcgcatagagaacctgtcggggaaaaggattactgcgcacggtcatccggcaggcgcctcctgcggccggtgagcatggataaaggcaggttgtcccgcacctggatactttcaaacaccgccgccagcacatgcacgcccaccaggccggccagcacattggcggcggtttcgtgcaacagcagcggccaatcggcgccccacagggc

SEQ ID NO: 5406 - DNA, 967 bp, Zea mays
  misc_feature (1)..(3): n is a, c, g, or t
  misc_feature (772)..(773): n is a, c, g, or t
  misc_feature (816)..(816): n is a, c, g, or t
  misc_feature (819)..(820): n is a, c, g, or t
  misc_feature (822)..(823): n is a, c, g, or t
  misc_feature (825)..(826): n is a, c, g, or t
  misc_feature (831)..(835): n is a, c, g, or t
  misc_feature (839)..(840): n is a, c, g, or t
  misc_feature (848)..(849): n is a, c, g, or t
  misc_feature (855)..(855): n is a, c, g, or t
  misc_feature (858)..(858): n is a, c, g, or t
  misc_feature (860)..(860): n is a, c, g, or t
  misc_feature (862)..(869): n is a, c, g, or t
  misc_feature (877)..(887): n is a, c, g, or t
  misc_feature (891)..(904): n is a, c, g, or t
  misc_feature (906)..(910): n is a, c, g, or t
  misc_feature (912)..(967): n is a, c, g, or t
  Peptide Sequence Number=SeqID_12030
  Probeset Number=SeqID_19809
nnnagccagaaactgtccggcgagttggctcaggccggaaaggaagtcacctccagtctggacagtctgtcttccagtactcgccagcgtctgacggcagggctttccacgcgcctgcaggaagagcagaagcaactgcgtgcgaccttggaaaaagacctgcaggactctgccagcgacatggcgcaactgctcgcctcggtggcgccgcgcgccatgtgggacagcgacgtgccgacgctgtctgagtttgcccgcagagcccagcgcaatcccaacgtgttgtttgtggtgtatgacgacgcggctggcgaacatctgacccgttacctcaaccgtgaaaacccgattaaccaggcgctgctggaaaagggcaaaggcgaacgagccctggataaagtgctggacgcggcgaaaaatgatccctcggtgttctacgtcgaagcatccatcagccccaatggcgtagagataggcaaggtccgcatgggggtttcgaccgccgcagtagagactgacctggccgcgctggataagcgttttgctgcactgattgccagcggtgaccagttagtgggcgacagtctcaagggggccgctgcggacagcgctgcagccatgggcgcgcgtttgcagtcggcacaagccaccgccagccagatgaccgccaataccaccaatgccgtgcaagaggcggcaggcaccttgcgttggcgcatcggcatgggcctggcggttgttggctttggcgtgttgttgctgattgctgtgnngctcggccgccgggtggtcaatcggctgaagctactgattgcngcnntnnannatctnnnnncagnngagggcgnnctgacnagncncnnnnnnnncaacagtnnnnnnnnnnntcgnnnnnnnnnnnnnngnnnnncnnnnnnnnnnnnnnnnnnnnnnnnnnnnnnnnnnnnnnnnnnnnnnnnnnnnnnnn

SEQ ID NO: 5407 - DNA, 170 bp, Zea mays
  misc_feature (1)..(5): n is a, c, g, or t
  Peptide Sequence Number=SeqID_12031
  Probeset Number=SeqID_19810
nnnnngacccaaagctggcagatgctggtggacggcgaatacgatatttcggtgatgtactggaccaacgacatcctcgacccggaccagaagaccaccttcgtgctgggccacgacactaaccagaactacatgactcgctacaagaacgacaaggtcaaggacctggt

SEQ ID NO: 5408 - DNA, 170 bp, Zea mays
  misc_feature (166)..(170): n is a, c, g, or t
  Peptide Sequence Number=SeqID_12032
  Probeset Number=SeqID_19811
accaggtccttgaccttgtcgttcttgtagcgagtcatgtagttctggttagtgtcgtggcccagcacgaaggtggtcttctggtccgggtcgaggatgtcgttggtccagtacatcaccgaaatatcgtattcgccgtccaccagcatctgccagctttgggtcnnnnn

SEQ ID NO: 5409 - DNA, 861 bp, Zea mays
  misc_feature (1)..(3): n is a, c, g, or t
  misc_feature (5)..(11): n is a, c, g, or t
  misc_feature (15)..(15): n is a, c, g, or t
  misc_feature (17)..(28): n is a, c, g, or t
  misc_feature (30)..(34): n is a, c, g, or t
  misc_feature (40)..(40): n is a, c, g, or t
  misc_feature (50)..(56): n is a, c, g, or t
  misc_feature (58)..(58): n is a, c, g, or t
  misc_feature (60)..(65): n is a, c, g, or t
  misc_feature (97)..(101): n is a, c, g, or t
  misc_feature (142)..(143): n is a, c, g, or t
  misc_feature (858)..(861): n is a, c, g, or t
  Peptide Sequence Number=SeqID_12033
  Probeset Number=SeqID_19812
nnngnnnnnnntgcnannnnnnnnnnnncnnnnncaacanctgccgcgtnnnnnnntnannnnnnaggacaccggcatcgcgttgcgggaagtacgnnnnncgctgaacctgctggacctgttggcgtactcgccgcgcatnntcggggttccgcgtgtgttgttgaaccaggtagtggaaggcgtcggcggttacttcaaggcctgcctgaaagccggtgaacgtctgccggcccccagcggtctgctgatgaccctcgaccgtacccgccgcgccctcaacggccagggcctgcaaggtgaggacgaaacccgcctgcacttgttgcacgccctcagtggcttgcgcctggcgttgttgcccggcgtggaatttctcggcggcacagaaatggaagcgccgttacccgatggagcgcctttatgatcggtgatctggatatcagcggggtattcctgcccacgctgctggtgctgatgggcattacgtatgtgctgtacctggtggtgcacgggctgttgacccgcgtccacttctatcgcctggtctggcaccgggcattgttcaatgtgggtctctacgctctgttgctgggcgcagtggattcactcagtcgatacctcatgacatgaaaaaaccttttttgaccatcggccgtgtagtcctgacgttattggtggtgaccttcgcctgcgtcgtcgtatggcgcatggtgatgtactacatgttcgccccctggacccgtgacggccacatccgtgccgacatcgtgcagatcgccccggacgtgtccgggctgatccagcaagtggacgtgcgtgacaaccagttggtggtgcgcggccaggtgctgttcnnnn

SEQ ID NO: 5410 - DNA, 256 bp, Zea mays
  misc_feature (1)..(4): n is a, c, g, or t
  Peptide Sequence Number=SeqID_12034
  Probeset Number=SeqID_19813
nnnngcctgggcggcctgtttggcagagaacggaacaagcggctggcccatcgcattgagctggggcgcggcatttgccgaggcgggaagatgaagaggtttgagatccgcggctttgccatcgacggttgccttcgattcacgcggaaccgtttggccaggcttgggaagcttgacgcgccgcttcttcaaattcccgggggtgcgagctttgtctttcttgcggaccgtctctccaacgctttcgggtaactgt

SEQ ID NO: 5411 - DNA, 256 bp, Zea mays
  misc_feature (253)..(256): n is a, c, g, or t
  Probeset Number=SeqID_19814
acagttacccgaaagcgttggagagacggtccgcaagaaagacaaagctcgcacccccgggaatttgaagaagcggcgcgtcaagcttcccaagcctggccaaacggttccgcgtgaatcgaaggcaaccgtcgatggcaaagccgcggatctcaaacctcttcatcttcccgcctcggcaaatgccgcgccccagctcaatgcgatgggccagccgcttgttccgttctctgccaaacaggccgcccaggcnnnn

SEQ ID NO: 5412 - DNA, 171 bp, Zea mays
  misc_feature (1)..(7): n is a, c, g, or t
  misc_feature (13)..(17): n is a, c, g, or t
  Peptide Sequence Number=SeqID_12035
  Probeset Number=SeqID_19815
nnnnnnntcgacnnnnngtcgggcaggcccgtggccagtgtgaccagggcatcaccttggcggatctccacgaggtcgctgacgccaccttgttccaggtgttgccgcgccagggcgatctttgagggctcgaactcgctgctgatcagcgcgccgccgccgttgtcccgc

SEQ ID NO: 5413 - DNA, 171 bp, Zea mays
  misc_feature (155)..(159): n is a, c, g, or t
  misc_feature (165)..(171): n is a, c, g, or t
  Peptide Sequence Number=SeqID_12036
  Probeset Number=SeqID_19816
gcgggacaacggcggcggcgcgctgatcagcagcgagttcgagccctcaaagatcgccctggcgcggcaacacctggaacaaggtggcgtcagcgacctcgtggagatccgccaaggtgatgccctggtcacactggccacgggcctgcccgacnnnnngtcgannnnnnn

SEQ ID NO: 5414 - DNA, 759 bp, Zea mays
  misc_feature (1)..(2): n is a, c, g, or t
  misc_feature (4)..(13): n is a, c, g, or t
  misc_feature (17)..(23): n is a, c, g, or t
  misc_feature (25)..(25): n is a, c, g, or t
  misc_feature (27)..(35): n is a, c, g, or t
  misc_feature (39)..(49): n is a, c, g, or t
  misc_feature (54)..(60): n is a, c, g, or t
  misc_feature (62)..(69): n is a, c, g, or t
  misc_feature (97)..(106): n is a, c, g, or t
  misc_feature (128)..(129): n is a, c, g, or t
  misc_feature (136)..(138): n is a, c, g, or t
  Peptide Sequence Number=SeqID_12037
  Probeset Number=SeqID_19817
nngnnnnnnnnnnagcnnnnnnnancnnnnnnnnncgcnnnnnnnnnnnatcannnnnnncnnnnnnnnatatcgtgctgggcatgatgaccaccgnnnnnnnnnntgtcggtgctggcgtccaccgnnctgccgnnncgcgtcattgccaccgaacacacccatccgccatcgcagaccctgtcgggtctctggcagcgcctgcgccgcctgacctatccgcgcgccgcgcgcgtggtggccctgacccgcggcaccgcgcaatggatcgagcagcatgtgccgggttcgcgcctggcggtgatccccaatccggtgcattggccgctgcccaagggcgagccggtgctggcgccgcccgcgggcgacggccgcaagcgcctgctggcggtgggacggctgcatggggacaagggtttcgacctgctgttgcaggcctacgcgcggctggcgccgtcgcatccggactgggatctggttatcctgggcgagggcgatgagcgccgcgcgctggaagcgcaggtgcgcgaggccggcctgcgggatcgcgtcagcctgccgggacgggcgggcaacgtgggcgactggtatcagagcgccgacctgtatgtgctgacgtcgcgcttcgaggggctgtccaacactctgctggaatcgatggccagcggcctggccgcggtggcgttcgattgcgataccgggccgcgcgagatcgtgcgcgaagggatcgacggcgtgctggtgcggcccaacggcgat

SEQ ID NO: 5415 - DNA, 996 bp, Zea mays
  misc_feature (1)..(155): n is a, c, g, or t
  misc_feature (164)..(168): n is a, c, g, or t
  misc_feature (173)..(177): n is a, c, g, or t
  misc_feature (179)..(181): n is a, c, g, or t
  misc_feature (186)..(196): n is a, c, g, or t
  misc_feature (201)..(205): n is a, c, g, or t
  misc_feature (213)..(215): n is a, c, g, or t
  misc_feature (224)..(226): n is a, c, g, or t
  misc_feature (994)..(996): n is a, c, g, or t
  Peptide Sequence Number=SeqID_12038
  Probeset Number=SeqID_19818
nnnnnnnnnnnnnnnnnnnnnnnnnnnnnnnnnnnnnnnnnnnnnnnnnnnnnnnnnnnnnnnnnnnnnnnnnnnnnnnnnnnnnnnnnnnnnnnnnnnnnnnnnnnnnnnnnnnnnnnnnnnnnnnnnnnnnnnnnnnnnnnnnnnnnnnnnnntcacccagnnnnnaggannnnnannncatcnnnnnnnnnnnaattnnnnnggtcgcannnagctacgtnnngcgacacatgctgcgcttgtggggcgattatcagctggacggaacactgtcgaaatggagcgtcggcaccggcgtcaacgcccagagcagcaactaccgaattcaaggcatcaaactggaacaagccggttatgcggtatggaatgcgcggttggcgtaccgggtcgatgacacatggacggtggcgctgaacggtaacaatctcttcgacaaaaattactatcagacggtgggaacggccgactggggtaatttctacggcgaaccgcgcaacttcaccgtcagtttgaaaggcaatttttaaggttagtaccgcctcaatgtggtgacggactcacgtcctcaccactcgtcgcttgtccccgaaaaaccccgcgtcctacctccgtcaaaaaaaggttttcctccccggcaggaaatttcccaaatttgttcctacactccaaaacgccagcattttgttctcgaagaacccgagaacccgacctagacagtcaacaatttgtcacatagatgattagataatgtgtctagatcgatacccttataaaaaagtcaaaaccttgacgaacaaggaaaagagaaccatcatttagccattaccccgcaaattccctgcaaatagataggtaattgcgtattacccagcgaagcaagccgttcgtctggcgccacttataaagcaagccctgcctttatggatgagcagccgaacaaggaagccctggtgtgcaatgagggatgtttttatgcgcgagaagtcgtccnnn

SEQ ID NO: 5416 - DNA, 1037 bp, Zea mays
  misc_feature (1)..(5): n is a, c, g, or t
  misc_feature (8)..(10): n is a, c, g, or t
  misc_feature (14)..(15): n is a, c, g, or t
  misc_feature (17)..(17): n is a, c, g, or t
  misc_feature (19)..(19): n is a, c, g, or t
  misc_feature (23)..(23): n is a, c, g, or t
  misc_feature (27)..(34): n is a, c, g, or t
  misc_feature (38)..(38): n is a, c, g, or t
  misc_feature (40)..(40): n is a, c, g, or t
  misc_feature (43)..(49): n is a, c, g, or t
  misc_feature (51)..(63): n is a, c, g, or t
  misc_feature (70)..(73): n is a, c, g, or t
  misc_feature (79)..(87): n is a, c, g, or t
  misc_feature (90)..(90): n is a, c, g, or t
  misc_feature (92)..(139): n is a, c, g, or t
  misc_feature (141)..(149): n is a, c, g, or t
  misc_feature (154)..(162): n is a, c, g, or t
  misc_feature (167)..(173): n is a, c, g, or t
  misc_feature (175)..(181): n is a, c, g, or t
  misc_feature (183)..(183): n is a, c, g, or t
  misc_feature (185)..(191): n is a, c, g, or t
  misc_feature (201)..(204): n is a, c, g, or t
  misc_feature (206)..(210): n is a, c, g, or t
  misc_feature (214)..(218): n is a, c, g, or t
  misc_feature (222)..(222): n is a, c, g, or t
  misc_feature (224)..(226): n is a, c, g, or t
  misc_feature (229)..(229): n is a, c, g, or t
  misc_feature (231)..(234): n is a, c, g, or t
  misc_feature (248)..(254): n is a, c, g, or t
  misc_feature (256)..(256): n is a, c, g, or t
  misc_feature (260)..(260): n is a, c, g, or t
  misc_feature (262)..(262): n is a, c, g, or t
  misc_feature (1036)..(1037): n is a, c, g, or t
  Peptide Sequence Number=SeqID_12039
  Probeset Number=SeqID_19819
nnnnnccnnnccanntntncggngggnnnnnnnncttncngtnnnnnnncnnnnnnnnnnnnnccccccnnnnccgttnnnnnnnnnaanannnnnnnnnnnnnnnnnnnnnnnnnnnnnnnnnnnnnnnnnnnnnnnnannnnnnnnntcggnnnnnnnnnggcannnnnnntnnnnnnntncnnnnnnnccagggccgnnnncnnnnntgcnnnnngcgncnnnggngnnnntgcggcgttgatgnnnnnnngntgtngncatgagcgtcgggccggcgatggccgagcgcaatatcactgagctgtgggggagtgcgtgatgaatactgaacaggcaatcgcagaagtcttcggcctgtacgaacagcacggtacggccgactacattggcgaaccggtctcgcagattgagcacatgtcccaggccgcgcaactggccatggccgaaggcttcgatgaagaagtggtgctggcggcgttcttccacgatatcgggcacatctgcggccaaggtggcgagaacatgggcggttatggtgtggtcagtcatgaacggctgggggccgattatctgcgccaggcgggcttcagcgagcgcatggcaaaactggtggaataccacgtgcaagccaagcgttacctgaccttcagccagccggattactacgcgcgcttgagcgaagccagccgtcgtaccttgggttaccagggcggcgtgatgactgccgaggaggcacgggcgtttgagcaggatccgctgtgcgccgtcagcctgcgcatgcgtcactgggatgaacaggccaaggaaatgcacgtgccggtgatggaccttgaagtgttgaaatccaaggcccggcagttgttggcggcttaggtttcgtccaggcgctgggccagggcttcgatctgttcctggcgttcggcctggctcaacttgggatgcgggttgagggacgaccattgcggatgagcccgggccttgttcagggcttcgggcaatttgccttcgcgccaggtcttgtcctgtggcgtnn

SEQ ID NO: 5417 - DNA, 314 bp, Zea mays
  misc_feature (1)..(6): n is a, c, g, or t
  Peptide Sequence Number=SeqID_12040
  Probeset Number=SeqID_19820
nnnnnnagttcctgagcaacggcgactccagcggcaacaagacctaccagaagaacacgccgtccttgagcgtgatgtacgccttcacgcccgaactgcacggctacatcagtgccggcaagggtttcgagacgccgactcaggcggaactggcctatgcgccaggcaatatcgaagggtttaacttcggcctgaagccgtccgaaagcacgcaatatgaagtgggcttgaaggcacagctgagcgacacccggatcaacgccgctgtcttccagatcaccaccgaggacgagttggtggtggatcaatcgatc

SEQ ID NO: 5418 - DNA, 480 bp, Zea mays
  misc_feature (1)..(4): n is a, c, g, or t
  misc_feature (6)..(6): n is a, c, g, or t
  misc_feature (370)..(372): n is a, c, g, or t
  misc_feature (381)..(383): n is a, c, g, or t
  misc_feature (397)..(399): n is a, c, g, or t
  misc_feature (406)..(406): n is a, c, g, or t
  misc_feature (408)..(408): n is a, c, g, or t
  misc_feature (436)..(441): n is a, c, g, or t
  misc_feature (443)..(458): n is a, c, g, or t
  misc_feature (460)..(473): n is a, c, g, or t
  misc_feature (476)..(480): n is a, c, g, or t
  Peptide Sequence Number=SeqID_12041
  Probeset Number=SeqID_19821
nnnngngacgtgatccaggctgacggtggcactcgcacggcgtccatcaccggcgctatggttgccctggtcgatgcgctcaaagtcatcaagaagcgtggcggcctgaaaggcggcgatccgctcaagcagatgatcgcggctgtatcggtaggcatgtatcagggcgagccagtgctggatctggactatcttgaagattcggctgccgagaccgacctgaacgtggtgatgaccagcaccggtggtttcatcgaagtgcagggcaccgccgaaggcgcgccattccagccggcggacctgaatgccatgctggcattggcccagaaaggcatgaccgagatcttcgaactgcagaacgccgccctgnnngactgattnnnccccaaggagctannncatgagngncagtcaacttccgctgccgacaccgtcnnnnnnannnnnnnnnnnnnnnntnnnnnnnnnnnnnncgnnnnn

SEQ ID NO: 5419 - DNA, 634 bp, Zea mays
  misc_feature (1)..(33): n is a, c, g, or t
  misc_feature (533)..(533): n is a, c, g, or t
  misc_feature (535)..(538): n is a, c, g, or t
  misc_feature (551)..(551): n is a, c, g, or t
  misc_feature (553)..(553): n is a, c, g, or t
  misc_feature (581)..(582): n is a, c, g, or t
  misc_feature (587)..(598): n is a, c, g, or t
  misc_feature (601)..(603): n is a, c, g, or t
  misc_feature (605)..(607): n is a, c, g, or t
  misc_feature (614)..(621): n is a, c, g, or t
  misc_feature (625)..(634): n is a, c, g, or t
  Peptide Sequence Number=SeqID_12042
  Probeset Number=SeqID_19822
nnnnnnnnnnnnnnnnnnnnnnnnnnnnnnnnnaggtcaacagctcgcccctggatcgctccaataactcgccgctgaaccagcaatgggacgaactcgagcgcctggccaatctcgcccataccgacatattgccggacgccagcctcaccctggccgcgctgatgacggtatatcggctgccccggcccgccagcgcagaggaagccctggctctgatcgaacagctacgcgccaccacggctgccacgtttccttatgtcagctcggcggcgcactcattgatggccgtcagcaaacacacgcggcatatcgcggtgctcaacgaccgctacaccatgcgggcagcactcaagtcgatcaccctcgatacacagctcaacagcaccctggacatgaccttcaacctggccctgggctcaccctttttcgggttgatcgacaaaggcgcgcaattgctcgccggcctgcgccaggaagcggcctttcaacgcgtgagcgccagccgccagttcgaccttgcccgggtatangnnnntgaacgcggacgncnacctcagtggctacgcgctggaacgatnnccccnnnnnnnnnnnncgnnncnnnacgccgnnnnnnnncctnnnnnnnnnn

SEQ ID NO: 5420 - DNA, 634 bp, Zea mays
  misc_feature (1)..(10): n is a, c, g, or t
  misc_feature (14)..(21): n is a, c, g, or t
  misc_feature (28)..(30): n is a, c, g, or t
  misc_feature (32)..(34): n is a, c, g, or t
  misc_feature (37)..(48): n is a, c, g, or t
  misc_feature (53)..(54): n is a, c, g, or t
  misc_feature (82)..(82): n is a, c, g, or t
  misc_feature (84)..(84): n is a, c, g, or t
  misc_feature (97)..(100): n is a, c, g, or t
  misc_feature (102)..(102): n is a, c, g, or t
  misc_feature (601)..(634): n is a, c, g, or t
  Probeset Number=SeqID_19823
nnnnnnnnnnaggnnnnnnnncggcgtnnngnnncgnnnnnnnnnnnnggggnnatcgttccagcgcgtagccactgaggtngncgtccgcgttcannnncntatacccgggcaaggtcgaactggcggctggcgctcacgcgttgaaaggccgcttcctggcgcaggccggcgagcaattgcgcgcctttgtcgatcaacccgaaaaagggtgagcccagggccaggttgaaggtcatgtccagggtgctgttgagctgtgtatcgagggtgatcgacttgagtgctgcccgcatggtgtagcggtcgttgagcaccgcgatatgccgcgtgtgtttgctgacggccatcaatgagtgcgccgccgagctgacataaggaaacgtggcagccgtggtggcgcgtagctgttcgatcagagccagggcttcctctgcgctggcgggccggggcagccgatataccgtcatcagcgcggccagggtgaggctggcgtccggcaatatgtcggtatgggcgagattggccaggcgctcgagttcgtcccattgctggttcagcggcgagttattggagcgatccaggggcgagctgttgaccnnnnnnnnnnnnnnnnnnnnnnnnnnnnnnnnnn

SEQ ID NO: 5421 - DNA, 833 bp, Zea mays
  misc_feature (1)..(4): n is a, c, g, or t
  misc_feature (7)..(9): n is a, c, g, or t
  misc_feature (11)..(11): n is a, c, g, or t
  misc_feature (14)..(20): n is a, c, g, or t
  misc_feature (27)..(29): n is a, c, g, or t
  misc_feature (52)..(52): n is a, c, g, or t
  misc_feature (66)..(68): n is a, c, g, or t
  misc_feature (97)..(99): n is a, c, g, or t
  misc_feature (106)..(108): n is a, c, g, or t
  misc_feature (120)..(120): n is a, c, g, or t
  misc_feature (122)..(123): n is a, c, g, or t
  misc_feature (126)..(128): n is a, c, g, or t
  misc_feature (135)..(135): n is a, c, g, or t
  misc_feature (140)..(140): n is a, c, g, or t
  misc_feature (142)..(142): n is a, c, g, or t
  misc_feature (164)..(164): n is a, c, g, or t
  misc_feature (182)..(184): n is a, c, g, or t
  misc_feature (217)..(219): n is a, c, g, or t
  misc_feature (236)..(237): n is a, c, g, or t
  misc_feature (245)..(247): n is a, c, g, or t
  misc_feature (259)..(261): n is a, c, g, or t
  misc_feature (280)..(283): n is a, c, g, or t
  misc_feature (327)..(328): n is a, c, g, or t
  misc_feature (336)..(338): n is a, c, g, or t
  misc_feature (373)..(375): n is a, c, g, or t
  misc_feature (379)..(380): n is a, c, g, or t
  misc_feature (390)..(403): n is a, c, g, or t
  misc_feature (408)..(410): n is a, c, g, or t
  misc_feature (416)..(429): n is a, c, g, or t
  misc_feature (434)..(436): n is a, c, g, or t
  misc_feature (448)..(450): n is a, c, g, or t
  misc_feature (464)..(464): n is a, c, g, or t
  misc_feature (483)..(483): n is a, c, g, or t
  misc_feature (655)..(657): n is a, c, g, or t
  misc_feature (659)..(659): n is a, c, g, or t
  misc_feature (661)..(661): n is a, c, g, or t
  misc_feature (664)..(666): n is a, c, g, or t
  misc_feature (668)..(669): n is a, c, g, or t
  misc_feature (676)..(679): n is a, c, g, or t
  misc_feature (684)..(687): n is a, c, g, or t
  misc_feature (691)..(697): n is a, c, g, or t
  misc_feature (704)..(706): n is a, c, g, or t
  misc_feature (709)..(712): n is a, c, g, or t
  misc_feature (714)..(734): n is a, c, g, or t
  misc_feature (741)..(744): n is a, c, g, or t
  misc_feature (747)..(749): n is a, c, g, or t
  misc_feature (751)..(751): n is a, c, g, or t
  misc_feature (753)..(770): n is a, c, g, or t
  misc_feature (773)..(775): n is a, c, g, or t
  misc_feature (780)..(783): n is a, c, g, or t
  misc_feature (785)..(785): n is a, c, g, or t
  misc_feature (787)..(791): n is a, c, g, or t
  misc_feature (793)..(796): n is a, c, g, or t
  misc_feature (799)..(801): n is a, c, g, or t
  misc_feature (803)..(803): n is a, c, g, or t
  misc_feature (805)..(819): n is a, c, g, or t
  misc_feature (821)..(823): n is a, c, g, or t
  misc_feature (827)..(833): n is a, c, g, or t
  Peptide Sequence Number=SeqID_12043
  Probeset Number=SeqID_19824
nnnncgnnngngannnnnnngaactgnnngcggaggctgagccacgcgcagnaacagcagggccgnnncctgacccgcagcgaacgcttccacgaannnttcgccnnngcgcgcgaggcncnncgnnngctgctnttcgncnagctcatcatcatggtggtgtncctgccgatcttcgcgcnnngcggggtcgaagggcgcatgttccatcccatgnnnctgaccgtggtgctggnnctgctggnnncaatgatcctgnnngtcaccttcgtgccggcgnnnngggggctgttcatcggcaagaaggtctcggaaaaggaaaaccgnntgatgctnnngggcaagcgccgctacgcgccgctgctggacctgnnnctgnnccgcacgccnnnnnnnnnnnnnnccgcnnncctgtnnnnnnnnnnnnnntcggnnngatcgacaaagnnngcgcaattgctcgncggcctgcgccaggaaggngcctttcaacgcgtgagcgccagccgccagttcgaccttgcccgggtatacgtactgaacgcggacggcgacctcagtggctacgcgctggacgatacccccaaggtactcacccgtaccgacacgccgctctcaagcctgacctcgatggccgagcccttactggagctgnnncncnaannngnnggtcgcnnnnaccannnntggnnnnnnnagtttgnnncannnncnnnnnnnnnnnnnnnnnnnnntcccaannnnccnnnangnnnnnnnnnnnnnnnnnncgnnngctgnnnntngnnnnncnnnngannncncnnnnnnnnnnnnnnngnnntggnnnnnnn

SEQ ID NO: 5422 - DNA, 602 bp, Zea mays
  misc_feature (1)..(6): n is a, c, g, or t
  misc_feature (602)..(602): n is a, c, g, or t
  Peptide Sequence Number=SeqID_12044
  Probeset Number=SeqID_19825
nnnnnngaacctgcgttcgccgtccaagccgttggtgttcctgccccattccttgtcggaaatcaccggcccgactatcggcgccgagcgcatcaacgagaaggacagcgacctgaccgcccagcatgaaggcgagccccagggcgaacgcatcatcattcacgggcgtgtgctggacgaaaacggcttgcccgtgcccggcatcctcgtggaaatctggcaggccaatgctgccggccgctacaaccacaagcgcgaccagcacgacgcgccgctggacccgaacttcaccggcaccgggcgcaccgtcaccgacgccgagggctggtaccagttccagaccatcaagcccggcgcctacccgtggggcaaccaccacaacgcgtggcgcccggcgcacatccacttctcgctgttcggcccgagtgtgctgacgcggttggtgacgcagatgtatttccccggcgacccgctgctggcctacgacccgatctacaactgcgtcccggacacgtccgccaaggaacgcctgatcgccagtttcgacctggaaaaaaccattccgcactatgccctcggctaccgctgggacatcgtcctgn

SEQ ID NO: 5423 - DNA, 508 bp, Zea mays
  misc_feature (507)..(508): n is a, c, g, or t
  Peptide Sequence Number=SeqID_12045
  Probeset Number=SeqID_19826
tcccgcagataagaccgcaaccaatggctgcccggtttcgatggttactggtgaggagctactgaccctcactgacggctcgttggaaggtgtgctgccgtttgcctggacgcggttgtatcgcagcagtgccgtggagttggattgcgggttggggtttggctggagtcattcgctggcgcagcggttggtggtgagcggtgaatcggtggtgtggaccgatcacgaaaaccgcagcaccacgttccccctgccctctgctgcgcggccagccatcaccaatagcctggcggaggcggcgatttatctgggctcgttgcccgatgaactggtgctggctcaggcgtcgcttttctaccatttccgcaacggggtgctgacgtcgatcagcgacgcgtacgacaaccggctgcgcatttcccgagactattccggacgaattcagcggatcgataaccatgtcggccaaggattgctgctgcggtatgaccgtggacacatcgttgnn

SEQ ID NO: 5424 - DNA, 927 bp, Zea mays
  misc_feature (1)..(35): n is a, c, g, or t
  misc_feature (839)..(839): n is a, c, g, or t
  misc_feature (841)..(842): n is a, c, g, or t
  misc_feature (844)..(846): n is a, c, g, or t
  misc_feature (880)..(880): n is a, c, g, or t
  misc_feature (884)..(885): n is a, c, g, or t
  misc_feature (887)..(887): n is a, c, g, or t
  misc_feature (893)..(909): n is a, c, g, or t
  misc_feature (918)..(919): n is a, c, g, or t
  misc_feature (921)..(927): n is a, c, g, or t
  Peptide Sequence Number=SeqID_12046
  Probeset Number=SeqID_19827
nnnnnnnnnnnnnnnnnnnnnnnnnnnnnnnnnnntggtgatccgctacagcatcgacgactacacgaacctctacggtttgtgcctgttcgatgaatgtttcgccgtgtatggctcccctgaacaagtcgccctggcgcgcgaacgcaccccgaccctgatcagcgtgcgctggcacaactccaagctgtacgccctgggctggcaggcctggtgcgaaaaagccggggaagattggttgcaatccgcttcgccactgcgcgaatacgacgaagaacactacgccttgcaagcagcgattgccggccagggcctggtattggcgagcaatatcctggtctcggaaagcgtcgccagcgggttgctggtgccttaccggccacagatccgcgtcaacggcgccggctacagcgccctgtgcgtgccggggcgtgaacggcatccgccggtccgggcgttttttgagtggttgcaggaggaagcgcggctgtcgggacacacgctggaaaatccgataaaacttttcgggttgcctgggactcacaaccagtgagcgatcacgccggcagagcgtggcgcaaaaccggattagtaccaggagaatgagatgactgactcacatttgtctgacgtagccactttacgtgaccgcgcccgcaagaacgtcgaaaacggtgccgtgactgaaggctatgacgccgaccgccaggaaatcctgcgtctgctcaacgaatcactggccaccgaactggtgtgtgtgctgcgctacaagcgccactacttcatggccaatggcgtcaaggcgcatgtcgccgccgaggaattcctcgagcacgcgncnnannnagccgaacacgccgacaagctggccgagcgcatngtcnngntgggcnnnnnnnnnnnnnnnnnccccgactnntnnnnnnn

SEQ ID NO: 5425 - DNA, 792 bp, Zea mays
  misc_feature (1)..(1): n is a, c, g, or t
  misc_feature (7)..(13): n is a, c, g, or t
  misc_feature (20)..(25): n is a, c, g, or t
  misc_feature (27)..(30): n is a, c, g, or t
  misc_feature (37)..(37): n is a, c, g, or t
  misc_feature (39)..(41): n is a, c, g, or t
  misc_feature (49)..(49): n is a, c, g, or t
  misc_feature (559)..(563): n is a, c, g, or t
  misc_feature (601)..(792): n is a, c, g, or t
  Peptide Sequence Number=SeqID_12047
  Probeset Number=SeqID_19828
ntacgcnnnnnnnggtaccnnnnnncnnnnaatttcncnnngtcgaccntggacatggtcgtggcctttgccaagcgcgcccgggaaatgggtgcgcggcacctgatcgtgatcagcgcgattggtgccgatccgaaatcctcgatcttctacaaccgggtcaagggcgagatggaacaggcgctaaaggctcaggattggccgcagttgaccatcgtccgaccttcactgttgctgggtgagcggttggagccacgcctggccgagcaactggccgggccattgtcgcggctgattccgggtaaataccacggcattgaagtgtgtgaactggcgcgcgcgatgtggcggctggcgctggaagagcaggatggggtgcgggttgtggagtcggatgagttgcgtaagctcggcaagtaattttgcagtgaggcgacgggcctcttcgcgggcaagcccagctcccacattgaccgcgctgtcatggcgaacacagtctcatgtgggagctggcttgcctgcgatgaggccggtgtaggcgccgcccctctcaggcccnnnnncccgcccgtcgcgttaaacccaacccccaacaccgtcnnnnnnnnnnnnnnnnnnnnnnnnnnnnnnnnnnnnnnnnnnnnnnnnnnnnnnnnnnnnnnnnnnnnnnnnnnnnnnnnnnnnnnnnnnnnnnnnnnnnnnnnnnnnnnnnnnnnnnnnnnnnnnnnnnnnnnnnnnnnnnnnnnnnnnnnnnnnnnnnnnnnnnnnnnnnnnnnnnnnnnnnnnnnnnnn

SEQ ID NO: 5426 - DNA, 154 bp, Zea mays
  misc_feature (1)..(2): n is a, c, g, or t
  misc_feature (4)..(4): n is a, c, g, or t
  Peptide Sequence Number=SeqID_12048
  Probeset Number=SeqID_19829
nntntgcccgagccggatacgccggtcacgcacaccaggcggcccagcggcagctcgaccgagacgttcttgaggttgtgcgcgttgacgccctcgagcagcaggcgcggcgtgttggccgccaccggcatggggcgcggcgcttcgacgcgct

SEQ ID NO: 5427 - DNA, 154 bp, Zea mays
  misc_feature (151)..(151): n is a, c, g, or t
  misc_feature (153)..(154): n is a, c, g, or t
  Peptide Sequence Number=SeqID_12049
  Probeset Number=SeqID_19830
agcgcgtcgaagcgccgcgccccatgccggtggcggccaacacgccgcgcctgctgctcgagggcgtcaacgcgcacaacctcaagaacgtctcggtcgagctgccgctgggccgcctggtgtgcgtgaccggcgtatccggctcgggcanann

SEQ ID NO: 5428 - DNA, 965 bp, Zea mays
  misc_feature (1)..(3): n is a, c, g, or t
  misc_feature (5)..(28): n is a, c, g, or t
  misc_feature (30)..(47): n is a, c, g, or t
  misc_feature (49)..(66): n is a, c, g, or t
  misc_feature (68)..(79): n is a, c, g, or t
  misc_feature (85)..(90): n is a, c, g, or t
  misc_feature (94)..(98): n is a, c, g, or t
  misc_feature (103)..(109): n is a, c, g, or t
  misc_feature (113)..(113): n is a, c, g, or t
  misc_feature (115)..(120): n is a, c, g, or t
  misc_feature (124)..(125): n is a, c, g, or t
  misc_feature (129)..(133): n is a, c, g, or t
  misc_feature (135)..(163): n is a, c, g, or t
  misc_feature (168)..(174): n is a, c, g, or t
  misc_feature (178)..(191): n is a, c, g, or t
  misc_feature (193)..(193): n is a, c, g, or t
  misc_feature (195)..(204): n is a, c, g, or t
  misc_feature (219)..(226): n is a, c, g, or t
  misc_feature (237)..(239): n is a, c, g, or t
  misc_feature (245)..(245): n is a, c, g, or t
  misc_feature (257)..(259): n is a, c, g, or t
  misc_feature (963)..(965): n is a, c, g, or t
  Peptide Sequence Number=SeqID_12050
  Probeset Number=SeqID_19831
nnngnnnnnnnnnnnnnnnnnnnnnnnngnnnnnnnnnnnnnnnnnntnnnnnnnnnnnnnnnnnnannnnnnnnnnnngggttnnnnnnggannnnnggcgnnnnnnngganannnnnngtgnnaacnnnnnannnnnnnnnnnnnnnnnnnnnnnnnnnnnagcgnnnnnnngggnnnnnnnnnnnnnnangnnnnnnnnnnagcgcctggcgttgnnnnnnnnaaaacgctcgnnnattganccgtccccgcgnnntgcgtagccttgcaccttcgaggttcttcggcccaggccgaagctaagaagggaacgcggtcaatgccgcggctgcccccgcaactgtaaagggtttatctgactgccacgccactgcctgaacaaggcgggaaggcgcagccagcgccggcctcaccgccggcaagccccaagccaggagacctgcctcgcaaccgattttctacttcaaccgggcggggtgatccggtggcgaattctgcttctgcgcacccgcgcagggccactcgtcccgtatgcccgccccaaagggcatccgatgaaaacactggccaaactccccgtcaccatcgttaccggcttcctcggctcgggcaagaccaccttgctgcgccacatgctggataacgcccaggggcgccgcatcgcggtgatcgtcaacgagttcggcgagctgggcattgacggtgaaatcctcaagcaatgttccatcggctgcaccgaagaagaagccaacggccgcgtctacgaattggccaatggctgcctgtgctgcacggtccaggaagagttcttcccggtgatgcgcgaactggtggcccgtcgcggcgacctcgaccatatcctcatcgaaacctcgggcctggccctgccaaaacccttggtccaggcgttccagtggccggaaatccgcagtgcctgcaccgttgacgccgtgatcaccnnn

SEQ ID NO: 5429 - DNA, 615 bp, Zea mays
  misc_feature (1)..(11): n is a, c, g, or t
  misc_feature (13)..(33): n is a, c, g, or t
  misc_feature (35)..(86): n is a, c, g, or t
  misc_feature (88)..(91): n is a, c, g, or t
  misc_feature (93)..(95): n is a, c, g, or t
  misc_feature (100)..(110): n is a, c, g, or t
  misc_feature (114)..(135): n is a, c, g, or t
  misc_feature (137)..(140): n is a, c, g, or t
  misc_feature (143)..(186): n is a, c, g, or t
  misc_feature (188)..(193): n is a, c, g, or t
  misc_feature (195)..(213): n is a, c, g, or t
  misc_feature (216)..(237): n is a, c, g, or t
  misc_feature (239)..(247): n is a, c, g, or t
  misc_feature (254)..(282): n is a, c, g, or t
  misc_feature (287)..(288): n is a, c, g, or t
  misc_feature (293)..(294): n is a, c, g, or t
  misc_feature (296)..(296): n is a, c, g, or t
  misc_feature (300)..(308): n is a, c, g, or t
  misc_feature (319)..(320): n is a, c, g, or t
  misc_feature (322)..(323): n is a, c, g, or t
  misc_feature (328)..(328): n is a, c, g, or t
  misc_feature (612)..(615): n is a, c, g, or t
  Peptide Sequence Number=SeqID_12051
  Probeset Number=SeqID_19832
nnnnnnnnnnncnnnnnnnnnnnnnnnnnnnnntnnnnnnnnnnnnnnnnnnnnnnnnnnnnnnnnnnnnnnnnnnnnnnnnnnnntnnnntnnnggtgnnnnnnnnnnngtcnnnnnnnnnnnnnnnnnnnnnngnnnnccnnnnnnnnnnnnnnnnnnnnnnnnnnnnnnnnnnnnnnnnnnnngnnnnnngnnnnnnnnnnnnnnnnnnnggnnnnnnnnnnnnnnnnnnnnnncnnnnnnnnnggggggnnnnnnnnnnnnnnnnnnnnnnnnnnnnnccagnnatccnnancgcnnnnnnnnnctgttcgcccnnanngccgncgtaggcctgagcgccgccgccggtggtgcccgtgaggtgtgcaacctggactttgccgagggcaacctggcggtcggtcgcgaaaacgggcaactgaatccgcaattgccgacgatggaattcgtccagtccgactacttcccggcaatccgccaactggccggcctgcccatcagccagcgtcgcggccagaagctgccgagttatccgcgtctgggccagcgtcaatacgacctggtgctgctcgacccgccggcctgggccaagagcgccttcggcaccnnnn

SEQ ID NO: 5430 - DNA, 989 bp, Zea mays
  misc_feature (1)..(1): n is a, c, g, or t
  misc_feature (4)..(9): n is a, c, g, or t
  misc_feature (12)..(22): n is a, c, g, or t
  misc_feature (30)..(30): n is a, c, g, or t
  misc_feature (35)..(43): n is a, c, g, or t
  misc_feature (45)..(45): n is a, c, g, or t
  misc_feature (47)..(52): n is a, c, g, or t
  misc_feature (61)..(64): n is a, c, g, or t
  misc_feature (68)..(71): n is a, c, g, or t
  misc_feature (73)..(73): n is a, c, g, or t
  misc_feature (78)..(84): n is a, c, g, or t
  misc_feature (89)..(89): n is a, c, g, or t
  misc_feature (94)..(94): n is a, c, g, or t
  misc_feature (98)..(98): n is a, c, g, or t
  misc_feature (100)..(100): n is a, c, g, or t
  misc_feature (107)..(110): n is a, c, g, or t
  misc_feature (124)..(126): n is a, c, g, or t
  misc_feature (163)..(165): n is a, c, g, or t
  misc_feature (179)..(179): n is a, c, g, or t
  misc_feature (986)..(989): n is a, c, g, or t
  Peptide Sequence Number=SeqID_12052
  Probeset Number=SeqID_19833
natnnnnnntgnnnnnnnnnnncggggggnttttnnnnnnnnncngnnnnnncaagctggnnnnggtnnnncncgttnnnnnnnaagcncgtgntgcntngctttgnnnntggcctggcgctgnnnatcatcctcaagcagttggccagcgtggtgggggtgnnnctgaccgataacancctgattcgctttctgccccaactcctggagcaactgccgcgctggaactgggccgccgctgccgtagcgggtgtcgcgttgctcctgctctggctatgcgcgcgaatcaagcgtctgcccggcggactactggtggtgatcctcgggattgccgccggccagtggctggatttacaggcccatggcgtggcgttgatcggtgtgatcgacctgcgcctggagttcgcgcaccttccggtgttgccgttcgccgactggctgcgcctgggggaattggcgtttgccatggtgatgattctttacgccgagtcctacggctccatcagcgcgttcgccctcaagcacggtgatcgcgtgtcatccaaccgtgacttgctggcgctgggggcggccaacctgttgtccgggctgttccagggcatgcccactggcgccggttattccgcgacgtcggccaatgaggcggcgggagccaactcccggctggcgggcgccgtggcggcattggtggtgttggcgatcgtactgacagtgctgcccctggtggcattgacgccggagccggtgcttgccgccatcgtcatctatgccttgggtcgtggcttgagcctgcagcccttgggccgctatttctcctggcggcgcgaccggttgctagtgatttgcgcggtggcggcggtgttggtgctcggcgtgctggatggcctgctggtggcggtcgggatcagcgtggtgttgatgttgcgccagatgtcgtcggcggatgtccgcgagttggggcgcattgacggtgggcatgatttttnnnn

SEQ ID NO: 5431 - DNA, 891 bp, Zea mays
  misc_feature (1)..(25): n is a, c, g, or t
  misc_feature (28)..(37): n is a, c, g, or t
  misc_feature (39)..(39): n is a, c, g, or t
  misc_feature (42)..(57): n is a, c, g, or t
  misc_feature (59)..(60): n is a, c, g, or t
  misc_feature (65)..(108): n is a, c, g, or t
  misc_feature (111)..(155): n is a, c, g, or t
  misc_feature (158)..(176): n is a, c, g, or t
  misc_feature (178)..(190): n is a, c, g, or t
  misc_feature (192)..(213): n is a, c, g, or t
  misc_feature (215)..(234): n is a, c, g, or t
  misc_feature (236)..(243): n is a, c, g, or t
  misc_feature (245)..(251): n is a, c, g, or t
  misc_feature (253)..(264): n is a, c, g, or t
  misc_feature (272)..(274): n is a, c, g, or t
  misc_feature (282)..(286): n is a, c, g, or t
  misc_feature (297)..(304): n is a, c, g, or t
  misc_feature (308)..(316): n is a, c, g, or t
  misc_feature (318)..(319): n is a, c, g, or t
  misc_feature (888)..(891): n is a, c, g, or t
  Peptide Sequence Number=SeqID_12053
  Probeset Number=SeqID_19834
nnnnnnnnnnnnnnnnnnnnnnnnnggnnnnnnnnnncnttnnnnnnnnnnnnnnnnannggggnnnnnnnnnnnnnnnnnnnnnnnnnnnnnnnnnnnnnnnnnnnntcnnnnnnnnnnnnnnnnnnnnnnnnnnnnnnnnnnnnnnnnnnnnntannnnnnnnnnnnnnnnnnngnnnnnnnnnnnnngnnnnnnnnnnnnnnnnnnnnnncnnnnnnnnnnnnnnnnnnnntnnnnnnnnannnnnnntnnnnnnnnnnnnccaagggnnnggtcacgnnnnnacatcaagggnnnnnnnnaaannnnnnnnnanngcccggaactgctgcgcctgatgtccaccggcgtggtcgagttcggcaccgccacgctgtcgtacttcgccagcgacaacccgatcaacgaagccatcgacctggccggcctggcgccggacgtgaagacggcgcgcgaggtgaccaacgccttcgagccggtctatgcgcgcctgtacggcgagggcagcaacgtcaagctgctgggcatctccacctatccggcgcaggtgctgttctgcaacgccgagatcaagggcctggccgacatcaagggcaagaaggtccgcaccagcagccgcaccaccgccgaattcgtggaagcgctgggcggctccagcgtcaccatggcgttcggcgaagtggtgccggcgctgcagaacaaggtggtcgattgcgccatcaccggttcgctgtcgggctactcggccaagtggtacgaagtctcgacccacctggtggcgctgccgatcaactggaaccagcagatccacgccgtcaaccagaaggcctgggacaagctcgaccccaacgtgcgcaccttcctgcaggccaacgtcaagacgctnnnn

SEQ ID NO: 5432 - DNA, 951 bp, Zea mays
  misc_feature (1)..(2): n is a, c, g, or t
  misc_feature (829)..(829): n is a, c, g, or t
  misc_feature (842)..(844): n is a, c, g, or t
  misc_feature (849)..(856): n is a, c, g, or t
  misc_feature (858)..(858): n is a, c, g, or t
  misc_feature (863)..(863): n is a, c, g, or t
  misc_feature (865)..(867): n is a, c, g, or t
  misc_feature (870)..(888): n is a, c, g, or t
  misc_feature (894)..(905): n is a, c, g, or t
  misc_feature (909)..(909): n is a, c, g, or t
  misc_feature (911)..(951): n is a, c, g, or t
  Peptide Sequence Number=SeqID_12054
  Probeset Number=SeqID_19835
nngcaaccagaccgacttctttacccagcagatgtacagcgaccaggcgtcgttcgatatcgcccactcggtgcaacgcgtggcccgtgcccgtggcgtgtccaacgcgcagatcgcccaggcgtgggtagccaaccacccgggtgtggacgtgatgctggtgggcgccgacaccaccgcgcaatttgatagcgcgcttgcagccctcgacacccaattggatgccgaagaactgcacgagctggaacgcaactacacgccgtgcgatgtgatcaacgactacaccgccggcaaacgcatcctgcgcagcgcccgtccgggcctggaccgctttaacctgatagaggccgtggcatgaacccgctgattcgcacaggcaatttcatcgatggccaatggtccagcggtgggccggtttacccggtgctcaacccggccaatggcgcgcaaatcgccgaggtgcaacgcgccggagccgaggaaaccaacctggccatcgccgccgccaaccgtgcgttgccggcctggcgcaagctcaccgccaaggaacgcagccagcgcctcaagcgctggagtgacttgatgctgagcaaccagaaagacctggcccacttgctcagcctcgaacagggcaagccgctggccgaagccatgggcgaagtggtctacgccgcgagcttcctggagtggttcgccgaagaagccaagcgcgcctatggcgacgtgatcccgagccacaaggccgatgcgcggatcatcgtgaccaaggaagcgattggcgtggtcgcggcgatcaccccgtggaacttcccgctggccatggtcaccngcaaggtcggccnnncgctnnnnnnnngntgcangnnnatnnnnnnnnnnnnnnnnnnnaccccnnnnnnnnnnnntgcncnnnnnnnnnnnnnnnnnnnnnnnnnnnnnnnnnnnnnnnnn

SEQ ID NO: 5433 - DNA, 371 bp, Zea mays
  misc_feature (369)..(371): n is a, c, g, or t
  Peptide Sequence Number=SeqID_12055
  Probeset Number=SeqID_19836
cgtcgcctgcgggtagaatcgacgggtttatccctcaaccggcgatggaacccatgcgacacctgattaccggccgcgcctggcgcggtctgctgttggccttgtgcatgctgcttgccgcctgcggcgaccgcaatgtcgattggacgctctacaacgtcaagggccacctgcccgacctgaagttctcgctgccgggcgccggcggcaagacggtcagcagcgatgacctcaagggcaagacggtgctgctgttcttcggctacgccagttgccccgacatctgcccgaccaccatggcgcagttgacggcggtgctgcagaacctgggcgacaaggcgcgcgacgtgcgcatcctgttcgtcagcnnn

SEQ ID NO: 5434 - DNA, 655 bp, Zea mays
  misc_feature (1)..(4): n is a, c, g, or t
  misc_feature (655)..(655): n is a, c, g, or t
  Peptide Sequence Number=SeqID_12056
  Probeset Number=SeqID_19837
nnnntgcaaggcagcgcctttgctgacttggtaggccgctgggtagtccttgtacatggtgggtcctcgcttcagggttttggaatgctgctcaggatgtccagcagcagcgattcggagtcattgaggtagctggccagggcttccccggcggcttgtttgtggccgtcaaccagcaagtcgtgaatctgccggtcgcgctccagccagggcttctggaaggtttcctcgctgggcgcgttggaaaacaccaggcgcatctgggctgcaatatgggtaaaaaactcgtccagcagcgggctgcgcatcagcccgacaatgtgttgatgaaagcgcaggctgtgggtgccgaaggcttgccagttctcgcggtcctgggccagttgcgcggcttcgatggactcgagcatcaggtcggactggtattcgcgcagcggcttgctggcggcgatggcctgcagctccagggtgcgtcgcaccttgaagatgtcacgcacttcctccaccccgaggcggcgcacgatcacgcctttgttgcgcacgtagctggtcaggccttcgcggcccaggtggtgcaaggcttcacgcaccgtgttgcgcgaggcgttgtaggcgttcaccagttcgctctccaccagcggcatgccgggcagcn

SEQ ID NO: 5435 - DNA, 655 bp, Zea mays
  misc_feature (1)..(1): n is a, c, g, or t
  misc_feature (652)..(655): n is a, c, g, or t
  Peptide Sequence Number=SeqID_12057
  Probeset Number=SeqID_19838
ngctgcccggcatgccgctggtggagagcgaactggtgaacgcctacaacgcctcgcgcaacacggtgcgtgaagccttgcaccacctgggccgcgaaggcctgaccagctacgtgcgcaacaaaggcgtgatcgtgcgccgcctcggggtggaggaagtgcgtgacatcttcaaggtgcgacgcaccctggagctgcaggccatcgccgccagcaagccgctgcgcgaataccagtccgacctgatgctcgagtccatcgaagccgcgcaactggcccaggaccgcgagaactggcaagccttcggcacccacagcctgcgctttcatcaacacattgtcgggctgatgcgcagcccgctgctggacgagttttttacccatattgcagcccagatgcgcctggtgttttccaacgcgcccagcgaggaaaccttccagaagccctggctggagcgcgaccggcagattcacgacttgctggttgacggccacaaacaagccgccggggaagccctggccagctacctcaatgactccgaatcgctgctgctggacatcctgagcagcattccaaaaccctgaagcgaggacccaccatgtacaaggactacccagcggcctaccaagtcagcaaaggcgctgccttgcannnn

SEQ ID NO: 5436 - DNA, 156 bp, Zea mays
  Peptide Sequence Number=SeqID_12058
  Probeset Number=SeqID_19839
gccgaacctgctgacccttgataacgaggcggcgagtatttttgtggggcagacgattccgtttgtcaccggcagttatgtgaccggtggtggcgggaccagtaataacccgttccagacggtgcagcgggaggaggtggggttgaagctgaacgt

SEQ ID NO: 5437 - DNA, 156 bp, Zea mays
  Peptide Sequence Number=SeqID_12059
  Probeset Number=SeqID_19840
acgttcagcttcaaccccacctcctcccgctgcaccgtctggaacgggttattactggtcccgccaccaccggtcacataactgccggtgacaaacggaatcgtctgccccacaaaaatactcgccgcctcgttatcaagggtcagcaggttcggc

SEQ ID NO: 5438 - DNA, 650 bp, Zea mays
  misc_feature (1)..(1): n is a, c, g, or t
  misc_feature (150)..(150): n is a, c, g, or t
  misc_feature (154)..(156): n is a, c, g, or t
  misc_feature (159)..(159): n is a, c, g, or t
  misc_feature (161)..(161): n is a, c, g, or t
  misc_feature (163)..(163): n is a, c, g, or t
  misc_feature (165)..(165): n is a, c, g, or t
  misc_feature (185)..(187): n is a, c, g, or t
  misc_feature (189)..(193): n is a, c, g, or t
  misc_feature (196)..(196): n is a, c, g, or t
  misc_feature (198)..(198): n is a, c, g, or t
  misc_feature (200)..(202): n is a, c, g, or t
  misc_feature (206)..(226): n is a, c, g, or t
  misc_feature (228)..(228): n is a, c, g, or t
  misc_feature (237)..(240): n is a, c, g, or t
  misc_feature (245)..(245): n is a, c, g, or t
  misc_feature (249)..(253): n is a, c, g, or t
  misc_feature (255)..(257): n is a, c, g, or t
  misc_feature (261)..(261): n is a, c, g, or t
  misc_feature (263)..(284): n is a, c, g, or t
  misc_feature (286)..(289): n is a, c, g, or t
  misc_feature (293)..(294): n is a, c, g, or t
  misc_feature (301)..(301): n is a, c, g, or t
  misc_feature (307)..(311): n is a, c, g, or t
  misc_feature (314)..(314): n is a, c, g, or t
  misc_feature (317)..(319): n is a, c, g, or t
  misc_feature (321)..(333): n is a, c, g, or t
  misc_feature (337)..(349): n is a, c, g, or t
  misc_feature (353)..(355): n is a, c, g, or t
  misc_feature (358)..(361): n is a, c, g, or t
  misc_feature (366)..(368): n is a, c, g, or t
  misc_feature (371)..(375): n is a, c, g, or t
  misc_feature (377)..(380): n is a, c, g, or t
  misc_feature (382)..(388): n is a, c, g, or t
  misc_feature (393)..(396): n is a, c, g, or t
  misc_feature (398)..(405): n is a, c, g, or t
  misc_feature (407)..(417): n is a, c, g, or t
  misc_feature (423)..(423): n is a, c, g, or t
  misc_feature (427)..(427): n is a, c, g, or t
  misc_feature (431)..(436): n is a, c, g, or t
  misc_feature (448)..(449): n is a, c, g, or t
  misc_feature (457)..(460): n is a, c, g, or t
  misc_feature (462)..(467): n is a, c, g, or t
  misc_feature (476)..(485): n is a, c, g, or t
  misc_feature (490)..(492): n is a, c, g, or t
  misc_feature (497)..(501): n is a, c, g, or t
  misc_feature (503)..(509): n is a, c, g, or t
  misc_feature (512)..(522): n is a, c, g, or t
  misc_feature (524)..(529): n is a, c, g, or t
  misc_feature (531)..(543): n is a, c, g, or t
  misc_feature (545)..(545): n is a, c, g, or t
  misc_feature (550)..(550): n is a, c, g, or t
  misc_feature (556)..(560): n is a, c, g, or t
  misc_feature (564)..(570): n is a, c, g, or t
  misc_feature (572)..(582): n is a, c, g, or t
  misc_feature (586)..(597): n is a, c, g, or t
  misc_feature (600)..(626): n is a, c, g, or t
  misc_feature (629)..(636): n is a, c, g, or t
  misc_feature (644)..(644): n is a, c, g, or t
  misc_feature (646)..(649): n is a, c, g, or t
  Peptide Sequence Number=SeqID_12060
  Probeset Number=SeqID_19841
nagttgatctggagcgaccaaggcagcggcgcccaccaggacttcagcgcctggggcgtttccccgtcgcaggcagctcctggacaagcctacctggcaccgggcacctttaccggcgccgagggctatgccaagccaaccaggcaaagnccgnnncangncntncagctggaccacacgctccnnncnnnnngantncnnncacnnnnnnnnnnnnnnnnnnnnncngcaccacannnntcacngcannnnncnnnaggnannnnnnnnnnnnnnnnnnnnnnannnnccgnngcccacntccacnnnnngcncgnnnannnnnnnnnnnnngacnnnnnnnnnnnnncccnnnacnnnntgtcnnnacnnnnngnnnncnnnnnnnatccnnnncnnnnnnnncnnnnnnnnnnnccgctnatgncagnnnnnnctagctgaaaanncacttccnnnntnnnnnntcatcttgnnnnnnnnnngcttnnncgccnnnnncnnnnnnngcnnnnnnnnnnntnnnnnntnnnnnnnnnnnnnancaccntcaccnnnnntggnnnnnnngnnnnnnnnnnnaatnnnnnnnnnnnngcnnnnnnnnnnnnnnnnnnnnnnnnnnngannnnnnnncttgccancnnnnt

SEQ ID NO: 5439 - DNA, 650 bp, Zea mays
  misc_feature (2)..(5): n is a, c, g, or t
  misc_feature (7)..(7): n is a, c, g, or t
  misc_feature (15)..(22): n is a, c, g, or t
  misc_feature (25)..(51): n is a, c, g, or t
  misc_feature (54)..(65): n is a, c, g, or t
  misc_feature (69)..(79): n is a, c, g, or t
  misc_feature (81)..(87): n is a, c, g, or t
  misc_feature (91)..(95): n is a, c, g, or t
  misc_feature (101)..(101): n is a, c, g, or t
  misc_feature (106)..(106): n is a, c, g, or t
  misc_feature (108)..(120): n is a, c, g, or t
  misc_feature (122)..(127): n is a, c, g, or t
  misc_feature (129)..(139): n is a, c, g, or t
  misc_feature (142)..(148): n is a, c, g, or t
  misc_feature (150)..(154): n is a, c, g, or t
  misc_feature (159)..(161): n is a, c, g, or t
  misc_feature (166)..(175): n is a, c, g, or t
  misc_feature (184)..(189): n is a, c, g, or t
  misc_feature (191)..(194): n is a, c, g, or t
  misc_feature (202)..(203): n is a, c, g, or t
  misc_feature (215)..(220): n is a, c, g, or t
  misc_feature (224)..(224): n is a, c, g, or t
  misc_feature (228)..(228): n is a, c, g, or t
  misc_feature (234)..(244): n is a, c, g, or t
  misc_feature (246)..(253): n is a, c, g, or t
  misc_feature (255)..(258): n is a, c, g, or t
  misc_feature (263)..(269): n is a, c, g, or t
  misc_feature (271)..(274): n is a, c, g, or t
  misc_feature (276)..(280): n is a, c, g, or t
  misc_feature (283)..(285): n is a, c, g, or t
  misc_feature (290)..(293): n is a, c, g, or t
  misc_feature (296)..(298): n is a, c, g, or t
  misc_feature (302)..(314): n is a, c, g, or t
  misc_feature (318)..(330): n is a, c, g, or t
  misc_feature (332)..(334): n is a, c, g, or t
  misc_feature (337)..(337): n is a, c, g, or t
  misc_feature (340)..(344): n is a, c, g, or t
  misc_feature (350)..(350): n is a, c, g, or t
  misc_feature (357)..(358): n is a, c, g, or t
  misc_feature (362)..(365): n is a, c, g, or t
  misc_feature (367)..(388): n is a, c, g, or t
  misc_feature (390)..(390): n is a, c, g, or t
  misc_feature (394)..(396): n is a, c, g, or t
  misc_feature (398)..(402): n is a, c, g, or t
  misc_feature (406)..(406): n is a, c, g, or t
  misc_feature (411)..(414): n is a, c, g, or t
  misc_feature (423)..(423): n is a, c, g, or t
  misc_feature (425)..(445): n is a, c, g, or t
  misc_feature (449)..(451): n is a, c, g, or t
  misc_feature (453)..(453): n is a, c, g, or t
  misc_feature (455)..(455): n is a, c, g, or t
  misc_feature (458)..(462): n is a, c, g, or t
  misc_feature (464)..(466): n is a, c, g, or t
  misc_feature (486)..(486): n is a, c, g, or t
  misc_feature (488)..(488): n is a, c, g, or t
  misc_feature (490)..(490): n is a, c, g, or t
  misc_feature (492)..(492): n is a, c, g, or t
  misc_feature (495)..(497): n is a, c, g, or t
  misc_feature (501)..(501): n is a, c, g, or t
  misc_feature (650)..(650): n is a, c, g, or t
  Peptide Sequence Number=SeqID_12061
  Probeset Number=SeqID_19842
annnngntggcaagnnnnnnnntcnnnnnnnnnnnnnnnnnnnnnnnnnnngcnnnnnnnnnnnnattnnnnnnnnnnncnnnnnnnccannnnnggtganggtgntnnnnnnnnnnnnnannnnnnannnnnnnnnnngcnnnnnnngnnnnnggcgnnnaagcnnnnnnnnnncaagatgannnnnnannnnggaagtgnnttttcagctagnnnnnnctgncatnagcggnnnnnnnnnnngnnnnnnnngnnnnggatnnnnnnngnnnncnnnnngtnnngacannnngtnnngggnnnnnnnnnnnnngtcnnnnnnnnnnnnntnnncgngcnnnnngtggangtgggcnncggnnnntnnnnnnnnnnnnnnnnnnnnnntncctnnngnnnnntgcngtgannnntgtggtgcngnnnnnnnnnnnnnnnnnnnnngtgnnngnantcnnnnngnnnggagcgtgtggtccagctgnangncntgnnncggnctttgcctggttggcttggcatagccctcggcgccggtaaaggtgcccggtgccaggtaggcttgtccaggagctgcctgcgacggggaaacgccccaggcgctgaagtcctggtgggcgccgctgccttggtcgctccagatcaactn

SEQ ID NO: 5440 - DNA, 595 bp, Zea mays
  misc_feature (1)..(4): n is a, c, g, or t
  misc_feature (358)..(361): n is a, c, g, or t
  misc_feature (364)..(364): n is a, c, g, or t
  misc_feature (399)..(402): n is a, c, g, or t
  misc_feature (404)..(404): n is a, c, g, or t
  misc_feature (406)..(408): n is a, c, g, or t
  misc_feature (412)..(415): n is a, c, g, or t
  misc_feature (418)..(425): n is a, c, g, or t
  misc_feature (430)..(430): n is a, c, g, or t
  misc_feature (432)..(434): n is a, c, g, or t
  misc_feature (436)..(436): n is a, c, g, or t
  misc_feature (440)..(443): n is a, c, g, or t
  misc_feature (445)..(447): n is a, c, g, or t
  misc_feature (456)..(456): n is a, c, g, or t
  misc_feature (458)..(468): n is a, c, g, or t
  misc_feature (472)..(476): n is a, c, g, or t
  misc_feature (478)..(499): n is a, c, g, or t
  misc_feature (502)..(520): n is a, c, g, or t
  misc_feature (522)..(527): n is a, c, g, or t
  misc_feature (529)..(529): n is a, c, g, or t
  misc_feature (533)..(537): n is a, c, g, or t
  misc_feature (540)..(572): n is a, c, g, or t
  misc_feature (576)..(591): n is a, c, g, or t
  Peptide Sequence Number=SeqID_12062
  Probeset Number=SeqID_19843
nnnnccgcgtcggcatcgaatacggcgtctacggcgtgcccgagaccttcgtcatcgacagcgccggccgcatccgctaccgccagttgggcctgatcacgccggatatctggcgcacccggctgcaaccgatgatcgaggcgctgcaatgatgacgcggtcccgccatcccgcgcccgccccggcctggcgcccggcgcaatcgccgggcatccaggagggtcacggcggccagccgccgcggcgccgcccgggccatggcctggccgcgccgctgctggcattgctgctggcgctggggtcgctggcgccggcccgggcccaggtgccgtcgcccccgctgccgccagcgctggannnncgngccgagcacctggcccatggcctgcgctgactggnnnncnannnccannnnctnnnnnnnnccaangnnncnctgnnnnannngatgcgcancnnnnnnnnnnngccnnnnngnnnnnnnnnnnnnnnnnnnnnnacnnnnnnnnnnnnnnnnnnnannnnnncnacannnnnttnnnnnnnnnnnnnnnnnnnnnnnnnnnnnnnnnaccnnnnnnnnnnnnnnnnggcc

SEQ ID NO: 5441 - DNA, 595 bp, Zea mays
  misc_feature (5)..(20): n is a, c, g, or t
  misc_feature (24)..(56): n is a, c, g, or t
  misc_feature (59)..(63): n is a, c, g, or t
  misc_feature (67)..(67): n is a, c, g, or t
  misc_feature (69)..(74): n is a, c, g, or t
  misc_feature (76)..(94): n is a, c, g, or t
  misc_feature (97)..(118): n is a, c, g, or t
  misc_feature (120)..(124): n is a, c, g, or t
  misc_feature (128)..(138): n is a, c, g, or t
  misc_feature (140)..(140): n is a, c, g, or t
  misc_feature (149)..(151): n is a, c, g, or t
  misc_feature (153)..(156): n is a, c, g, or t
  misc_feature (160)..(160): n is a, c, g, or t
  misc_feature (162)..(164): n is a, c, g, or t
  misc_feature (166)..(166): n is a, c, g, or t
  misc_feature (171)..(178): n is a, c, g, or t
  misc_feature (181)..(184): n is a, c, g, or t
  misc_feature (188)..(190): n is a, c, g, or t
  misc_feature (192)..(192): n is a, c, g, or t
  misc_feature (194)..(197): n is a, c, g, or t
  misc_feature (232)..(232): n is a, c, g, or t
  misc_feature (235)..(238): n is a, c, g, or t
  misc_feature (592)..(595): n is a, c, g, or t
  Peptide Sequence Number=SeqID_12063
  Probeset Number=SeqID_19844
ggccnnnnnnnnnnnnnnnnggtnnnnnnnnnnnnnnnnnnnnnnnnnnnnnnnnnaannnnntgtngnnnnnntnnnnnnnnnnnnnnnnnnngtnnnnnnnnnnnnnnnnnnnnnncnnnnnggcnnnnnnnnnnngntgcgcatcnnntnnnncagngnnncnttggnnnnnnnnagnnnntggnnntngnnnnccagtcagcgcaggccatgggccaggtgctcggcncgnnnntccagcgctggcggcagcgggggcgacggcacctgggcccgggccggcgccagcgaccccagcgccagcagcaatgccagcagcggcgcggccaggccatggcccgggcggcgccgcggcggctggccgccgtgaccctcctggatgcccggcgattgcgccgggcgccaggccggggcgggcgcgggatggcgggaccgcgtcatcattgcagcgcctcgatcatcggttgcagccgggtgcgccagatatccggcgtgatcaggcccaactggcggtagcggatgcggccggcgctgtcgatgacgaaggtctcgggcacgccgtagacgccgtattcgatgccgacgcggnnnn

SEQ ID NO: 5442 - DNA, 449 bp, Zea mays
  misc_feature (1)..(2): n is a, c, g, or t
  Peptide Sequence Number=SeqID_12064
  Probeset Number=SeqID_19845
nngccagcgtgcgcaaggacaccgaaaaagccctgatggcctaccggcagtccttgcaggacgggttgccgatcgagcaggtgcagcagcgcctggacgtggccaaaggcaagctcaccgagtcggccggcctgttgggcagcgatggcttgagctggtccctgagttacatctccggtttgctgatcctgctgcgcgagggcctggaggcgatcctggtgttggcggcgatcctcgcgttcctgcgtaacaccggccagcaatcggcggtgcgcagcgtcaacgtcggctggggcctggcgctattggccggcttggccacctgggcgttggcggcttatgtgattgacgtcagcggcgcccagcgcgagttgctggaaggctgcacggcgctgtttgccagtgtgatggtgctgtggctcggggtctggatgcacgaccgccgccac

SEQ ID NO: 5443 - DNA, 973 bp, Zea mays
  misc_feature (1)..(53): n is a, c, g, or t
  misc_feature (55)..(69): n is a, c, g, or t
  misc_feature (71)..(72): n is a, c, g, or t
  misc_feature (79)..(90): n is a, c, g, or t
  misc_feature (94)..(98): n is a, c, g, or t
  misc_feature (102)..(112): n is a, c, g, or t
  misc_feature (114)..(116): n is a, c, g, or t
  misc_feature (121)..(121): n is a, c, g, or t
  misc_feature (128)..(128): n is a, c, g, or t
  misc_feature (133)..(134): n is a, c, g, or t
  misc_feature (142)..(143): n is a, c, g, or t
  misc_feature (147)..(155): n is a, c, g, or t
  misc_feature (158)..(159): n is a, c, g, or t
  misc_feature (969)..(973): n is a, c, g, or t
  Peptide Sequence Number=SeqID_12065
  Probeset Number=SeqID_19846
nnnnnnnnnnnnnnnnnnnnnnnnnnnnnnnnnnnnnnnnnnnnnnnnnnnnnannnnnnnnnnnnnnngnnccggggnnnnnnnnnnnnctgnnnnngccnnnnnnnnnnnannnatccngggattngcagnntacccganncatnnnnnnnnnganntggcaatcagcatcggcggccaagtgctcgaccgcacccaggaccctgaagccggctttgacccggacactgtcatcccggccaaggaacaacgcaagatggaccggttcatcgtgtttgccctggccgccgcgcaagaggccctggcccaggcgggctggagtccgcagacgccatcgcagcaagaacgtaccgcgaccattattgcctccggcgtgggtggttttcccgcgattgccgaggccgtccgaacggctgacagcaaagggccgcgccgcctgtcgccgttcacgatcccgtcattcctcggcaacatggcggccgggcatgtgtcgatccagcatcaactgaaaggcccgctgggctcccccgtcactgcttgcgccgccggcgtacaggcgattggtgatgccgcgcgcatgatccgtgcaggggaaatcgacatcgccgtgtgtggcggcgccgaagcctgcatccaccgggtcagcctcggcggttttgctgcggcacgtgcactgtccagcgattacaacgacacgccgacattggcttcccgcccatttgatcaaggccgagatggatttgtgatgggcgaaggtgccgggatattggtgatcgaggagctggagcatgcactggctcgcggggccacgcctatcgccgagctggtgggctacggtaccagcgccgacgcctatcacatgacctcagggccggaagatggctccggtgcgcgccgggcgatggaattggcgattgcgcaggcggggatcagcgccgcacagatccagcatttgaacgcccatgccnnnnn

SEQ ID NO: 5444 - DNA, 788 bp, Zea mays
  misc_feature (1)..(1): n is a, c, g, or t
  misc_feature (713)..(714): n is a, c, g, or t
  misc_feature (716)..(722): n is a, c, g, or t
  misc_feature (727)..(733): n is a, c, g, or t
  misc_feature (735)..(788): n is a, c, g, or t
  Peptide Sequence Number=SeqID_12066
  Probeset Number=SeqID_19847
ngagatgcgcacgaagtcgtcggcgcgttcgccgccgatgaagaacgaggacttgggcacggggtggaacaccagcccgacgtagaacttcggcaggtcggtgtagagcgcggtaatgcgttcggcgatggcctgcttgtcggcgtcggagaaggcgtcctgcgggtgatagatgttccagagcggcatggcggggttcctttttgaggaggggcgacggccgtccggcaggggcggccagggggaatggcggtgtcgatcagttagtataattattgacttcaattattgaagttgtaaagcaaaggccgtggcggggaggcttgagcgttgtccgcccggctgcgatactgcggtggccgcgctccggcggcacggcaaagggaatccatgcgctccaagagttttgaaggaatggtctgctccatcgccacggtgctcgatgccgtcggcgaccgctgggccatgctgatcctgcgcgacctggtgctcggcctgcggcgctacgatgacctgcgccgttcgaccggcatcgccaacgcgacgctggccgaccggctcaggcagctggaacagaacgggctgatcgaacgccgcctgtaccagagcggccccgatcgtcatgaatatctgcccaccgccaagggccgcgatatcgccctggtgctgcaggcgctggcccaggtcggcgaccaatggcagccgggacggcnngnnnnnnnctgcnnnnnnngnnnnnnnnnnnnnnnnnnnnnnnnnnnnnnnnnnnnnnnnnnnnnnnnnnnnnn

SEQ ID NO: 5445 - DNA, 788 bp, Zea mays
  misc_feature (1)..(54): n is a, c, g, or t
  misc_feature (56)..(62): n is a, c, g, or t
  misc_feature (67)..(73): n is a, c, g, or t
  misc_feature (75)..(76): n is a, c, g, or t
  misc_feature (788)..(788): n is a, c, g, or t
  Peptide Sequence Number=SeqID_12067
  Probeset Number=SeqID_19848
nnnnnnnnnnnnnnnnnnnnnnnnnnnnnnnnnnnnnnnnnnnnnnnnnnnnnncnnnnnnngcagnnnnnnncnngccgtcccggctgccattggtcgccgacctgggccagcgcctgcagcaccagggcgatatcgcggcccttggcggtgggcagatattcatgacgatcggggccgctctggtacaggcggcgttcgatcagcccgttctgttccagctgcctgagccggtcggccagcgtcgcgttggcgatgccggtcgaacggcgcaggtcatcgtagcgccgcaggccgagcaccaggtcgcgcaggatcagcatggcccagcggtcgccgacggcatcgagcaccgtggcgatggagcagaccattccttcaaaactcttggagcgcatggattccctttgccgtgccgccggagcgcggccaccgcagtatcgcagccgggcggacaacgctcaagcctccccgccacggcctttgctttacaacttcaataattgaagtcaataattatactaactgatcgacaccgccattccccctggccgcccctgccggacggccgtcgcccctcctcaaaaaggaaccccgccatgccgctctggaacatctatcacccgcaggacgccttctccgacgccgacaagcaggccatcgccgaacgcattaccgcgctctacaccgacctgccgaagttctacgtcgggctggtgttccaccccgtgcccaagtcctcgttcttcatcggcggcgaacgcgccgacgacttcgtgcgcatctcn

SEQ ID NO: 5446 - DNA, 919 bp, Zea mays
  misc_feature (653)..(657): n is a, c, g, or t
  misc_feature (674)..(676): n is a, c, g, or t
  misc_feature (704)..(704): n is a, c, g, or t
  misc_feature (715)..(724): n is a, c, g, or t
  misc_feature (726)..(727): n is a, c, g, or t
  misc_feature (729)..(732): n is a, c, g, or t
  misc_feature (741)..(743): n is a, c, g, or t
  misc_feature (756)..(764): n is a, c, g, or t
  misc_feature (766)..(774): n is a, c, g, or t
  misc_feature (781)..(781): n is a, c, g, or t
  misc_feature (786)..(789): n is a, c, g, or t
  misc_feature (791)..(793): n is a, c, g, or t
  misc_feature (804)..(812): n is a, c, g, or t
  misc_feature (814)..(814): n is a, c, g, or t
  misc_feature (818)..(821): n is a, c, g, or t
  misc_feature (825)..(834): n is a, c, g, or t
  misc_feature (836)..(854): n is a, c, g, or t
  misc_feature (856)..(894): n is a, c, g, or t
  misc_feature (904)..(916): n is a, c, g, or t
  misc_feature (919)..(919): n is a, c, g, or t
  Peptide Sequence Number=SeqID_12068
  Probeset Number=SeqID_19849
gcgttgctggcgcggctggagcaggtggacggcgagcgcctgccgtccacctctctggactatggcctggcctacggtcgcagccgggatgaccagaccctggcccaggccaccaacggtcatgccggtgccgaatggagccacacgcctgagttttccctgagctacaccctcgacctgtggggcgaggtgcgttatcgcattgccgccgcacgggccgatgcccaggtggcgcgagcgctggaagacgagttgcgggtgacggtggccgcgcagacggcccgcgcgtatgcccaggcctgtgtttatggattgcaggagcaggtgcaggtgcactcggtgcagttgctggagcagagcgtagcggtcacgcaaaagctgcagaaggctggcgcggcgacggacctggacctgactcgcttgcaaggcctgctggaagaaacccgtgcaccgctgccgatgttcaaggcccggcgcagcagcgcattgtatgagttggccgtgctcagcgggttgccgcccgagcaggtcacaccgcgcagctgtgcccacagcccgcagttgcaggccgcgttgccggtgggcgagggctgggcgctggtgcaacggcggccggatattcgccgtgccgaggggcaactgcgcttggcgannnnnacggtgggcctgtcgcnnnccgagctttacccgcgaattaccctttngcgcgatgctnnnnnnnnnncnncnnnngccttgggnnnactccggtgaccnnnnnnnnncnnnnnnnnncgtccgngccgnnnngnnncttggcgcttnnnnnnnnncnggannnntgcnnnnnnnnnngnnnnnnnnnnnnnnnnnnncnnnnnnnnnnnnnnnnnnnnnnnnnnnnnnnnnnnnnnnacgggggctnnnnnnnnnnnnnaan

SEQ ID NO: 5447 - DNA, 224 bp, Zea mays
  misc_feature (1)..(4): n is a, c, g, or t
  Peptide Sequence Number=SeqID_12069
  Probeset Number=SeqID_19850
nnnngagcccgcggccagttgccgccgtttctcgacgcgtacctgccggccagcgccgccgagtttcgcgtggccatcggcgaatggctgagcaaacacctcagcgaattgcagttggtgggcaaagacgccgcgcacatgttcgtgaccttgctcatcggcatggtgttgggcgcgatcatcgccctgcagcgggtgccggacctcaccaagcgcaaacccct

SEQ ID NO: 5448 - DNA, 364 bp, Zea mays
  misc_feature (1)..(2): n is a, c, g, or t
  misc_feature (294)..(295): n is a, c, g, or t
  misc_feature (299)..(299): n is a, c, g, or t
  misc_feature (301)..(302): n is a, c, g, or t
  misc_feature (309)..(311): n is a, c, g, or t
  misc_feature (315)..(315): n is a, c, g, or t
  misc_feature (317)..(335): n is a, c, g, or t
  misc_feature (339)..(364): n is a, c, g, or t
  Peptide Sequence Number=SeqID_12070
  Probeset Number=SeqID_19851
nntagaacgccgagaaaaagggcaataccgagatcgccaccgagtacctcaagcacctgtacagcccggctggccaggagattgcggcgaagaacttctaccgcccacgcgatgagaaagtcgccgccaaatacgcccagcagttcccgaaactggacctggtgactatcgacaaagacttcggcggctggaaaactgcccaaccgaaattcttcaatgacggtggcgtgttcgaccagatttactcggcgcagtaagcaaaatcaaactgtaggagccagctttctgtggganncggngnngccctgnnngggntnnnnnnnnnnnnnnnnnnncttnnnnnnnnnnnnnnnnnnnnnnnnnn

SEQ ID NO: 5449 - DNA, 956 bp, Zea mays
  misc_feature (1)..(7): n is a, c, g, or t
  misc_feature (763)..(764): n is a, c, g, or t
  misc_feature (803)..(810): n is a, c, g, or t
  misc_feature (812)..(813): n is a, c, g, or t
  misc_feature (818)..(818): n is a, c, g, or t
  misc_feature (824)..(824): n is a, c, g, or t
  misc_feature (837)..(837): n is a, c, g, or t
  misc_feature (849)..(849): n is a, c, g, or t
  misc_feature (852)..(852): n is a, c, g, or t
  misc_feature (858)..(858): n is a, c, g, or t
  misc_feature (863)..(864): n is a, c, g, or t
  misc_feature (868)..(869): n is a, c, g, or t
  misc_feature (880)..(880): n is a, c, g, or t
  misc_feature (882)..(888): n is a, c, g, or t
  misc_feature (895)..(925): n is a, c, g, or t
  misc_feature (930)..(934): n is a, c, g, or t
  misc_feature (937)..(950): n is a, c, g, or t
  misc_feature (954)..(956): n is a, c, g, or t
  Peptide Sequence Number=SeqID_12071
  Probeset Number=SeqID_19852
nnnnnnngacctcggtgtgggctttgcgctgacggtgcaaggcgtggccgaagtggatgtgcagcgtgtcggcgactatatgctcagtgccttgcgcaacctggtgacggcgctgcaacaggcgccgactacgccgctgcatcaagtgtcgatcctgccacctgccgagcggcatcaagtgttggtgggtttcaacaccaccgcccgcgactacccggccgggaaaaccgttcacgctctcttcgaagcccaggccctggccagcccggaagccgtggcggtggtgcacggccatgcgtcgctgagttaccgcgatctcaacctgcgggccaatcgcctggcccactatttgatcgatcaaggcgtgaagccgggggacagcgtggtcatcgcgctgccacgctccatcgacctgttggtcagccagttggcgatcctcaagtgtgcggcggtctatgtgccgctggacgtcaacgcgcctgaagagcgccaggcgttcatggtgcaggacagccatgccaaacacgtgctgaatgaccttgctgcgctgaaccttgcgacgcagcctgcgcataacccgaacctcgcccagtcggcggaaagcgtggcgtacatcatgtacacctccggctccaccggggcgcccaagggggtacaggttccccatcgcgccatctcccgattggtgatcaacaacggctacgccgacttcaatcaccgtgaccgggtggccttcgcctcgaacccggcgttcgacgccagnnccctcgacgtgtgggcaccgctgcttaatggcggctgcnnnnnnnntnntcgancacgcnactttgctgtccnaggccgctttcnccnccctgntgcannagcnntccgtcagcgngnnnnnnntgacggnnnnnnnnnnnnnnnnnnnnnnnnnnnnnnnatgcnnnnnttnnnnnnnnnnnnnnctannn

SEQ ID NO: 5450 - DNA, 176 bp, Zea mays
  misc_feature (1)..(3): n is a, c, g, or t
  Peptide Sequence Number=SeqID_12072
  Probeset Number=SeqID_19853
nnncgagtgttcaggcacagctcgacgtgggtggtctgcaacttgcgcttgaagtagcgcagggtttcaaagaactcttccttacccggcacgcgcttggcgatgttgaactggccaccgatctcgctggccgaatcaaacagcgtcacctgatgcccgcgctcggcagcgacggt

SEQ ID NO: 5451 - DNA, 176 bp, Zea mays
  misc_feature (174)..(176): n is a, c, g, or t
  Peptide Sequence Number=SeqID_12073
  Probeset Number=SeqID_19854
accgtcgctgccgagcgcgggcatcaggtgacgctgtttgattcggccagcgagatcggtggccagttcaacatcgccaagcgcgtgccgggtaaggaagagttctttgaaaccctgcgctacttcaagcgcaagttgcagaccacccacgtcgagctgtgcctgaacactcgnnn

SEQ ID NO: 5452 - DNA, 422 bp, Zea mays
  misc_feature (420)..(422): n is a, c, g, or t
  Peptide Sequence Number=SeqID_12074
  Probeset Number=SeqID_19855
acgaagtcgcgcgccgcggcgtcgcctacgcggcccaggaccagccgctgttccccgacctgaacatccgcgacaacctgcgcctgggcctggccaacgaccgcctgttcgacgaacgcttcggcgagatcgccgacctgttcccggtcttcgccagccgcctgcgccagcatgccggcaccctgtcgggcggcgagcagaagatgctgctggtggcgcgcggcctgatgcagcggccggccctgttgctgctggacgagatcaccgaaggcctgcagccctcgatgatcgagcggctgggccgggcgctcaactgggagcgcgagcggcgcggcacctccatgttcatcgtcgaacaaaacgtggccttcgcgctggacgtggccgaccgctacctggtgctcaagcagggcgccatcnnn

SEQ ID NO: 5453 - DNA, 235 bp, Zea mays
  misc_feature (1)..(5): n is a, c, g, or t
  Peptide Sequence Number=SeqID_12075
  Probeset Number=SeqID_19856
nnnnncggcggctgggacacgcacgtcggccagggcaacgccagcggcatgctggccaaccggctcggccagctggggcgggcgctggctggctacgccgatgccatgggcccggcctggaagcaggccacggtggtcgtcatcagcgaattcggccgcaccttccgcgagaacggcaacaagggcaccgaccacggccacggcacggtctactgggtgctggggggcaatgtgc

SEQ ID NO: 5454 - DNA, 455 bp, Zea mays
  misc_feature (454)..(455): n is a, c, g, or t
  Peptide Sequence Number=SeqID_12076
  Probeset Number=SeqID_19857
accaacaatggctcgatctaccaggccggtttcgaacagaacctgtacagcgaccgcaaggccttccgggtgggtgacatcatcaccatcacgctgaacgagaagacccaggcgagcaagaacgccaactcgcagatcggcaagaccagcaagaccagcatcggcctgacctcgttgtttggcggtgtaccgaacaccaacaacccgctgggcagtggtgatctgagcctggacgccggttacagcggcgaccgcgccaccaacggcaaaagtgcggcggggccagggcaacagcctgaccggttcgatcaccgtgaccgtggccgacgtgctgcccaacggcatcattgccgtacgcggcgagaagtggatgaccctcaacaccggtgacgaactggtgcgcattgcgggcatggttcgcgccgacgatatctccaccgacaacaccgtgccnn

SEQ ID NO: 5455 - DNA, 874 bp, Zea mays
  misc_feature (1)..(6): n is a, c, g, or t
  misc_feature (8)..(9): n is a, c, g, or t
  misc_feature (790)..(790): n is a, c, g, or t
  misc_feature (833)..(845): n is a, c, g, or t
  misc_feature (847)..(857): n is a, c, g, or t
  misc_feature (862)..(874): n is a, c, g, or t
  Peptide Sequence Number=SeqID_12077
  Probeset Number=SeqID_19858
nnnnnncnntgaaaaccgtggccctgctcaagcgcaatcccatgctggtcatcgaagaaaccaagggtgcccagcactacaccttcccgatgctctgcgacagcaacgagttcaagaacaacgacatccgcatggcgatgaagcatgcgatcaaccgcgaaaccctgctggcctcggtgctgcatggctatggcctggtgggcaacgaccatccgatccagcccggcagccgctttatcaacgctgccctcgagcagcgtacctacgatccggacaagtcgcgcttctacctgcgcaaggccggtgtcgagtcgctgaaggtgcgcctgcaagcttctgatgccgcctacaccggcgcagtggacgcctcggtgctgttcaaggaacaggcgcgtcaggccgggattgatatcgatgtggtgcgcgagccggcggatgggtacttctccaacatctggatgaagcagccattcaccacctcgttctggtacagcagcctgactgcagaccgcatgttcagcatcggctacgccaagggcgcggcgtggaacgaaacccattgggataacccgcgcttcaatcagttgctcaacgcagcgcgaggcgagatgaacgcgccgctgcgccaggagatgtacaacgaaatgcagagcctgtgccgggacgacggcggggcgattgtgccgttgttcgccagctccgtggcggcccgctcgaaccgcatcagccatggaccgctgacggcgccgtatggggaactggatgggttgcggctgatcgagcggtggtngcaggcgtgaatctttcagaaacgctatccctcaagcaatgannnnnnnnnnnnngnnnnnnnnnnncctgnnnnnnnnnnnnn

SEQ ID NO: 5456 - DNA, 954 bp, Zea mays
  misc_feature (1)..(4): n is a, c, g, or t
  misc_feature (791)..(792): n is a, c, g, or t
  misc_feature (795)..(795): n is a, c, g, or t
  misc_feature (799)..(800): n is a, c, g, or t
  misc_feature (825)..(827): n is a, c, g, or t
  misc_feature (838)..(843): n is a, c, g, or t
  misc_feature (848)..(848): n is a, c, g, or t
  misc_feature (850)..(850): n is a, c, g, or t
  misc_feature (852)..(852): n is a, c, g, or t
  misc_feature (874)..(874): n is a, c, g, or t
  misc_feature (884)..(884): n is a, c, g, or t
  misc_feature (888)..(888): n is a, c, g, or t
  misc_feature (890)..(900): n is a, c, g, or t
  misc_feature (902)..(954): n is a, c, g, or t
  Peptide Sequence Number=SeqID_12078
  Probeset Number=SeqID_19859
nnnntggtcgccgagatggcggtattcaatccgttcgatttcttcctggaaccctacgccgaaaaaatccctttcagctacgccgccgatgagcagcgcgagctggcgccgtacctggaaacattaccgctgaccccgcgattcgccgcgtatctggcgggtatcgaccgcacgccgttgccggcggtggattttctggtaggcctgaatcagcgcctggctgccgacatcggttacctgatccgcatggagccgggcgtacaaactccggaattcaccctggaaaacgcctccggttcctgccgggattcggcgtggttgctggtgcaactgctgcgcaacctgggcctggcggcgcgatttgtgtctggctatctgatccaactgaccgccgacgtcaaagccctcgacggcccgtccggcaccgaggtggatttcaccgacctgcatgcctggtgcgaagtgtatttgcccggcgccggttggatcggtctagatgccacctccggcttgttcgccggtgaagggcatatcccgttggcttgtagtcctgatccttcctcagcagcgcccatcagtggcctggtggaaccctgcgagtgcgaatttacccacgagatgtccgtggagcggatttgggaggccccacgggttaccaagccctacaccgaagagcagtggctggcgatccaggccctgggccggcagatcgacggtgacctgctcaaggacgacgtgcgcctgaccatggggggcgagccgacctttgtctccatcgacgaccctgacgnngcngaanngaacaccgccgctctcggcccggannncgccgattgtnnnnnnagctntncnagcgcatgcgcaagcactacgngccccaaggncctngnnnnnnnnnnnannnnnnnnnnnnnnnnnnnnnnnnnnnnnnnnnnnnnnnnnnnnnnnnnnnnn

SEQ ID NO: 5457 - DNA, 789 bp, Zea mays
  misc_feature (1)..(6): n is a, c, g, or t
  misc_feature (8)..(15): n is a, c, g, or t
  misc_feature (17)..(19): n is a, c, g, or t
  misc_feature (21)..(28): n is a, c, g, or t
  misc_feature (30)..(36): n is a, c, g, or t
  misc_feature (38)..(41): n is a, c, g, or t
  misc_feature (44)..(47): n is a, c, g, or t
  misc_feature (52)..(54): n is a, c, g, or t
  misc_feature (56)..(56): n is a, c, g, or t
  misc_feature (58)..(59): n is a, c, g, or t
  misc_feature (65)..(70): n is a, c, g, or t
  misc_feature (96)..(97): n is a, c, g, or t
  misc_feature (103)..(106): n is a, c, g, or t
  misc_feature (113)..(116): n is a, c, g, or t
  misc_feature (149)..(150): n is a, c, g, or t
  misc_feature (787)..(789): n is a, c, g, or t
  Peptide Sequence Number=SeqID_12079
  Probeset Number=SeqID_19860
nnnnnncnnnnnnnnannngnnnnnnnnannnnnnntnnnnttnnnncgtgnnntntnntttttnnnnnngcctgcgggcgcccagagagaagagnnacgacnnnnagtgcannnnttggcgtgatcatgggctccaagtccgattggnncacccttagccacaccgccgatatgctggaaaaactcggcattccctacgaagtgaaggtggtttccgcccaccgcactccggatttgctgttccagtatgccgatgaagcagaatcccgtggcatcgaggtgattatcgccggtgccggcggtgcagctcacctgccaggcatgtgtgcggccaagactcacctgccagtactgggcgttccggtgcagtcgtcgatgctctcgggcgtggattcgctgttgtccatcgtgcagatgcccgccggtattccggtggccaccctggcgatcggcaaggccggcgcgatcaacgcagccttgctgtccgccagcatcctcggcgccaagcacccgcagttccacgcggtgctgaaaaaattccgtgctgaacagacagacagcgtcctggacaatccagacccacgcattgcctgaggttgttgacgatgaaaatcggtgtaatcggtggcggccaactgggccgcatgctggccctggcgggtacgccgctggggatgaacttcgctttcctggacccggcgccggacgcctgcgcggctgcgctgggtgaacacctgcgggctgactacagcgacccggatcacctgcgccaactggccgatgaannn

SEQ ID NO: 5458 - DNA, 337 bp, Zea mays
  misc_feature (1)..(4): n is a, c, g, or t
  Peptide Sequence Number=SeqID_12080
  Probeset Number=SeqID_19861
nnnntatgcgcggcatgtgcttgctcaacgtgagcagcgactggatcttgaaacggctgaagagccagttgcagaaccttcccggccacgcctcggatgactgtccacccgccccccgagacatccgggggcgggttcctttcagctggtgagcaagggatctgcgcccaagtcagcgaggcgtttatcgcggcgttgctctgcggccttttgcaggcggtcagcctccgcctggctcaaaagtccagcatcagccaaggcgtcaatatagccccagacgtaggccattttgacacgcacctggatcggatctgcttcatctgtaatgagctttagt

SEQ ID NO: 5459 - DNA, 337 bp, Zea mays
  misc_feature (334)..(337): n is a, c, g, or t
  Probeset Number=SeqID_19862
actaaagctcattacagatgaagcagatccgatccaggtgcgtgtcaaaatggcctacgtctggggctatattgacgccttggctgatgctggacttttgagccaggcggaggctgaccgcctgcaaaaggccgcagagcaacgccgcgataaacgcctcgctgacttgggcgcagatcccttgctcaccagctgaaaggaacccgcccccggatgtctcggggggcgggtggacagtcatccgaggcgtggccgggaaggttctgcaactggctcttcagccgtttcaagatccagtcgctgctcacgttgagcaagcacatgccgcgcatannnn

SEQ ID NO: 5460 - DNA, 938 bp, Zea mays
  misc_feature (1)..(64): n is a, c, g, or t
  misc_feature (67)..(68): n is a, c, g, or t
  misc_feature (70)..(80): n is a, c, g, or t
  misc_feature (82)..(90): n is a, c, g, or t
  misc_feature (92)..(100): n is a, c, g, or t
  misc_feature (104)..(109): n is a, c, g, or t
  misc_feature (116)..(119): n is a, c, g, or t
  misc_feature (123)..(123): n is a, c, g, or t
  misc_feature (938)..(938): n is a, c, g, or t
  Peptide Sequence Number=SeqID_12081
  Probeset Number=SeqID_19863
nnnnnnnnnnnnnnnnnnnnnnnnnnnnnnnnnnnnnnnnnnnnnnnnnnnnnnnnnnnnnnnntgnngnnnnnnnnnnntnnnnnnnnntnnnnnnnnncagnnnnnncctgatnnnntgcnccccgacgcgctgaagaatgccaacccgttgcgcattcagcgtctggtagatgggcagccgtcgcgcgacgcgctgtaacccgtaccacctgaaaacaacaagaaagcaggaggtttcatgtcgtggaatgccgtcacaccgcaccgcgctcggctgggcgaaggcccgttctgggacgagcagggccaggcgctgtattgggtggatatcatcggccagcaggcgttacgcctgaaagacgggcaactgcacacctggcaactgcctgagcctgtgtcggcgtttatcccgtgtgccagtggtgatgcgctggtgaccctgagcagtggcgtgtatcgcctcgacctcgattcggcgccgagggatccacgcctgaccttgctctgcgtcgccgatccgcaaccgggcaaccgtgccaacgaagcccgttgcgatgcccagggccggctgtggctgggcaccatgcagaacaacatcggcgcgcacggtgaagatttgccggtgctgcagcgttccggcggcctgttccgggtcgatgccgacgggcaggtcacgccgttgctgcaaggcctggggattcccaacaccttgctctggaacgacgccgctacccatgtgcatttcggcgacagcctggacggcacgttgtatcggcacgcgatcaccgacgatggtcagcttgaacccgcgcaggtctggttcgggcctcactcccggggtggcccggacggctcggccatggacgccgaaggctatatctggaacgcccgctgggacggcagttgcctgctgcggctgacgccgggcggtgaan

SEQ ID NO: 5461 - DNA, 1216 bp, Zea mays
  misc_feature (1)..(5): n is a, c, g, or t
  misc_feature (817)..(817): n is a, c, g, or t
  misc_feature (819)..(827): n is a, c, g, or t
  misc_feature (829)..(831): n is a, c, g, or t
  misc_feature (842)..(846): n is a, c, g, or t
  misc_feature (848)..(858): n is a, c, g, or t
  misc_feature (860)..(883): n is a, c, g, or t
  misc_feature (890)..(891): n is a, c, g, or t
  misc_feature (893)..(895): n is a, c, g, or t
  misc_feature (897)..(904): n is a, c, g, or t
  misc_feature (907)..(909): n is a, c, g, or t
  misc_feature (911)..(934): n is a, c, g, or t
  misc_feature (939)..(949): n is a, c, g, or t
  misc_feature (952)..(957): n is a, c, g, or t
  misc_feature (963)..(974): n is a, c, g, or t
  misc_feature (977)..(983): n is a, c, g, or t
  misc_feature (985)..(992): n is a, c, g, or t
  misc_feature (996)..(1011): n is a, c, g, or t
  misc_feature (1013)..(1016): n is a, c, g, or t
  misc_feature (1018)..(1216): n is a, c, g, or t
  Peptide Sequence Number=SeqID_12082
  Probeset Number=SeqID_19864
nnnnntcaagcgcgaactcaacagcctgctgactcgctaccccgccgagctgaaacgcacccgcgaacaaatccagcaacgcaccgaactggccatcagcacccacctgaaaatcaacgcggtgcagcaagccattgccgggctggagccggtggtgcgggcccagcatgcgcagatccagggtgaagtgcggctgatgcaaggcgtcatgatcggcctgattttgctgatcgcgctgttgatcgacaccttgcagcgacgcctggcgcgggtgctgaccaacctggcgcccgccttgtccacctgggccgaaggcgacttcagccaacacattgccttgggcaagaccaaccgcgaactgcacgatatcgaagagtccctgaatcgcctgcgtgcttatctggtggacctggtgggcaccatccgcggcaacgccgagcaagtggccggcagcagcagcgccctggccgaattgagcagcggcatgcacgacggtgccgagcgccaggccggtgacaccgcgcagattcgcgattccctgggcgaactggaagccacgatccagcaggttgccggcgacgccagccaggccgcccaggccagccgcagtgcaggccaagccgtggaacagggccaacgggtgatcggcctgagcctgaacgggttgcacgccttggtcggcgaagtgcagataaatgcgcagatgatcgagaaactcgccgaggaatccgcaaccatcggcggcgtactcacggtgattcgctcaattgccgaccagaccaacctgctggcgctgaacgccgccatcgaagccgcncnnnnnnnnnannncgggcgcgggnnnnncnnnnnnnnnnntnnnnnnnnnnnnnnnnnnnnnnnnccgctgnngnnncnnnnnnnnaannncnnnnnnnnnnnnnnnnnnnnnnnnaaccnnnnnnnnnnnaannnnnngggaannnnnnnnnnnnccnnnnnnnannnnnnnnaaannnnnnnnnnnnnnnnannnncnnnnnnnnnnnnnnnnnnnnnnnnnnnnnnnnnnnnnnnnnnnnnnnnnnnnnnnnnnnnnnnnnnnnnnnnnnnnnnnnnnnnnnnnnnnnnnnnnnnnnnnnnnnnnnnnnnnnnnnnnnnnnnnnnnnnnnnnnnnnnnnnnnnnnnnnnnnnnnnnnnnnnnnnnnnnnnnnnnnnnnnnnnnnnnnnnnnnnnn

SEQ ID NO: 5462 - DNA, 168 bp, Zea mays
  misc_feature (1)..(3): n is a, c, g, or t
  Peptide Sequence Number=SeqID_12083
  Probeset Number=SeqID_19865
nnngctgaagaagtccgccgacagggccgccacgtccgccaattggccgaccttgatctggcctttcttgccctgctcggaagagaaccaggcgctgccgtgggtgaacagttccagggcggtcagccggggcaaaccctcggcgtgcagttccagcccgcccacggt

SEQ ID NO: 5463 - DNA, 168 bp, Zea mays
  misc_feature (166)..(168): n is a, c, g, or t
  Peptide Sequence Number=SeqID_12084
  Probeset Number=SeqID_19866
accgtgggcgggctggaactgcacgccgagggtttgccccggctgaccgccctggaactgttcacccacggcagcgcctggttctcttccgagcagggcaagaaaggccagatcaaggtcggccaattggcggacgtggcggccctgtcggcggacttcttcagcnnn

SEQ ID NO: 5464 - DNA, 945 bp, Zea mays
  misc_feature (1)..(5): n is a, c, g, or t
  misc_feature (732)..(733): n is a, c, g, or t
  misc_feature (736)..(739): n is a, c, g, or t
  misc_feature (745)..(747): n is a, c, g, or t
  misc_feature (754)..(754): n is a, c, g, or t
  misc_feature (758)..(760): n is a, c, g, or t
  misc_feature (762)..(763): n is a, c, g, or t
  misc_feature (769)..(777): n is a, c, g, or t
  misc_feature (781)..(785): n is a, c, g, or t
  misc_feature (789)..(802): n is a, c, g, or t
  misc_feature (810)..(810): n is a, c, g, or t
  misc_feature (815)..(815): n is a, c, g, or t
  misc_feature (817)..(825): n is a, c, g, or t
  misc_feature (835)..(837): n is a, c, g, or t
  misc_feature (846)..(848): n is a, c, g, or t
  misc_feature (850)..(851): n is a, c, g, or t
  misc_feature (856)..(865): n is a, c, g, or t
  misc_feature (867)..(873): n is a, c, g, or t
  misc_feature (881)..(914): n is a, c, g, or t
  misc_feature (917)..(924): n is a, c, g, or t
  misc_feature (933)..(945): n is a, c, g, or t
  Peptide Sequence Number=SeqID_12085
  Probeset Number=SeqID_19867
nnnnncgtagggcaggcgcttgaacagcgagcggttgaccgccagcgtgttgatgttgccgtagcccaccgtgtagccgtcgggcgcggcgcgcttgaccagcgcgataccgatgttgccggcggcgccgggacggttttccaccaccagggtggcgcccgtgtccttggagatctgggtcgtgatcaggcgcgacagcacgtcgggcgaaccgccggcggccgacggcacgatgaaggtgatgggcttgtcgggataggcgccggcggcctgggcgcccgcggtgaaggtggcggccagcgccagggcggcgaggctgcggatgaaggtgcgttgcatgctggattccccttgttttgtagtgtggaggccggcagattagcaccgggcatgcggcaccgcgtcatcgaaaaatgtcgaaaacctataatccgccgttattgatcaaggggaaccaacatggatgagcaggcctatgccgacgaggtcgggcccagcgccggccggccgctgaacctgcgccagatcgaggtgttccgcgccatcatgatggccggctcgatcagcggcgcggggcgcatgctgcacgtgtcgcaaccggcggtgagccgggtgctggcgctgaccgagacgcgcctgggctaccggctgttcgagcgggtcaagagccggctctcgcccaccgccgaggcgcggcgcctgtatgcggaggtcgagcaggtctatggcggnntcnnnngcgtcnnngatctgncggnnngnntcgggnnnnnnnnngcgnnnnngctnnnnnnnnnnnnnngcgccagntatgncnnnnnnnnngtgccgatgnnnctgggcccnnntnncccgnnnnnnnnnncnnnnnnnggcgggtnnnnnnnnnnnnnnnnnnnnnnnnnnnnnnnnnngcnnnnnnnntttccttgnnnnnnnnnnnnn

SEQ ID NO: 5465 - DNA, 945 bp, Zea mays
  misc_feature (1)..(13): n is a, c, g, or t
  misc_feature (22)..(29): n is a, c, g, or t
  misc_feature (32)..(65): n is a, c, g, or t
  misc_feature (73)..(79): n is a, c, g, or t
  misc_feature (81)..(90): n is a, c, g, or t
  misc_feature (95)..(96): n is a, c, g, or t
  misc_feature (98)..(100): n is a, c, g, or t
  misc_feature (109)..(111): n is a, c, g, or t
  misc_feature (121)..(129): n is a, c, g, or t
  misc_feature (131)..(131): n is a, c, g, or t
  misc_feature (136)..(136): n is a, c, g, or t
  misc_feature (144)..(157): n is a, c, g, or t
  misc_feature (161)..(165): n is a, c, g, or t
  misc_feature (169)..(177): n is a, c, g, or t
  misc_feature (183)..(184): n is a, c, g, or t
  misc_feature (186)..(188): n is a, c, g, or t
  misc_feature (192)..(192): n is a, c, g, or t
  misc_feature (199)..(201): n is a, c, g, or t
  misc_feature (207)..(210): n is a, c, g, or t
  misc_feature (213)..(214): n is a, c, g, or t
  misc_feature (941)..(945): n is a, c, g, or t
  Peptide Sequence Number=SeqID_12086
  Probeset Number=SeqID_19868
nnnnnnnnnnnnncaaggaaannnnnnnngcnnnnnnnnnnnnnnnnnnnnnnnnnnnnnnnnnnacccgccnnnnnnngnnnnnnnnnncgggnnannngggcccagnnncatcggcacnnnnnnnnngncatanctggcgcnnnnnnnnnnnnnnagcnnnnncgcnnnnnnnnncccganncnnnccgncagatcnnngacgcnnnngannccgccatagacctgctcgacctccgcatacaggcgccgcgcctcggcggtgggcgagagccggctcttgacccgctcgaacagccggtagcccaggcgcgtctcggtcagcgccagcacccggctcaccgccggttgcgacacgtgcagcatgcgccccgcgccgctgatcgagccggccatcatgatggcgcggaacacctcgatctggcgcaggttcagcggccggccggcgctgggcccgacctcgtcggcataggcctgctcatccatgttggttccccttgatcaataacggcggattataggttttcgacatttttcgatgacgcggtgccgcatgcccggtgctaatctgccggcctccacactacaaaacaaggggaatccagcatgcaacgcaccttcatccgcagcctcgccgccctggcgctggccgccaccttcaccgcgggcgcccaggccgccggcgcctatcccgacaagcccatcaccttcatcgtgccgtcggccgccggcggttcgcccgacgtgctgtcgcgcctgatcacgacccagatctccaaggacacgggcgccaccctggtggtggaaaaccgtcccggcgccgccggcaacatcggtatcgcgctggtcaagcgcgccgcgcccgacggctacacggtgggctacggcaacatcaacacgctggcggtcaaccgctcgctgttcaagcgcctgccctacgnnnnn

SEQ ID NO: 5466 - DNA, 734 bp, Zea mays
  misc_feature (1)..(18): n is a, c, g, or t
  misc_feature (20)..(22): n is a, c, g, or t
  misc_feature (24)..(33): n is a, c, g, or t
  misc_feature (37)..(37): n is a, c, g, or t
  misc_feature (39)..(53): n is a, c, g, or t
  misc_feature (62)..(69): n is a, c, g, or t
  misc_feature (71)..(71): n is a, c, g, or t
  misc_feature (73)..(77): n is a, c, g, or t
  misc_feature (79)..(93): n is a, c, g, or t
  misc_feature (100)..(105): n is a, c, g, or t
  misc_feature (125)..(125): n is a, c, g, or t
  misc_feature (732)..(734): n is a, c, g, or t
  Peptide Sequence Number=SeqID_12087
  Probeset Number=SeqID_19869
nnnnnnnnnnnnnnnnnnannntnnnnnnnnnncggncnnnnnnnnnnnnnnncggatccgnnnnnnnngnannnnnannnnnnnnnnnnnnngagcgcnnnnnnggccggcggccatgtcagcnacgtgcgccccaagcgcggctatgtggtgccgcgcgcgctcgagaccgatgagatcccgggcatcgtcgaggcctaccgccgcggcgcgcagctggcgcaggaagccggtttcgacggcgtcgaagtgcacggcgccaacggctatctgctggaccagttcctgcaggacagcaccaaccaccgcaccgacggctacggcggctcgctcgaagcgcgcgcccgcctgatgctggaagtggtggacgccagcgtcagcgtgtggggcgcgggccgggtcggcctgcatctgtcgccgcgcggcgatgcccatacgatgggcgattcggatccggccacgaccttcaactatgtggcgcgcgcggcgcgccgccgcggcctggcgttcctgtgcgcgcgggaacacgaaggcgccgacagcctgggccctcagctcaaggaatcgttcggcggcgtgtacatcgccaacgaaggcttcacgcgcgaatcggccgaggcggcgattgccgcgggccgcgccgatgcggtggcgttcggcgtgcagtacatcgccaatcccgacctggcgcagcgtttcgccctgaaggcgccgctgaacgcgccggattnnn

SEQ ID NO: 5467 - DNA, 382 bp, Zea mays
  misc_feature (380)..(382): n is a, c, g, or t
  Peptide Sequence Number=SeqID_12088
  Probeset Number=SeqID_19870
gctgatcctgtggtcggcggcgacgttcttcatgggctttgccggcagcttcgtgatcctgttcgtgctgcgcctggccgtgggcgcgctggaggccccggcctatccgatcaacaaccgcgtcgtcacgacctggttcccggaaaaggaacgggccaccgccatcggcttctacacctcgggccagttcgtcggcctggcgttcctgacgccggtgctggcctggctgcagcaccactacggctggcacatggtgttcgtcagcaccggcctgctgggcatcatctggggcgtgctgtggtacctgatctaccgtgaaccgcgccagttcaagggcgccaacgcggccgagatcgagctgatccagaaaggcggcggcnnn

SEQ ID NO: 5468 - DNA, 396 bp, Zea mays
  misc_feature (1)..(6): n is a, c, g, or t
  misc_feature (14)..(14): n is a, c, g, or t
  misc_feature (385)..(385): n is a, c, g, or t
  misc_feature (390)..(390): n is a, c, g, or t
  Peptide Sequence Number=SeqID_12089
  Probeset Number=SeqID_19871
nnnnnnaccccgcncaaccgcgacctggtgaaactgaccaaggccaaatacggcatcaaccccacctacccgctggccgctgactacatcagcaccaaggtcatgctcgaaaccatcatctccaccggcagttttgacgggccgaccgtggccaaggccatgcggggcctgagctacgaaggccccaccggcaaggagtcgatccgcgccggcgaccatcaggtgatcaaggattactacctgctggtgggcaaggccgccggcgacatggccgacaaggatgacctggccaaggtgctcagctccggccagtcgttcccgccggtggaagccacgggctgcgtgctcggctgatccgctgaaaatctactggtgacacagcgcngggcngctcat

SEQ ID NO: 5469 - DNA, 396 bp, Zea mays
  misc_feature (7)..(7): n is a, c, g, or t
  misc_feature (12)..(12): n is a, c, g, or t
  misc_feature (383)..(383): n is a, c, g, or t
  misc_feature (391)..(396): n is a, c, g, or t
  Peptide Sequence Number=SeqID_12090
  Probeset Number=SeqID_19872
atgagcngcccngcgctgtgtcaccagtagattttcagcggatcagccgagcacgcagcccgtggcttccaccggcgggaacgactggccggagctgagcaccttggccaggtcatccttgtcggccatgtcgccggcggccttgcccaccagcaggtagtaatccttgatcacctgatggtcgccggcgcggatcgactccttgccggtggggccttcgtagctcaggccccgcatggccttggccacggtcggcccgtcaaaactgccggtggagatgatggtttcgagcatgaccttggtgctgatgtagtcagcggccagcgggtaggtggggttgatgccgtatttggccttggtcagtttcaccaggtcgcggttgngcggggtnnnnnn

SEQ ID NO: 5470 - DNA, 868 bp, Zea mays
  misc_feature (1)..(3): n is a, c, g, or t
  misc_feature (748)..(749): n is a, c, g, or t
  misc_feature (752)..(752): n is a, c, g, or t
  misc_feature (782)..(794): n is a, c, g, or t
  misc_feature (796)..(797): n is a, c, g, or t
  misc_feature (813)..(815): n is a, c, g, or t
  misc_feature (819)..(820): n is a, c, g, or t
  misc_feature (823)..(826): n is a, c, g, or t
  misc_feature (829)..(829): n is a, c, g, or t
  misc_feature (842)..(843): n is a, c, g, or t
  misc_feature (845)..(845): n is a, c, g, or t
  misc_feature (852)..(854): n is a, c, g, or t
  misc_feature (859)..(868): n is a, c, g, or t
  Peptide Sequence Number=SeqID_12091
  Probeset Number=SeqID_19873
nnnagcgatctgcacctgacgcaccagcgggaacatgtccgggtacaggcgtgcttgcaggaaggcgttcgggtcgatgttcttggcggtggcgtgggcttcggccttgttcagcacatcgctcagggcgttgagcatttgcttgaagaccgggagggaagcggcgtacagggaaatagtcatgacagtctcgacagttgtggcagggtttgaaacagcggcgattatagacatgccggccgccagcgccgcttgtcttttattttttcaggattaggctagtgggctcactgcattagggaaagcgcgatgaccaccgagcacgacaccacttccgaagagccgcgcctgaacagcacggaaatccgcatcctgggctgcctgatcgaaaagcaggctaccagccctgaaacctacccgttgaccctcaacgcgctggtgatcgcctgcaaccagaaaaccagccgcgaaccggtgatgaacctcagccagggccaggtcggccagagcctgcgggccctggaaggtcgcgggtttacccggctggtgatgggcagccgcgccgaccgctgggagcatcgggtggacaaggccctggaactggtgccggcccaggtgattctcagtgggctgttgttcctgcgggggccgcagacggtcaacgaactgctgacccgcagcgggcgcatgcacgaatttgaagacaccgagcaagtggtgcatcaactggaacgcctgattgcccgtnngcnggcgttgttggtgccgcgtcagtcggggcnnnnnnnnnnnnncnntacatgcacgccttgnnngacnnggnnnntantgaagcgatcttnncngcacgtnnnaaacnnnnnnnnnn

SEQ ID NO: 5471 - DNA, 513 bp, Zea mays
  misc_feature (1)..(5): n is a, c, g, or t
  misc_feature (283)..(285): n is a, c, g, or t
  misc_feature (289)..(289): n is a, c, g, or t
  misc_feature (298)..(300): n is a, c, g, or t
  misc_feature (307)..(310): n is a, c, g, or t
  misc_feature (320)..(323): n is a, c, g, or t
  misc_feature (328)..(330): n is a, c, g, or t
  misc_feature (332)..(333): n is a, c, g, or t
  misc_feature (338)..(342): n is a, c, g, or t
  misc_feature (344)..(344): n is a, c, g, or t
  misc_feature (351)..(355): n is a, c, g, or t
  misc_feature (360)..(362): n is a, c, g, or t
  misc_feature (364)..(364): n is a, c, g, or t
  misc_feature (374)..(376): n is a, c, g, or t
  misc_feature (378)..(381): n is a, c, g, or t
  misc_feature (383)..(393): n is a, c, g, or t
  misc_feature (395)..(396): n is a, c, g, or t
  misc_feature (398)..(399): n is a, c, g, or t
  misc_feature (407)..(419): n is a, c, g, or t
  misc_feature (424)..(486): n is a, c, g, or t
  misc_feature (489)..(495): n is a, c, g, or t
  misc_feature (497)..(500): n is a, c, g, or t
  misc_feature (502)..(511): n is a, c, g, or t
  Peptide Sequence Number=SeqID_12092
  Probeset Number=SeqID_19874
nnnnncggcgacggcatcacgggtggcggcgccgtcgaggaaggtcagggtgtcgctgtcggttttcggcgcctgtttttccagccaggcgccgatgttgtcgcgggtgccgatgccgtccgacttgccggtggccgggttgtcgccaccggtttccagggcatggaacatcccgggtctggaccacatggccgccgcgccggtcagctcggtactcagcgccgaatcgctgcccaaggcttgcaggttgtcgatgcgcagcatgccgtcgttgctgcgctgnnnggcnccaccgggnnncatcggnnnncctgcgccgnnnnccaannncnngttgnnnnncntgattgnnnnngactnnncnttggccttgnnnannnntnnnnnnnnnnngnncnngaatctgnnnnnnnnnnnnngccgnnnnnnnnnnnnnnnnnnnnnnnnnnnnnnnnnnnnnnnnnnnnnnnnnnnnnnnnnnnnnnnatnnnnnnntnnnngnnnnnnnnnntt

SEQ ID NO: 5472 - DNA, 513 bp, Zea mays
  misc_feature (3)..(12): n is a, c, g, or t
  misc_feature (14)..(17): n is a, c, g, or t
  misc_feature (19)..(25): n is a, c, g, or t
  misc_feature (28)..(90): n is a, c, g, or t
  misc_feature (95)..(107): n is a, c, g, or t
  misc_feature (115)..(116): n is a, c, g, or t
  misc_feature (118)..(119): n is a, c, g, or t
  misc_feature (121)..(131): n is a, c, g, or t
  misc_feature (133)..(136): n is a, c, g, or t
  misc_feature (138)..(140): n is a, c, g, or t
  misc_feature (150)..(150): n is a, c, g, or t
  misc_feature (152)..(154): n is a, c, g, or t
  misc_feature (159)..(163): n is a, c, g, or t
  misc_feature (170)..(170): n is a, c, g, or t
  misc_feature (172)..(176): n is a, c, g, or t
  misc_feature (181)..(182): n is a, c, g, or t
  misc_feature (184)..(186): n is a, c, g, or t
  misc_feature (191)..(194): n is a, c, g, or t
  misc_feature (204)..(207): n is a, c, g, or t
  misc_feature (214)..(216): n is a, c, g, or t
  misc_feature (225)..(225): n is a, c, g, or t
  misc_feature (229)..(231): n is a, c, g, or t
  misc_feature (509)..(513): n is a, c, g, or t
  Probeset Number=SeqID_19875
aannnnnnnnnncnnnnannnnnnnatnnnnnnnnnnnnnnnnnnnnnnnnnnnnnnnnnnnnnnnnnnnnnnnnnnnnnnnnnnnnnnncggcnnnnnnnnnnnnncagattcnngnncnnnnnnnnnnnannnntnnncaaggccaangnnnagtcnnnnncaatcangnnnnncaacnngnnnttggnnnncggcgcaggnnnnccgatgnnncccggtggngccnnncagcgcagcaacgacggcatgctgcgcatcgacaacctgcaagccttgggcagcgattcggcgctgagtaccgagctgaccggcgcggcggccatgtggtccagacccgggatgttccatgccctggaaaccggtggcgacaacccggccaccggcaagtcggacggcatcggcacccgcgacaacatcggcgcctggctggaaaaacaggcgccgaaaaccgacagcgacaccctgaccttcctcgacggcgccgccacccgtgatgccgtcgccgnnnnn

SEQ ID NO: 5473 - DNA, 357 bp, Zea mays
  misc_feature (1)..(3): n is a, c, g, or t
  Peptide Sequence Number=SeqID_12093
  Probeset Number=SeqID_19876
nnnatgcccacccccggcgcgcgttatcgcgacgctcattcggggatgtccggcgcctacgggccgcaacgccaaatcctgcaggccatgaccaaaccggcctgggccttcgatgtgggcctgctggggcgcccccacgacctggggaacatctccaaatacctgggcaaacccacccaactgaaggactacatcggctggctggccaacaacttcgacccgtccatcagctggaaagacctggagtggatccgcgagttctggaaaggcccgatgatcatcaaaggcatcctcgaccccgaggatgccaaggacgcggtgagctttggcgccgacggcatcgtcgtctccaaccac

SEQ ID NO: 5474 - DNA, 817 bp, Zea mays
  misc_feature (1)..(8): n is a, c, g, or t
  misc_feature (741)..(741): n is a, c, g, or t
  misc_feature (749)..(750): n is a, c, g, or t
  misc_feature (756)..(758): n is a, c, g, or t
  misc_feature (762)..(765): n is a, c, g, or t
  misc_feature (769)..(771): n is a, c, g, or t
  misc_feature (774)..(785): n is a, c, g, or t
  misc_feature (788)..(801): n is a, c, g, or t
  misc_feature (803)..(814): n is a, c, g, or t
  misc_feature (817)..(817): n is a, c, g, or t
  Peptide Sequence Number=SeqID_12094
  Probeset Number=SeqID_19877
nnnnnnnngcgatgaagttcaccctggagcgcacccgcaagggcctggacaccatctcggtgaccggcaacgtattgcgcgactacctgactgacctgttcccgatcatggaactgggcaccagcgccaagatgctgtcgatcgtgccactgatgaacggtggcggcctgttcgaaaccggtgccggcggttcggctccgaagcacgtacagcaactggttgaagaaaacttcctgcgctgggattccctgggcgagttcctggccctggccgcgtccctcgagcatttgggtgtgaactacaacaacccgaaagccctggtgctgtccaagaccttggaccaggccaccggccagttcctcgacaacaacaagtcaccatcgcgcaaagtcggcaacatcgacaaccgcggcagccacttctacctggctctgtactgggctcaagccctggccgcccagacggaagacactgcactgcaagcgcagtttggcgaactggccaagaccctgaccgcgaacgaagcaaccatcgttgccgagctcaacgccgttcagggcaagccagtggacatcggtggctactacgcaccgaacgccgagctgaccagcaaggccatgcgcccaagcgccaccctcaacgcggcaatcgctgcgctggtgtaaggttgtaaggatgcaaagaagccccggccctgtgccggggtttctgtttctgaacatggcgttttgattgaagaancccaatcnnaatgtnnngggnnnntttnnnccnnnnnnnnnnnnggnnnnnnnnnnnnnntnnnnnnnnnnnngcn

SEQ ID NO: 5475 - DNA, 194 bp, Zea mays
  misc_feature (1)..(2): n is a, c, g, or t
  misc_feature (4)..(9): n is a, c, g, or t
  Peptide Sequence Number=SeqID_12095
  Probeset Number=SeqID_19878
nntnnnnnngcgccgcatgggcggtggttttggcggcaaggaaacccaggccgccagcccggcatgcctgtgcgcggtagtcgcgcgcctcaccggccagccgaccaagatgcgcctgccacgcgtggaagacatgctgatgaccggcaagcgccacccgttctacatcgagtatgacgtgggcttcgacgaca

SEQ ID NO: 5476 - DNA, 194 bp, Zea mays
  misc_feature (186)..(191): n is a, c, g, or t
  misc_feature (193)..(194): n is a, c, g, or t
  Peptide Sequence Number=SeqID_12096
  Probeset Number=SeqID_19879
tgtcgtcgaagcccacgtcatactcgatgtagaacgggtggcgcttgccggtcatcagcatgtcttccacgcgtggcaggcgcatcttggtcggctggccggtgaggcgcgcgactaccgcgcacaggcatgccgggctggcggcctgggtttccttgccgccaaaaccaccgcccatgcggcgcnnnnnnann

SEQ ID NO: 5477 - DNA, 668 bp, Zea mays
  misc_feature (1)..(3): n is a, c, g, or t
  misc_feature (668)..(668): n is a, c, g, or t
  Peptide Sequence Number=SeqID_12097
  Probeset Number=SeqID_19880
nnntcgctgcgctccaagcccagcagttgcgtgatcatcgccaaccatcagtccaactacgatctctttgtgtttggcacagtggtgccctaccgcacggtgtgtatcggcaagaagagcctgaagtgggtaccgttgttcggccagttgttctggctggcgggcaatgtgctgattgaccggggcaatgcgcacaaagcgcggcgctcgatgctcactacaacgcataccttgcaacatgcagacacctcgatctgggtgttcccggaaggcacgcgcaacttgggtgaaaccctgctgccgttcaagaaaggcgcgttccagatggcgatcgccgcgggcgtgccgattgtgcaggtgtgtgtcagcacttacgtgaagcagatgaagctcaaccgctggaacagtggcgatattctgattcgttcgctgccgccgattcctacgaaggggctgacgatggatgacatgccgctgttaatgcagacctgccgtgagcaaatgcgcgattgcatcgaagcgatggatcgcgagctgcaaactgcgcctgtaatcacgggtgaaccccgccgaatttgctgactctgattgggcagggcagctaagctgcctgacagttgtcatctgccattcaagaagaagcgatcagcactatgggtagagttgtn

SEQ ID NO: 5478 - DNA, 1172 bp, Zea mays
  misc_feature (1)..(4): n is a, c, g, or t
  misc_feature (6)..(6): n is a, c, g, or t
  misc_feature (800)..(802): n is a, c, g, or t
  misc_feature (804)..(804): n is a, c, g, or t
  misc_feature (809)..(813): n is a, c, g, or t
  misc_feature (815)..(815): n is a, c, g, or t
  misc_feature (817)..(821): n is a, c, g, or t
  misc_feature (823)..(824): n is a, c, g, or t
  misc_feature (827)..(827): n is a, c, g, or t
  misc_feature (832)..(832): n is a, c, g, or t
  misc_feature (836)..(837): n is a, c, g, or t
  misc_feature (840)..(842): n is a, c, g, or t
  misc_feature (845)..(852): n is a, c, g, or t
  misc_feature (856)..(857): n is a, c, g, or t
  misc_feature (864)..(864): n is a, c, g, or t
  misc_feature (867)..(869): n is a, c, g, or t
  misc_feature (871)..(879): n is a, c, g, or t
  misc_feature (889)..(894): n is a, c, g, or t
  misc_feature (896)..(910): n is a, c, g, or t
  misc_feature (912)..(920): n is a, c, g, or t
  misc_feature (922)..(922): n is a, c, g, or t
  misc_feature (925)..(926): n is a, c, g, or t
  misc_feature (928)..(928): n is a, c, g, or t
  misc_feature (931)..(936): n is a, c, g, or t
  misc_feature (938)..(1172): n is a, c, g, or t
  Peptide Sequence Number=SeqID_12098
  Probeset Number=SeqID_19881
nnnngnaaccagagattcggcgccgcatatccattgcatttcgcaagggtgagaagaggagcccggcgcttcaggtgttcgtacaatgcctagagcaacacgcggctgagattcggtgacccccctaaaaatcaacatcatagtggcgtgtagccgcattcgtaagcttagcttacgtaatattgtaaaattattcgctttttctctttttctataggcgctaggttgatctcaaccgggaggagactctcggttgggcacactcaattgctgatcctgacattcagtaattcggtaggtctgacggtgcttcatatttcgccccggaaacggggctttttaaaaataaaaagagggcagcctatgccacttaaaaaatcttctgattgtttctctgggccgtagtggcctgtctgatgttttctgcctctgagagttggttgagtacctgctagagcgtcatcgcttgggcggaatgtctctgctgcaatccatgagagcaataacatgaaaaatgaaaacaagatcttcaaagttggcctgacagtcgcagcactgacgctgagttcgatgatgtcaatgggtgccatggccggtacgacgctcgacaatgtcaagaagaagggatttgttcaatgtggtatcagtgatggcctgccaggcttctcttataccgaccccaagggtaattttcacggattcgatgtagatgtttgcagggctgttgctgcagccgtctttcccgcttgaccggcgagaaggaaaacggatttcacggcgcgtaccggagcaatccggannngncgcannnnncngnnnnnanncantcgtntacnntannnaannnnnnnngccnntcccctnttnnntnnnnnnnnnaaaataactnnnnnnannnnnnnnnnnnnnngnnnnnnnnncntcnnanccnnnnnngnnnnnnnnnnnnnnnnnnnnnnnnnnnnnnnnnnnnnnnnnnnnnnnnnnnnnnnnnnnnnnnnnnnnnnnnnnnnnnnnnnnnnnnnnnnnnnnnnnnnnnnnnnnnnnnnnnnnnnnnnnnnnnnnnnnnnnnnnnnnnnnnnnnnnnnnnnnnnnnnnnnnnnnnnnnnnnnnnnnnnnnnnnnnnnnnnnnnnnnnnnnnnnnnnnnnnnnnnnnnnnnnnnnnnnnnnnn

SEQ ID NO: 5479 - DNA, 1172 bp, Zea mays
  misc_feature (1)..(235): n is a, c, g, or t
  misc_feature (237)..(242): n is a, c, g, or t
  misc_feature (245)..(245): n is a, c, g, or t
  misc_feature (247)..(248): n is a, c, g, or t
  misc_feature (251)..(251): n is a, c, g, or t
  misc_feature (253)..(261): n is a, c, g, or t
  misc_feature (263)..(277): n is a, c, g, or t
  misc_feature (279)..(284): n is a, c, g, or t
  misc_feature (294)..(302): n is a, c, g, or t
  misc_feature (304)..(306): n is a, c, g, or t
  misc_feature (309)..(309): n is a, c, g, or t
  misc_feature (316)..(317): n is a, c, g, or t
  misc_feature (321)..(328): n is a, c, g, or t
  misc_feature (331)..(333): n is a, c, g, or t
  misc_feature (336)..(337): n is a, c, g, or t
  misc_feature (341)..(341): n is a, c, g, or t
  misc_feature (346)..(346): n is a, c, g, or t
  misc_feature (349)..(350): n is a, c, g, or t
  misc_feature (352)..(356): n is a, c, g, or t
  misc_feature (358)..(358): n is a, c, g, or t
  misc_feature (360)..(364): n is a, c, g, or t
  misc_feature (369)..(369): n is a, c, g, or t
  misc_feature (371)..(373): n is a, c, g, or t
  misc_feature (1167)..(1167): n is a, c, g, or t
  misc_feature (1169)..(1172): n is a, c, g, or t
  Peptide Sequence Number=SeqID_12099
  Probeset Number=SeqID_19882
nnnnnnnnnnnnnnnnnnnnnnnnnnnnnnnnnnnnnnnnnnnnnnnnnnnnnnnnnnnnnnnnnnnnnnnnnnnnnnnnnnnnnnnnnnnnnnnnnnnnnnnnnnnnnnnnnnnnnnnnnnnnnnnnnnnnnnnnnnnnnnnnnnnnnnnnnnnnnnnnnnnnnnnnnnnnnnnnnnnnnnnnnnnnnnnnnnnnnnnnnnnnnnnnnnnnnnnnnnnnnnnnnnnnnnnnnnncnnnnnnggntnngangnnnnnnnnncnnnnnnnnnnnnnnntnnnnnnagttattttnnnnnnnnnannnaanaggggannggcnnnnnnnnttnnntanngtanacgantgnntnnnnncngnnnnntgcgncnnntccggattgctccggtacgcgccgtgaaatccgttttccttctcgccggtcaagcgggaaagacggctgcagcaacagccctgcaaacatctacatcgaatccgtgaaaattacccttggggtcggtataagagaagcctggcaggccatcactgataccacattgaacaaatcccttcttcttgacattgtcgagcgtcgtaccggccatggcacccattgacatcatcgaactcagcgtcagtgctgcgactgtcaggccaactttgaagatcttgttttcatttttcatgttattgctctcatggattgcagcagagacattccgcccaagcgatgacgctctagcaggtactcaaccaactctcagaggcagaaaacatcagacaggccactacggcccagagaaacaatcagaagattttttaagtggcataggctgccctctttttatttttaaaaagccccgtttccggggcgaaatatgaagcaccgtcagacctaccgaattactgaatgtcaggatcagcaattgagtgtgcccaaccgagagtctcctcccggttgagatcaacctagcgcctatagaaaaagagaaaaagcgaataattttacaatattacgtaagctaagcttacgaatgcggctacacgccactatgatgttgatttttaggggggtcaccgaatctcagccgcgtgttgctctaggcattgtacgaacacctgaagcgccgggctcctcttctcacccttgcgaaatgcaatggatatgcggcgccgaatctctggttncnnnn

SEQ ID NO: 5480 - DNA, 578 bp, Zea mays
  misc_feature (575)..(578): n is a, c, g, or t
  Peptide Sequence Number=SeqID_12100
  Probeset Number=SeqID_19883
aaggcggaaaccacgccgccgccggtgtacccggaatcgcacctgtcgttcctggccaatgtctacaaccagaaggctcgcgacttctatcaccgccatggcgtgcaactgatcgacgcggcgtacgaagcccacgaagaaaccggcgaagtgccggtgatgatcaccaagcactgcctgcgtttctcgttcaacctgtgccctaaacaggccaagggtgtgacgggggtgaaaaccaaagttgccccaatgcagctgatccacggcgatgaagtgctgacgctgaagttcgactgcaagccttgcgagatgcacgtgatcggcaagatcaagggccacatcctcggcctgccgcaaccgggcagcgtggtgggttatatcagcccggatgacctgctcaagaccatcccgcgcggcgcacactgagtcgccggtgagcgtcatgctacggcgtgacgctcaccgctgttttcgaacgccaccaccaaccccgctgcaaccccgccgccgcgagcaaaatcgccgccacgcccagccattgcaaccagcccaggcgatgcccaaaggcaatccannnn

SEQ ID NO: 5481 - DNA, 603 bp, Zea mays
  misc_feature (11)..(12): n is a, c, g, or t
  misc_feature (599)..(602): n is a, c, g, or t
  Peptide Sequence Number=SeqID_12101
  Probeset Number=SeqID_19884
atctcgccgcnntatcaggtgctgctgaacagccccgccgtggtgcagggctgggaagcgatgctgaccgcgatccgcctgaacacgtcgctgtcgccgcgggtgcgcgagctgatcatcctgcgcgtggcgacgctgaacaacgcgccctacgagttcgacgcgcacgtgccgcacgccctggcggcgggcatgccgcaggcggtggtggaccagttgcgcggcgggccgcgcgcggacgcggtgcaggggctggaggcgggcgaggccgacgtgctggccctgaccgacgccatgacccgcgacatcgaggtgccggacgcgctgttcgcgccgctgcgggcgcgctacaacgaccaggaactggtcgagttgaccgcgacggtggcggcctacaacatggtgtcgcgcttcctggtggcgttgcgcgtcgggcactgaaaggagctttgcatggacaagacggtattgctggtgtcgctgggcgagcgtttcgacgcggcgcgcgcggccgacatggcgcaacgcctgaccgagggcctggacggcgtgcggctgcgcgctttcgccgcggtcgaagaggatgacacctacgtgtnnnng

SEQ ID NO: 5482 - DNA, 624 bp, Zea mays
  misc_feature (1)..(6): n is a, c, g, or t
  misc_feature (619)..(624): n is a, c, g, or t
  Peptide Sequence Number=SeqID_12112
  Probeset Number=SeqID_19885
nnnnnngctggccatgacgcgtttcgaagcgttccgccacgtggtgttattgcccgcactgggcaaggtctggccggccctgagcagccagatcatcatcgtgatgctcggttcggcggtctgttcgcaaatcgccacagaagagctgagcttcgccgccaattttatccagtcacgcaacttccgtgcgtttgaaacctatgcactgaccaccctggtctacctgtgcatggcgctgatgatccgccagttgctgaactggatcggtcgtcgctatgtcatgaggaacgcccgatgagtgatttttccttctgggacatcgtgcgcaacctgctcaccggcttgcagtggaccttgctgctgtcgctggtggcgtttatcggcggcggcgtgatcggcttgctggtgatgacgatgcgcatcagcaccaaggctttcccgcgcaacgtcgcccgtacctatatcgagctgttccagggcacgccgctgttgatgcagctgttcctggtgttcttcggcattgccttgctcggcgtggacatctcgccctggctggcggcggcgattgccttgaccctgttcacaagcgcctatctggccgaaatctggcgtggctgcnnnnnn

SEQ ID NO: 5483 - DNA, 935 bp, Zea mays
  misc_feature (1)..(1): n is a, c, g, or t
  misc_feature (4)..(12): n is a, c, g, or t
  misc_feature (14)..(16): n is a, c, g, or t
  misc_feature (19)..(19): n is a, c, g, or t
  misc_feature (24)..(24): n is a, c, g, or t
  misc_feature (39)..(41): n is a, c, g, or t
  misc_feature (52)..(52): n is a, c, g, or t
  misc_feature (55)..(55): n is a, c, g, or t
  misc_feature (57)..(57): n is a, c, g, or t
  misc_feature (59)..(60): n is a, c, g, or t
  misc_feature (62)..(62): n is a, c, g, or t
  misc_feature (70)..(80): n is a, c, g, or t
  misc_feature (91)..(98): n is a, c, g, or t
  misc_feature (114)..(114): n is a, c, g, or t
  misc_feature (933)..(935): n is a, c, g, or t
  Peptide Sequence Number=SeqID_12113
  Probeset Number=SeqID_19886
nctnnnnnnnnntnnnccnggggngcgtcaatggatggnnnaccccgagcanggncnanncnattccggnnnnnnnnnnnaaaaacccccnnnnnnnntaaaggcatcaagatnctgccggctgtgagccggtgacagatttgctggcgacgttgaccgagtgcgacctgtgcttcgtcgcgttgccatccagtgccttgcgttcggtgctcgcgcctcactccgagcggctggcgggcaagctgctggtcagcctgaccaagggcatcgaggcgcacaccttcaagttgatgagtgaaatccttgaagaaatcgcccccgaggcacgcattggcgtgttgtccggcccgaacctggcgcgggaagtggctgagcacgccctgaccgccaccgtgatcgcgagtgaagacgaagaactctgcgagcgggtgcaggcagtgctgcacggtcgcaccttccgcgtttacgccagtgctgaccgcttcggcgtcgaactgggcggggcgttaaaaaacgtctacgcgatcatcgccggcatggcggttgcgctgggcatgggcgaaaacaccaagagcatgctgatcacccgtgccttggccgagatgacgcgctttgcggtcaaccagggcgccaacccgatgaccttccttggcctggcgggtgtgggcgacctgatcgtcacctgctcgtcaccgaaaagccgcaactatcaggtcggttttgccctcggccagggcctgagcctggaagacgccgtgacgcgtttgggcgaagtggccgaaggcgtcaacaccctgaaggtgctgaaggccaaggctcaggaagtcggggtgtatatgccgctggtcgcgggtttgcacgcgatcctgtttgaagggcgcaccttgaaccaggtcatcgagttgctgatgcgggccgagccgaagaccgatnnn

SEQ ID NO: 5484 - DNA, 879 bp, Zea mays
  misc_feature (1)..(4): n is a, c, g, or t
  misc_feature (867)..(879): n is a, c, g, or t
  Peptide Sequence Number=SeqID_12114
  Probeset Number=SeqID_19887
nnnngtgatgttcaagtaccagctggggcgcattccctccgctgaagacaagaccctgatcgtgctgtttctgaaaaccctgaccggcgaatgggcaggcaagcccctatgaagctctcccgccgcgccacccagctcatgctcagcgccatgaccctgatactggcctcgaccctggtattcctgtacctcaagtcatcgagcgaacagaccacctacaccgaatcccgcgacctgatccgcgaaatcaagcaactgaactcacaatgggacagcgaagtgctcaaggccaggattgccctgacccacaactacgaccccttggtcgcccccctcaaagagataaacgacctgtgggcccagcttgagcgccgcgagtcgcagaacactcacgaagacccggcccactggcaatccagccaggatgcctatcgccaggcaatccaggaaaaggcccggctggtggagcaattcaagtcccacaatgcggtactgcgcaactctctggccttcctgccgacggccgaagacgatattcaggcgcagttcctggcacttaccgacggggacaagctgcttcagcaaagcatcgccaccgacacctacgacgtactcctgagcagcctcgaattcgcccaggtgaccagcgacgacaaggccgccgacattctggtgggcctgaacaaactggcgatcaacaaactgagcctgcccgagtcgttccaggtgccggtggagattctcagcaagcacatttcgctgatcctgcgggaacagcccgtggtcaacgacctgctcgaacgcatcgccgccgtgccgctggccgatcatctggacgacctgaccaaccagctcaaccaggaccannnnnnnnnnnnn

SEQ ID NO: 5485 - DNA, 879 bp, Zea mays
  misc_feature (1)..(6): n is a, c, g, or t
  misc_feature (807)..(809): n is a, c, g, or t
  misc_feature (811)..(828): n is a, c, g, or t
  misc_feature (831)..(835): n is a, c, g, or t
  misc_feature (837)..(837): n is a, c, g, or t
  misc_feature (839)..(842): n is a, c, g, or t
  misc_feature (849)..(854): n is a, c, g, or t
  misc_feature (856)..(859): n is a, c, g, or t
  misc_feature (863)..(866): n is a, c, g, or t
  misc_feature (869)..(872): n is a, c, g, or t
  misc_feature (874)..(874): n is a, c, g, or t
  misc_feature (879)..(879): n is a, c, g, or t
  Peptide Sequence Number=SeqID_12115
  Probeset Number=SeqID_19888
nnnnnncttgccggtgggcgtgcaactgctcgccccgtatttccaggaaggccgcctgctcaatgtggcgcaccagtaccagttgaacactgactggcacactcgcacccctaccggcttctgaggagaacactatgcaatgggaagtcgtgatcgggctggagattcatacccagctcgccacccaatcgaagattttctccggtagcgccaccacgttcggctccgagcccaacacgcaggccagcctggtagacctgggcatgcccggcgtgctgccggtgctgaaccaggaagcggtgcgcatggcggtgatgttcggcctcgccatcgatgccgagatcggccagcacaacgtgtttgcccgcaagaactacttctacccggacctgcccaagggctaccagatcagccagatggaattgccgatcgttggcaagggctacctggacatcccgctggaagacggcaccatcaaacgtgtcggcgtgacccgtgcgcacctggaagaagatgccggcaagagcctgcatgaagaattcaacggcgccaccggcatcgacctgaaccgtgccggcaccccgctgctggaaatcgtttccgagccggacatgcgcagcgccaaggaagccgtggcctacgtcaagacgatccacgcgctggtgcgctacctcggcatctgcgacggcaacatggccgaaggctccctgcgttgcgactgcaacgtgtcggtacggccaaaaggccaggtcgagtacggcacccgctgcgagatcaagaacgtcaactcgttccgtttcatcgagnnngnnnnnnnnnnnnnnnnnngtnnnnngntnnnnctgatcnnnnnngnnnncaannnnatnnnncnaaccn

SEQ ID NO: 5486 - DNA, 871 bp, Zea mays
  misc_feature (1)..(7): n is a, c, g, or t
  misc_feature (721)..(721): n is a, c, g, or t
  misc_feature (728)..(730): n is a, c, g, or t
  misc_feature (802)..(806): n is a, c, g, or t
  misc_feature (817)..(817): n is a, c, g, or t
  misc_feature (833)..(833): n is a, c, g, or t
  misc_feature (840)..(842): n is a, c, g, or t
  misc_feature (848)..(848): n is a, c, g, or t
  misc_feature (852)..(854): n is a, c, g, or t
  misc_feature (856)..(856): n is a, c, g, or t
  misc_feature (858)..(871): n is a, c, g, or t
  Peptide Sequence Number=SeqID_12116
  Probeset Number=SeqID_19889
nnnnnnnacccagtcccgctccgtcaccgccgaaatcgcgatccccggctgcgtactcaactaccccgtaggtacccgccgcttcgcctccctgtgcggcgacggcagcctgcaagtggtgacgctgaacgagcagggccaggaaacctcacgcaaccgcacgcacttcttcgaccccaacgccgagaagctcaacgaacgcgcggtgaacgtgggcgacacctactacttcaccaccaccaccggcaccatccgcccggtagatttctccggcgatgagccgaaaatcctgccgtcctggtcactcaccaccgacgcggaaaagaaaaccggctgggctccgggtggctggcagttgatggctgtggcaccaaagctcaaccgcatgtacgtgctgatgcacgacaaccacgagccgatgaagtgggaagacccgagcaccatcatctgggcctatgacctcaagaccatgaagaagatagccaccctggaagccccgaccccggtctggagcatgcaagccaccggcgacgacaagcccctgttgctgggcgccgacgtcgaaggcggcttgcagatcttcgacctcaagaccaataaactcaccggtagcatggccaaggtagcgaagaccgcaacccagatcatgagctactaaagaggttcggccatgcatatcgacccgatcttcatcattgccagcgccctcgccatcgcgggnttgctgnnnagtgccgcgacccacaagttgcgcgcaccggcacgcttcgcccggcaactggccgattaccagttgctgccnnnnncagtgactcgncccgccgcccggggtnatcccgnnnctgganctgnnnantnnnnnnnnnnnnnn

SEQ ID NO: 5487 - DNA, 871 bp, Zea mays
  misc_feature (1)..(14): n is a, c, g, or t
  misc_feature (16)..(16): n is a, c, g, or t
  misc_feature (18)..(20): n is a, c, g, or t
  misc_feature (24)..(24): n is a, c, g, or t
  misc_feature (30)..(32): n is a, c, g, or t
  misc_feature (39)..(39): n is a, c, g, or t
  misc_feature (55)..(55): n is a, c, g, or t
  misc_feature (66)..(70): n is a, c, g, or t
  misc_feature (142)..(144): n is a, c, g, or t
  misc_feature (151)..(151): n is a, c, g, or t
  misc_feature (865)..(871): n is a, c, g, or t
  Peptide Sequence Number=SeqID_12117
  Probeset Number=SeqID_19890
nnnnnnnnnnnnnnantnnncagntccagnnncgggatnaccccgggcggcgggncgagtcactgnnnnnggcagcaactggtaatcggccagttgccgggcgaagcgtgccggtgcgcgcaacttgtgggtcgcggcactnnncagcaancccgcgatggcgagggcgctggcaatgatgaagatcgggtcgatatgcatggccgaacctctttagtagctcatgatctgggttgcggtcttcgctaccttggccatgctaccggtgagtttattggtcttgaggtcgaagatctgcaagccgccttcgacgtcggcgcccagcaacaggggcttgtcgtcgccggtggcttgcatgctccagaccggggtcggggcttccagggtggctatcttcttcatggtcttgaggtcataggcccagatgatggtgctcgggtcttcccacttcatcggctcgtggttgtcgtgcatcagcacgtacatgcggttgagctttggtgccacagccatcaactgccagccacccggagcccagccggttttcttttccgcgtcggtggtgagtgaccaggacggcaggattttcggctcatcgccggagaaatctaccgggcggatggtgccggtggtggtggtgaagtagtaggtgtcgcccacgttcaccgcgcgttcgttgagcttctcggcgttggggtcgaagaagtgcgtgcggttgcgtgaggtttcctggccctgctcgttcagcgtcaccacttgcaggctgccgtcgccgcacagggaggcgaagcggcgggtacctacggggtagttgagtacgcagccggggatcgcgatttcggcggtgacggagcgggactgggtnnnnnnn

SEQ ID NO: 5488 - DNA, 784 bp, Zea mays
  misc_feature (1)..(1): n is a, c, g, or t
  misc_feature (3)..(7): n is a, c, g, or t
  misc_feature (769)..(771): n is a, c, g, or t
  misc_feature (776)..(776): n is a, c, g, or t
  misc_feature (779)..(784): n is a, c, g, or t
  Peptide Sequence Number=SeqID_12118
  Probeset Number=SeqID_19891
ngnnnnngtacccctgagcgccaccgtggcccgtcgccagttgcggttgcgggatattttgcacatgcagccgggggatgtgattcccgtcgagctgccggaagaactgatcatgcgcgccaacggcgtgccgtcgttcaaggtcaagctgggctctcacaaaggcaacctcgcgttgcaagtgattgaaccgatcaaccgccgctgatccacattaatttctgctccgccgaggacatgtaatggctaccgaacacgaaaacacttccgccgaagaccaggccctggctgacgagtgggcggctgccctggaggaaaccggcgatgtcggccaggacgatatcgacgcgctgctggcagctgatgcggccaccgcaccggtgggcaaccgccttcccatggaagagttcggcagcgtgccgaagaacaacgagccggtgaccctggacggtccgaacctggacgtgatcctcgacatcccggtgtcgatctccatggaagtcggcagcaccgaaatcaacatccgcaacctgctgcaactcaaccagggttcggtgatcgagctggatcgtctggccggtgagccgctggacgtgctggtcaacggcacgctgattgcccatggcgaagtggtggtggtcaacgagaagttcggcatccgcctgaccgacgtgatcagtccaagtgaacgcatcaagaagttgcgttgatatgaagcgctcattggtaggactgttatcgacgctgcccttgagcgtaatgggcagcnnnaccgntcnnnnnn

SEQ ID NO: 5489 - DNA, 617 bp, Zea mays
  misc_feature (1)..(2): n is a, c, g, or t
  misc_feature (518)..(521): n is a, c, g, or t
  misc_feature (524)..(524): n is a, c, g, or t
  misc_feature (528)..(529): n is a, c, g, or t
  misc_feature (531)..(536): n is a, c, g, or t
  misc_feature (538)..(539): n is a, c, g, or t
  misc_feature (543)..(560): n is a, c, g, or t
  misc_feature (562)..(566): n is a, c, g, or t
  misc_feature (568)..(579): n is a, c, g, or t
  misc_feature (583)..(583): n is a, c, g, or t
  misc_feature (585)..(591): n is a, c, g, or t
  misc_feature (597)..(617): n is a, c, g, or t
  Peptide Sequence Number=SeqID_12119
  Probeset Number=SeqID_19892
nnctgccgcgcctcgggagtgattggaaaccttggccacatagcccaggcgccagaaatcctgcttgttcactcggggataaaactcggccttggccgggtcgcccggcaggctggcgaagcggcccatgttcgccacggcacggctggggcgatagcagtcgaataccttcaagccgtaaccctgcctggccaactcggcctggacccgcaccagggcctttgccgcgtcggcagacagcacgcattcggcagcgttgtagccgtccagtggcgcaccggtgaagttatgggggctggcgtagcgaatgtcctgcgcgatgctcggatcgaggcttcgcaggtaaaccatgttggctggcattggcgtgtctgccgctgccggcgcggcgagcaccaggaggctaagggcggcaactgcggggaaagagtagggcatgggcgcggccgggctcgggcggtggcttaagcgcgccacactagcaatgcccggcccatgccgccagtgctagggcgtgnnnntgngcannannnnnncnntgcnnnnnnnnnnnnnnnnnnannnnncnnnnnnnnnnnngttncnnnnnnncgtgannnnnnnnnnnnnnnnnnnnn

SEQ ID NO: 5490 - DNA, 617 bp, Zea mays
  misc_feature (1)..(21): n is a, c, g, or t
  misc_feature (27)..(33): n is a, c, g, or t
  misc_feature (35)..(35): n is a, c, g, or t
  misc_feature (39)..(50): n is a, c, g, or t
  misc_feature (52)..(56): n is a, c, g, or t
  misc_feature (58)..(75): n is a, c, g, or t
  misc_feature (79)..(80): n is a, c, g, or t
  misc_feature (82)..(87): n is a, c, g, or t
  misc_feature (89)..(90): n is a, c, g, or t
  misc_feature (94)..(94): n is a, c, g, or t
  misc_feature (97)..(100): n is a, c, g, or t
  misc_feature (616)..(617): n is a, c, g, or t
  Peptide Sequence Number=SeqID_12120
  Probeset Number=SeqID_19893
nnnnnnnnnnnnnnnnnnnnntcacgnnnnnnngnaacnnnnnnnnnnnngnnnnntnnnnnnnnnnnnnnnnnngcanngnnnnnntnntgcncannnncacgccctagcactggcggcatgggccgggcattgctagtgtggcgcgcttaagccaccgcccgagcccggccgcgcccatgccctactctttccccgcagttgccgcccttagcctcctggtgctcgccgcgccggcagcggcagacacgccaatgccagccaacatggtttacctgcgaagcctcgatccgagcatcgcgcaggacattcgctacgccagcccccataacttcaccggtgcgccactggacggctacaacgctgccgaatgcgtgctgtctgccgacgcggcaaaggccctggtgcgggtccaggccgagttggccaggcagggttacggcttgaaggtattcgactgctatcgccccagccgtgccgtggcgaacatgggccgcttcgccagcctgccgggcgacccggccaaggccgagttttatccccgagtgaacaagcaggatttctggcgcctgggctatgtggccaaggtttccaatcactcccgaggcgcggcagnn

SEQ ID NO: 5491 - DNA, 472 bp, Zea mays
  Peptide Sequence Number=SeqID_12121
  Probeset Number=SeqID_19894
gcgcctgtgcatccaccccgtcaccagatattgctgtcggctcgtggccaggtactgggaattgcacccagatcctcggtgggattgatcgtagggtcaggttgagatggccttgaaccactcccccctggaagttgaaggagatctgcgcatgttccggtgtgagctcggagacgaatgcttcgagctggtctccacgctctatcggcgaggcgctgatcaaactgcagactcgatctgcagctgctcgtaggctgagtgcttgagggtggtttacggcagtgttcggagtgatatccggcatattggttctccctgcgcaaggtgctaacaatgttattaccctgcgcaggggaaatcaaactaccagctacgctttatgcccctgcgaggtaaggtagcggcccgaacgggatgtcgtcgtcgaagtctggcggagtaccttgttgcgacggcggtggggtctgcggtc

SEQ ID NO: 5492 - DNA, 472 bp, Zea mays
  Probeset Number=SeqID_19895
gaccgcagaccccaccgccgtcgcaacaaggtactccgccagacttcgacgacgacatcccgttcgggccgctaccttacctcgcaggggcataaagcgtagctggtagtttgatttcccctgcgcagggtaataacattgttagcaccttgcgcagggagaaccaatatgccggatatcactccgaacactgccgtaaaccaccctcaagcactcagcctacgagcagctgcagatcgagtctgcagtttgatcagcgcctcgccgatagagcgtggagaccagctcgaagcattcgtctccgagctcacaccggaacatgcgcagatctccttcaacttccaggggggagtggttcaaggccatctcaacctgaccctacgatcaatcccaccgaggatctgggtgcaattcccagtacctggccacgagccgacagcaatatctggtgacggggtggatgcacaggcgc

SEQ ID NO: 5493 - DNA, 181 bp, Zea mays
  misc_feature (1)..(3): n is a, c, g, or t
  Peptide Sequence Number=SeqID_12122
  Probeset Number=SeqID_19896
nnnggcccagggcgccggtgaggtcgccaaaagcatggctgacagagcccaggacgcggctgctggtgcactcagcgccgccggttcggcacaggttgcagccaatgccgcgcttggcgcggcaaccgacgcccagacaacggccgccaccgcccggcaaacagctgactcggcgggtgct

SEQ ID NO: 5494 - DNA, 181 bp, Zea mays
  misc_feature (179)..(181): n is a, c, g, or t
  Probeset Number=SeqID_19897
agcacccgccgagtcagctgtttgccgggcggtggcggccgttgtctgggcgtcggttgccgcgccaagcgcggcattggctgcaacctgtgccgaaccggcggcgctgagtgcaccagcagccgcgtcctgggctctgtcagccatgcttttggcgacctcaccggcgccctgggccnnn

SEQ ID NO: 5495 - DNA, 916 bp, Zea mays
  misc_feature (1)..(7): n is a, c, g, or t
  misc_feature (11)..(17): n is a, c, g, or t
  misc_feature (19)..(26): n is a, c, g, or t
  misc_feature (28)..(31): n is a, c, g, or t
  misc_feature (40)..(59): n is a, c, g, or t
  misc_feature (63)..(64): n is a, c, g, or t
  misc_feature (70)..(77): n is a, c, g, or t
  misc_feature (91)..(95): n is a, c, g, or t
  misc_feature (904)..(916): n is a, c, g, or t
  Peptide Sequence Number=SeqID_12123
  Probeset Number=SeqID_19898
nnnnnnncgannnnnnncnnnnnnnncnnnntcaacaaannnnnnnnnnnnnnnnnnnnaatnnaaaggnnnnnnnnccggcgtcttgttnnnnntgggacatgccggcggaaaacccctgatcgccggcaaagacacggcggctgactggatgttgcagcaggctggtggccataacctggcgacccacaagggttacaaacctttttccgtcgagtcactggcggggctcaatcctgaggtgctggtgtttgccgatcgcgccttgaccggggatgcggcccgcgccgcgttgttcaaggaaaatccgatcctggcttcgacgccagcggccaagaatggacgcgtctatgagctggacccgacgctgctggttggtgggcttgggccgcgcttgccgcaaagcctggtgaagctgtctgccgggttctatccgtctcaggctaataccgccccatgaccactctggttaaaccgcgaaccctgtttatcggcttgagtctgctgtgtgtattggcgatctggttgtcattggccctggggccggtgagtttgccgttgatggacacactgcgggcagccttacgcttgatgggtgtgccaatcgaggcccaaggcctggagcaggcggagttgatcctcgggcagattcgcctgccgcgtacgttgctgggcctggccgtcggcggggttctggcactttccggcgtcgcaatgcaggggctgtttcgcaaccccttggctgatcccgggttggtcggggtgtccagcggtgcggcgttgggcgcggcgattgcgattgtcggtggttcgttttttggtggtttgccggacgtcctcgggccttatctgctgtcgttgtgtgccttcctaggggggttgggggtaacagcgctggtctatnnnnnnnnnnnnn

SEQ ID NO: 5496 - DNA, 171 bp, Zea mays
  misc_feature (1)..(7): n is a, c, g, or t
  Peptide Sequence Number=SeqID_12124
  Probeset Number=SeqID_19899
nnnnnnnacgatcttctcgatctcgcccgggtggcccagtgcgacgatgacccagtcattgcccggcgtacgacgacgtgcggtctcccagccgtcgcccatgttgatgccacggcccgggttgaggatgttgctcatgcgcccgaagtgttcatcggagcaggccagtgc

SEQ ID NO: 5497 - DNA, 171 bp, Zea mays
  misc_feature (165)..(171): n is a, c, g, or t
  Peptide Sequence Number=SeqID_12125
  Probeset Number=SeqID_19900
gcactggcctgctccgatgaacacttcgggcgcatgagcaacatcctcaacccgggccgtggcatcaacatgggcgacggctgggagaccgcacgtcgtcgtacgccgggcaatgactgggtcatcgtcgcactgggccacccgggcgagatcgagaagatcgtnnnnnnn

SEQ ID NO: 5498 - DNA, 595 bp, Zea mays
  misc_feature (1)..(6): n is a, c, g, or t
  misc_feature (590)..(595): n is a, c, g, or t
  Peptide Sequence Number=SeqID_12126
  Probeset Number=SeqID_19901
nnnnnnaacgtccgggcacggccagcggcgtcaccttcgtcaccctggaagatgagttcggcaatatcaatgtggtggtctggcgcgatttggccgagcggcagcgccaggcgctggtgggctcgcggttgctcaaagtcgatggccgctgggaggcggtgggggaggttcggcacctgatcgccgggcgcctgaccgacctgaccccgctgctgtcgggcatcagtgtgcgcagccgggattttcgctgatccggctcttgctccttcatggccgcataagcaatatgcgatgaaaccaaccgccgctgtcgggctcaaagttttcatcgccgcccaccttttatcttttgcagagccgactgatgcagtttttatccgatacccatggctgtgatggctgggctggggaaatggcccagaggattcgcgcattcgattggtccggcaccgacctcggcccgattggtgcctggccctccagcctggtcagcgccgtgcagatgatgctggcatcgcccatccctatggtcatgctgtggggaagggcgggttacatgatctacaacgacagctattccgtgtttgccnnnnnn

SEQ ID NO: 5499 - DNA, 986 bp, Zea mays
  misc_feature (1)..(5): n is a, c, g, or t
  misc_feature (13)..(20): n is a, c, g, or t
  misc_feature (23)..(34): n is a, c, g, or t
  misc_feature (36)..(36): n is a, c, g, or t
  misc_feature (38)..(39): n is a, c, g, or t
  misc_feature (44)..(50): n is a, c, g, or t
  misc_feature (57)..(61): n is a, c, g, or t
  misc_feature (66)..(67): n is a, c, g, or t
  misc_feature (72)..(74): n is a, c, g, or t
  misc_feature (76)..(76): n is a, c, g, or t
  misc_feature (78)..(79): n is a, c, g, or t
  misc_feature (81)..(81): n is a, c, g, or t
  misc_feature (87)..(90): n is a, c, g, or t
  misc_feature (92)..(93): n is a, c, g, or t
  misc_feature (95)..(95): n is a, c, g, or t
  misc_feature (98)..(98): n is a, c, g, or t
  misc_feature (103)..(107): n is a, c, g, or t
  misc_feature (111)..(111): n is a, c, g, or t
  misc_feature (118)..(124): n is a, c, g, or t
  misc_feature (942)..(986): n is a, c, g, or t
  Peptide Sequence Number=SeqID_12127
  Probeset Number=SeqID_19902
nnnnnattttccnnnnnnnncannnnnnnnnnnngngnnatttnnnnnnncgagtannnnnacgcnnttttnnncnanncnagagannnngnngnaanccaannnnnacgnccaggannnnnnngaagcgcgcccgcagtttcggtcgcgatgccgatcaactgtcgatcctgccgggcatccggccaattgttggccgcgacgaagctgaggtggaacgccgctatcagcaagccgtggagctggtgaccgtcgaggacgcaatcgtcgccctgggccgcccgttcaacgaccacgatttcagcaagtacccgctggacgaacccttcccggaactcggcgacctgggctccaacagccagaaaggcggctccgaccgcatcaagcaattggctcgggatgaaggcctgaccctacgggaagtggccctgcgtttctcccggcccaagcgcgatttcgtcggcaccccggagcaggtcgccgacgcgatccagacctggttcgaagcgggtgccgccgatggtttcatcattaattcactgctgcccgatggcctgcagtacttcaccgaacaggtggtgccggtgctgcaagaacgcggtctgttccgccgtgaatacagcggcgtcaccctgcgggaaaaccttggcctggacgtgccggccaaccgctacagcgccgcccttgaaacccaacccacacagatcgccatctgaccagggcacgaccatgacgaacacgatcaaacacggacagttcaatcgtcgcggcttcctgggcgccagttcgattgcctttggcgcgctgggcctcgcctcgctggtgccacgggctttcgctgcacctgcgaagctctcggacctgaccctggctgtcgccacctaccgtggccaggactcgtacttcaccgacgacgccggcacctccaacacaccctacaannnnnnnnnnnnnnnnnnnnnnnnnnnnnnnnnnnnnnnnnnnnn

SEQ ID NO: 5500 - DNA, 209 bp, Zea mays
  misc_feature (1)..(7): n is a, c, g, or t
  Peptide Sequence Number=SeqID_12128
  Probeset Number=SeqID_19903
nnnnnnngcaagggcatcaaccgcctgctggacgagcgttccatcgtattgctgtcgccgctgggttattcgcctaccggtgaaatcttcaacctcgcctgcgaagacgtcgccactcgcgccgccattgacctgggcgcggacaaattgctgctgtttggcgccgatcttggtttgatcgatgaacatggccggctggtgcgtgaact

SEQ ID NO: 5501 - DNA, 209 bp, Zea mays
  misc_feature (203)..(209): n is a, c, g, or t
  Peptide Sequence Number=SeqID_12129
  Probeset Number=SeqID_19904
agttcacgcaccagccggccatgttcatcgatcaaaccaagatcggcgccaaacagcagcaatttgtccgcgcccaggtcaatggcggcgcgagtggcgacgtcttcgcaggcgaggttgaagatttcaccggtaggcgaataacccagcggcgacagcaatacgatggaacgctcgtccagcaggcggttgatgcccttgcnnnnnnn

SEQ ID NO: 5502 - DNA, 408 bp, Zea mays
  misc_feature (1)..(6): n is a, c, g, or t
  misc_feature (10)..(12): n is a, c, g, or t
  Peptide Sequence Number=SeqID_12130
  Probeset Number=SeqID_19905
nnnnnnatgnnncacgtgctcgacccgatccacggccgtgtcgaacgctggtacttgcccggcagccacagcctgaacttcctgctggaaaacgccctgggcggcggcgggattgccagcctgcgcatcgacccccaaggcaaagccttcgcccaacaactgctggaaatcccgattgccgtgccacaacacattgccgatcaattcacttaaaggacccacgccgtggccttcgactcgatcttcaaagccgacttgttccaggggcaaaccatcatcgtcaccggcggcggcagtggcattggccgctgtaccgcacacgagctggcggccctcggcgcccatgtgattctggtggggcgcaagccggaaaaactgcaaacggtcgcggcggagatcagtgaagac

SEQ ID NO: 5503 - DNA, 408 bp, Zea mays
  misc_feature (397)..(399): n is a, c, g, or t
  misc_feature (403)..(408): n is a, c, g, or t
  Peptide Sequence Number=SeqID_12131
  Probeset Number=SeqID_19906
gtcttcactgatctccgccgcgaccgtttgcagtttttccggcttgcgccccaccagaatcacatgggcgccgagggccgccagctcgtgtgcggtacagcggccaatgccactgccgccgccggtgacgatgatggtttgcccctggaacaagtcggctttgaagatcgagtcgaaggccacggcgtgggtcctttaagtgaattgatcggcaatgtgttgtggcacggcaatcgggatttccagcagttgttgggcgaaggctttgccttgggggtcgatgcgcaggctggcaatcccgccgccgcccagggcgttttccagcaggaagttcaggctgtggctgccgggcaagtaccagcgttcgacacggccgtggatcgggtcgagcacgtgnnncatnnnnnn

SEQ ID NO: 5504 - DNA, 1204 bp, Zea mays
  misc_feature (1)..(8): n is a, c, g, or t
  misc_feature (901)..(901): n is a, c, g, or t
  misc_feature (970)..(975): n is a, c, g, or t
  misc_feature (981)..(983): n is a, c, g, or t
  misc_feature (987)..(991): n is a, c, g, or t
  misc_feature (993)..(995): n is a, c, g, or t
  misc_feature (998)..(1001): n is a, c, g, or t
  misc_feature (1005)..(1013): n is a, c, g, or t
  misc_feature (1023)..(1032): n is a, c, g, or t
  misc_feature (1039)..(1069): n is a, c, g, or t
  misc_feature (1071)..(1073): n is a, c, g, or t
  misc_feature (1075)..(1084): n is a, c, g, or t
  misc_feature (1086)..(1093): n is a, c, g, or t
  misc_feature (1096)..(1204): n is a, c, g, or t
  Peptide Sequence Number=SeqID_12132
  Probeset Number=SeqID_19907
nnnnnnnncaggactaccgcaaattggttatcaaaaggtgtgcatcccagcacttcaagttcggcattcaggtggtcatgggtaaaaaacaggcgctgggtcatcatctacatccgcatcagggtttctatccggcagtataagaagtgcgccaatgggtgataatccgttcaaatctcaatggacttgtgcgtcatgagcatcaatcttcccttgcctctgctcggcgaaatggcgattttcgtcaaggtggtggaaaccggcagcttttccgaggccgcacggcaattgggtgcatcgccgtcctctgtgagccgcagcatctcgcgcctggaaaaagccctggcgacccgcctgctgcaacgcaccacgcgcaagttgcgcctcagcgaaggaggcgaagaggtgttcaagcgctgccaggagatggtcagcgccgcgcgttctgtaatggaaatcagcgggcagtacacccatgaagccgaagggttggtgcgggtcagcgtgcccaaggcggtggggcgttttgtggtgcatccccatatgccggaatttctgcggcgttatcccaaggtcgatgtgcaattgatccttgaggaccggcatgttgatctgattgatgacaatgtcgatctgagcatccgcatcaccgacagcccgccgccgggcttggtggggcgccaattactacctatcgaacacttgatctgcgccacgccgcattacctggcggagcacggtgcgccgcaggatccccatgatttgttggagcacagttgcatctacctgggcgagacgcctggggatgcgcgctggaagtttcgccagggcagcaaggcggtgacggtcggggtgcgcgggcggtatgcggcgaatcacaccggggtgcggctggatgcgntgttgcagcatgtgggaattggcagcttgccgtatttcacggcgcggcatgcgctggaagcgggggagnnnnnncaggtnnngccnnnnngnnnttnnnntgcnnnnnnnnncggggatgcnnnnnnnnnncattatnnnnnnnnnnnnnnnnnnnnnnnnnnnnnnngnnnannnnnnnnnngnnnnnnnncannnnnnnnnnnnnnnnnnnnnnnnnnnnnnnnnnnnnnnnnnnnnnnnnnnnnnnnnnnnnnnnnnnnnnnnnnnnnnnnnnnnnnnnnnnnnnnnnnnnnnnnnnnnn

SEQ ID NO: 5505 - DNA, 701 bp, Zea mays
  Peptide Sequence Number=SeqID_12133
  Probeset Number=SeqID_19908
gaagccgagcggccgggtgtcggcggcctggcttgcgggtctggccgatgcacgaaagaagccccaggccagataaagcaggtagaggacgcccatccacttcagcacgacgtggatctgcggatgctcatgcagggcgccgcccaggcccaggccgtaaagcgcgcacagcgccaggttcgcggcttcgaatccgacccagaagggcacggacccccgcaagccgtagcggccacccgcggtggccagcagcgtattgcccggcccggggctgatgatcatgggcaccgcatacccgacaaacgccatccagacttcccatcccgtcattgccgctccttggctggccgtggaccggcgcgcgtattgggctgagcaccggcgaagccgccattaaacggggcttaccgaggctggcaaaacgatctattctcatgccttcgataactcaggctaatcgagttcatgcgacgcttgcctccgctcggcgccttgcgcgcctttgaagccgctgcgcgtcacctgagtttcacgcgcgcggcggccgagctgtgcgtaacgcaggcggccatcagccaccaggtgcgggcgctggaacaatggctgggccgggagctgttcgtccggcgtggtcatgcgctggcattgacgcacaaggggcaggcttatctggatgagctatcgctcgcatttgaccgcat

SEQ ID NO: 5506 - DNA, 701 bp, Zea mays
  Peptide Sequence Number=SeqID_12134
  Probeset Number=SeqID_19909
atgcggtcaaatgcgagcgatagctcatccagataagcctgccccttgtgcgtcaatgccagcgcatgaccacgccggacgaacagctcccggcccagccattgttccagcgcccgcacctggtggctgatggccgcctgcgttacgcacagctcggccgccgcgcgcgtgaaactcaggtgacgcgcagcggcttcaaaggcgcgcaaggcgccgagcggaggcaagcgtcgcatgaactcgattagcctgagttatcgaaggcatgagaatagatcgttttgccagcctcggtaagccccgtttaatggcggcttcgccggtgctcagcccaatacgcgcgccggtccacggccagccaaggagcggcaatgacgggatgggaagtctggatggcgtttgtcgggtatgcggtgcccatgatcatcagccccgggccgggcaatacgctgctggccaccgcgggtggccgctacggcttgcgggggtccgtgcccttctgggtcggattcgaagccgcgaacctggcgctgtgcgcgctttacggcctgggcctgggcggcgccctgcatgagcatccgcagatccacgtcgtgctgaagtggatgggcgtcctctacctgctttatctggcctggggcttctttcgtgcatcggccagacccgcaagccaggccgccgacacccggccgctcggcttc

SEQ ID NO: 5507 - DNA, 969 bp, Zea mays
  misc_feature (684)..(692): n is a, c, g, or t
  misc_feature (694)..(697): n is a, c, g, or t
  misc_feature (700)..(702): n is a, c, g, or t
  misc_feature (707)..(708): n is a, c, g, or t
  misc_feature (732)..(733): n is a, c, g, or t
  misc_feature (751)..(751): n is a, c, g, or t
  misc_feature (753)..(755): n is a, c, g, or t
  misc_feature (760)..(764): n is a, c, g, or t
  misc_feature (779)..(788): n is a, c, g, or t
  misc_feature (793)..(800): n is a, c, g, or t
  misc_feature (802)..(802): n is a, c, g, or t
  misc_feature (804)..(804): n is a, c, g, or t
  misc_feature (806)..(817): n is a, c, g, or t
  misc_feature (821)..(823): n is a, c, g, or t
  misc_feature (828)..(839): n is a, c, g, or t
  misc_feature (841)..(873): n is a, c, g, or t
  misc_feature (875)..(919): n is a, c, g, or t
  misc_feature (924)..(926): n is a, c, g, or t
  misc_feature (929)..(934): n is a, c, g, or t
  misc_feature (936)..(951): n is a, c, g, or t
  misc_feature (955)..(966): n is a, c, g, or t
  misc_feature (968)..(969): n is a, c, g, or t
  Peptide Sequence Number=SeqID_12135
  Probeset Number=SeqID_19910
gcgcaactgcgggtgcacggcattccgggcctgcgcatcgctgacgcgtcagtcatgccacgcattacttcaggcaacacctgctcacccacgctgatgatcgcggaaaaagccgcgcagcttatcctttcgccgaacacaaggagcctcgccccggagaaagaactggtcaccgcaatctgaacagcggcgccgattcggcgccgacagtggaacaacaataaataatcactgtgagggctacccaatgtcagaacacgctcaacccctggacccggcgctcggcgcacgctcgagcaacgacacgcagaaagtcatcttcgcctcctccctcgggacggtgttcgagtggtatgacttcttcctctacggcgccctcgcggcggtgatcagcaagcagttctttgccggggtcaacgacaccacggcgtttatcttcgccctgatggccttcgcggccggctttgtggtgcgcccgttcggcgccctggtgtttggtcggctgggggacatgatcggccgcaagtacaccttcctcgccaccatcatcctgatgggcctggcgaccttctgcgtgggcctgctgcccacctattcaagcatcggcatcgccgcaccgatcatcctcgtggcactgcgcatgctccagggcctggcgctgggcggcgagtacggcggtgcggnnnnnnnnntnnnngannntgcannggcgggcaaacgcggcttccacannagctggattcaatccacngnnnccctnnnnntgttgctgtcgcttnnnnnnnnnnctggnnnnnnnntncntnnnnnnnnnnnnattnnnaaagnnnnnnnnnnnncnnnnnnnnnnnnnnnnnnnnnnnnnnnnnnnnngnnnnnnnnnnnnnnnnnnnnnnnnnnnnnnnnnnnnnnnnnnnnnttccnnnaannnnnnannnnnnnnnnnnnnnncaannnnnnnnnnnnann

SEQ ID NO: 5508 - DNA, 163 bp, Zea mays
  misc_feature (1)..(8): n is a, c, g, or t
  Peptide Sequence Number=SeqID_12136
  Probeset Number=SeqID_19911
nnnnnnnngaatacaccaccggcaacgccgcatcgcccgggcgcaggaagtaaccgtgcaacgaatgcacatgccgcgcctcttcaacggtctggctggccgccgacagcgactggccgagcacttggccgccgaacagctggcgaaagcccaggtcctggct

SEQ ID NO: 5509 - DNA, 163 bp, Zea mays
  misc_feature (156)..(163): n is a, c, g, or t
  Peptide Sequence Number=SeqID_12137
  Probeset Number=SeqID_19912
agccaggacctgggctttcgccagctgttcggcggccaagtgctcggccagtcgctgtcggcggccagccagaccgttgaagaggcgcggcatgtgcattcgttgcacggttacttcctgcgcccgggcgatgcggcgttgccggtggtgtattcnnnnnnnn

SEQ ID NO: 5510 - DNA, 350 bp, Zea mays
  misc_feature (1)..(3): n is a, c, g, or t
  misc_feature (347)..(350): n is a, c, g, or t
  Peptide Sequence Number=SeqID_12138
  Probeset Number=SeqID_19913
nnngacctgcgcgagtgcacgctgatcgtgctgcaactggagatcaatctgccgacggtctactacgccatcgaattcgctcaccgccacggcatcgccgtgctgctcaacccggcgccggcgttggccgggttgagcgctgagcacttggcgcagctggatttcctggtccccaacgaatccgaactggcgttgattaccggcaaaaccgtggactcgccggactcggcccgcgctgccgcacgaaccctggtggccagcggcattcgccacgtgattgtcaccctcggcgaacacggtgcgttgtacgtgggcgaggagggtgaattcgaggtgccgggccagcnnnn

SEQ ID NO: 5511 - DNA, 906 bp, Zea mays
  misc_feature (1)..(3): n is a, c, g, or t
  misc_feature (649)..(651): n is a, c, g, or t
  misc_feature (675)..(675): n is a, c, g, or t
  misc_feature (677)..(679): n is a, c, g, or t
  misc_feature (682)..(696): n is a, c, g, or t
  misc_feature (704)..(713): n is a, c, g, or t
  misc_feature (716)..(727): n is a, c, g, or t
  misc_feature (729)..(734): n is a, c, g, or t
  misc_feature (737)..(739): n is a, c, g, or t
  misc_feature (741)..(773): n is a, c, g, or t
  misc_feature (775)..(828): n is a, c, g, or t
  misc_feature (833)..(837): n is a, c, g, or t
  misc_feature (839)..(883): n is a, c, g, or t
  misc_feature (888)..(901): n is a, c, g, or t
  misc_feature (905)..(906): n is a, c, g, or t
  Peptide Sequence Number=SeqID_12139
  Probeset Number=SeqID_19914
nnnggtcagcagggttggctcagtgtgtcgcctggggccggggattggcttgaggtaacggtggacttccccaacccggctgcgttgccggaaattgagcggcggttgcggaacatgtttgatctgtcggctgacccgaagcggatcaaccggcaattggcgaatgatcccttgatggcgagcttggtggcagcgcgtcctggtctgcgggtgcctggaacctgggatggattggagttggcgatccgcgcggtgttgggccagcagattaccgtggtagcggcgatcaagttggcgggcaagctggtggcgcagtacggcacgccgctggtgacgccccatgccggtgtgacccacgtgtttccatccgccgaggtgctggcagcagcagatttggcgaccctcggcatgccgaaaagtcgcgggcgcaccttgtcgggtgtggcccaggccttactggatgacccgcaggtattccagccgaaggcgagcctgaaggagggtgtggcgcggttggtggcattaccggggattggagactggacggcgcagtacatcgccatgcgccagatgcgcgagcaggatgcgtttgcctcgggggatatcggcttgatcaatgcgttggtggcgctggaaggcgggccggtgnnnccacgccagttgctggcgcgggcngnnnccnnnnnnnnnnnnnnngcctatgnnnnnnnnnnttnnnnnnnnnnnntnnnnnnggnnngnnnnnnnnnnnnnnnnnnnnnnnnnnnnnnnnntnnnnnnnnnnnnnnnnnnnnnnnnnnnnnnnnnnnnnnnnnnnnnnnnnnnnnntttannnnngnnnnnnnnnnnnnnnnnnnnnnnnnnnnnnnnnnnnnnnnnnnnnttttnnnnnnnnnnnnnnactnn

SEQ ID NO: 5512 - DNA, 1120 bp, Zea mays
  misc_feature (1)..(223): n is a, c, g, or t
  misc_feature (227)..(229): n is a, c, g, or t
  misc_feature (235)..(248): n is a, c, g, or t
  misc_feature (250)..(251): n is a, c, g, or t
  misc_feature (253)..(257): n is a, c, g, or t
  misc_feature (264)..(265): n is a, c, g, or t
  misc_feature (278)..(284): n is a, c, g, or t
  misc_feature (291)..(291): n is a, c, g, or t
  misc_feature (293)..(293): n is a, c, g, or t
  misc_feature (305)..(307): n is a, c, g, or t
  misc_feature (1116)..(1120): n is a, c, g, or t
  Peptide Sequence Number=SeqID_12140
  Probeset Number=SeqID_19915
nnnnnnnnnnnnnnnnnnnnnnnnnnnnnnnnnnnnnnnnnnnnnnnnnnnnnnnnnnnnnnnnnnnnnnnnnnnnnnnnnnnnnnnnnnnnnnnnnnnnnnnnnnnnnnnnnnnnnnnnnnnnnnnnnnnnnnnnnnnnnnnnnnnnnnnnnnnnnnnnnnnnnnnnnnnnnnnnnnnnnnnnnnnnnnnnnnnnnnnnnnnnnnnnnnnnnnnnnnnnnnngccnnnctccannnnnnnnnnnnnnanntnnnnngcgaagnngctcaacagctcnnnnnnnagccagncngcgcgcagcaannnctgacattgggtgcaatacgtgatgacaatctcgggtttggcccgctgacatgaattgactggctcctgcttggcgggttgaaaggatcgagtggctataataccggcctttatcgtcctgccttgagattgatgatgcgccgcctgttgtcctgccttttgttgtgcctgctccctgtcctcgtccaagccgtcgaaaacccgcgcccgaagatcggcctggtgctctccggcggtgccgcccgtggcctggcgcacattggcgtgctcaaggctcttgaggagcaaggcatccacatcgatgcgatcgccggcaccagcatgggcgcagtgatcggcgggctgtatgcctcgggctacaagatcgatgagctggagaaactcgcgttgagcatcgattggaggctcgccctgtccgacgcgccgccacgggaagatgtaccgttccggcgcaagcaggatgaccgggatttcctggtcaaacagaaactcagcttccgcgacgacggcagcctgggcctgccactgggggtgatccagggtcagaacctggccttgctgctggaaagcatgtttgcccacaccagtaacgtacgggatttcgacaagctgcccatccccttccgcgccgtcgccaccgacatcaccagtggtgaaaaggtggtgttccgcaaaggccacctgccccaggtgatccgcgccagcatgtcgatcccggcagtgtttgccccggtagagctggatggacggctgctggtggacgggggcatgaccgataacatcccgctggatgtggcgcgggaaatggnnnnn

SEQ ID NO: 5513 - DNA, 650 bp, Zea mays
  misc_feature (1)..(3): n is a, c, g, or t
  misc_feature (313)..(336): n is a, c, g, or t
  misc_feature (338)..(368): n is a, c, g, or t
  misc_feature (372)..(372): n is a, c, g, or t
  misc_feature (374)..(417): n is a, c, g, or t
  misc_feature (419)..(509): n is a, c, g, or t
  misc_feature (514)..(516): n is a, c, g, or t
  misc_feature (521)..(562): n is a, c, g, or t
  misc_feature (564)..(605): n is a, c, g, or t
  misc_feature (607)..(607): n is a, c, g, or t
  misc_feature (609)..(609): n is a, c, g, or t
  misc_feature (611)..(615): n is a, c, g, or t
  misc_feature (617)..(646): n is a, c, g, or t
  misc_feature (648)..(650): n is a, c, g, or t
  Peptide Sequence Number=SeqID_12141
  Probeset Number=SeqID_19916
nnnataggccaccaccgaggtgtcgtcgctgcccaggggttgcgccatcgtgccgatgccgcggatcgagagatgggtcgagcggccatcgccgagcgcggagtagccgacgttgggcgtcatgcgcagcacgctttcgacgttggcggtgcgcaggtcctgcaattcgccgccgtcgaagacgctgacgctgaccggcacattgatgaggttttccaggcgcttgcgcgcggtgacgtagatgggcggcagttcggcggtggccggcgtgaccgcgaccggcgcggaatcggcggctgcggccggggcggcnnnnnnnnnnnnnnnnnnnnnnnntnnnnnnnnnnnnnnnnnnnnnnnnnnnnnnnccantnnnnnnnnnnnnnnnnnnnnnnnnnnnnnnnnnnnnnnnnnnnntnnnnnnnnnnnnnnnnnnnnnnnnnnnnnnnnnnnnnnnnnnnnnnnnnnnnnnnnnnnnnnnnnnnnnnnnnnnnnnnnnnnnnnnnnnngtcannngtctnnnnnnnnnnnnnnnnnnnnnnnnnnnnnnnnnnnnnnnnnnannnnnnnnnnnnnnnnnnnnnnnnnnnnnnnnnnnnnnnnnncntntnnnnnannnnnnnnnnnnnnnnnnnnnnnnnnnnnncnnn

SEQ ID NO: 5514 - DNA, 650 bp, Zea mays
  misc_feature (1)..(3): n is a, c, g, or t
  misc_feature (5)..(34): n is a, c, g, or t
  misc_feature (36)..(40): n is a, c, g, or t
  misc_feature (42)..(42): n is a, c, g, or t
  misc_feature (44)..(44): n is a, c, g, or t
  misc_feature (46)..(87): n is a, c, g, or t
  misc_feature (89)..(130): n is a, c, g, or t
  misc_feature (135)..(137): n is a, c, g, or t
  misc_feature (142)..(232): n is a, c, g, or t
  misc_feature (234)..(277): n is a, c, g, or t
  misc_feature (279)..(279): n is a, c, g, or t
  misc_feature (283)..(313): n is a, c, g, or t
  misc_feature (315)..(338): n is a, c, g, or t
  misc_feature (648)..(650): n is a, c, g, or t
  Peptide Sequence Number=SeqID_12142
  Probeset Number=SeqID_19917
nnngnnnnnnnnnnnnnnnnnnnnnnnnnnnnnntnnnnnanangnnnnnnnnnnnnnnnnnnnnnnnnnnnnnnnnnnnnnnnnnntnnnnnnnnnnnnnnnnnnnnnnnnnnnnnnnnnnnnnnnnnnagacnnntgacnnnnnnnnnnnnnnnnnnnnnnnnnnnnnnnnnnnnnnnnnnnnnnnnnnnnnnnnnnnnnnnnnnnnnnnnnnnnnnnnnnnnnnnnnnnannnnnnnnnnnnnnnnnnnnnnnnnnnnnnnnnnnnnnnnnnnnantggnnnnnnnnnnnnnnnnnnnnnnnnnnnnnnnannnnnnnnnnnnnnnnnnnnnnnngccgccccggccgcagccgccgattccgcgccggtcgcggtcacgccggccaccgccgaactgccgcccatctacgtcaccgcgcgcaagcgcctggaaaacctcatcaatgtgccggtcagcgtcagcgtcttcgacggcggcgaattgcaggacctgcgcaccgccaacgtcgaaagcgtgctgcgcatgacgcccaacgtcggctactccgcgctcggcgatggccgctcgacccatctctcgatccgcggcatcggcacgatggcgcaacccctgggcagcgacgacacctcggtggtggcctatnnn

SEQ ID NO: 5515 - DNA, 911 bp, Zea mays
  misc_feature (1)..(107): n is a, c, g, or t
  misc_feature (114)..(115): n is a, c, g, or t
  misc_feature (119)..(124): n is a, c, g, or t
  misc_feature (174)..(174): n is a, c, g, or t
  misc_feature (909)..(911): n is a, c, g, or t
  Peptide Sequence Number=SeqID_12143
  Probeset Number=SeqID_19918
nnnnnnnnnnnnnnnnnnnnnnnnnnnnnnnnnnnnnnnnnnnnnnnnnnnnnnnnnnnnnnnnnnnnnnnnnnnnnnnnnnnnnnnnnnnnnnnnnnnnnnnnnnncgcccanngtcnnnnnncatcggccgcaacggtttgccggtcgccagcggccataccgacgccgaangtcacgcgcacttcgccaagctggatgaattgcgccgtgagaaaacgccgttgatgtatgtggtcagtcgcggcaatgaccaatccttcctgccgattgcgcgtcagtcgcagcagctggatttgtcgcgctttgatgtaggcggcctggaagaagacggtgcgatcaatcgcctcagcgcctacctgtttaccgaccgtggcctgtaccggcccggcgagaccgcgcacttggccatgatcgtgcgcagcggcgactggaaaggcgccctgcaaggcctgccggttgagctgcagatcaccgacccacgtggtcttgaggtgattcgccagccattgaaactgtcggccagcggctttgagacttttgatttcccaagcagcgaagtcgcgccatccggcgattacaccgcgaccctgcaactgatcggcgagaagcagcgccgcactgacctgggcagcgtcagcttcaaggtccgcgactttgaaccggaccggatgaaagtcagcctgagcttgcacgatacaccggtgctgggctggatcccgccggaccaagtggtggccaaagtcaccgcgatgcacttgttcggcgctccggcggcgggccgtcgcgtcacggcaaaaatgtccctgagccccacgctcgcggcctttgatcgctacccggattaccgcttccgcctgaatgactcactggaggaagccagctccgaagacctggccgaaaccaccnnn

SEQ ID NO: 5516 - DNA, 884 bp, Zea mays
  misc_feature (1)..(1): n is a, c, g, or t
  misc_feature (829)..(829): n is a, c, g, or t
  misc_feature (831)..(832): n is a, c, g, or t
  misc_feature (840)..(840): n is a, c, g, or t
  misc_feature (842)..(842): n is a, c, g, or t
  misc_feature (874)..(874): n is a, c, g, or t
  misc_feature (877)..(879): n is a, c, g, or t
  misc_feature (883)..(884): n is a, c, g, or t
  Peptide Sequence Number=SeqID_12144
  Probeset Number=SeqID_19919
ntggaactcgacttgagctcggttgaatagcaccgtctgccggcaagccgccgcgagttccctgatcgggccttggagctcagcaagccgttgactgatcgcttccgggctatcgtacccatcgagagcgtccatcagctcaatgaactggtcgtcgatcgatttgcgtccgatctcggcgtcccattcggccacccgctcggagcaacaactgcagacgccctcgccacggctgtaatccacccgcagccagtaacagggcccatcctctgaaacgcaggcgcacatatcagtgcacccgcaaccgatacactcagcaatcatgggcaccccctcagctcatcttcacaggcacggttaaagccggcctgccactcttccgccaactttgttccagccggatacgggttatcgtccagattctttccgtcacgaaacgcctggttgcccagctgccaggcagcgcctgcagcgggctgctcagtagtcattcaacgtgccctcggcctgggtctgctcgatcaaccgcacgagctcggtttcaccctgaacgcgaacaacctccgcgagatgtcgctcagcagcggagatcaagcggcgcttcgctttcatgtgcagcaggccgcactgccgacctgtcttgaactcggaaatgacgtaggcgacgtgctccagaggcgcaacagggggatgaatggcgaaacggaacgaccgccctgctatcgggtagtcgaatgcgcgaaccacgcgaacttcactgaagatgagcccgcgcccgttcgagcggggtacaagcatggtcgcttgaactgactttccgaccacgacngnntccgaagncntaaccaagtaataacaatgttattacttggtnatnnnctgnn

SEQ ID NO: 5517 - DNA, 884 bp, Zea mays
  misc_feature (1)..(2): n is a, c, g, or t
  misc_feature (6)..(8): n is a, c, g, or t
  misc_feature (11)..(11): n is a, c, g, or t
  misc_feature (43)..(43): n is a, c, g, or t
  misc_feature (45)..(45): n is a, c, g, or t
  misc_feature (53)..(54): n is a, c, g, or t
  misc_feature (56)..(56): n is a, c, g, or t
  misc_feature (884)..(884): n is a, c, g, or t
  Peptide Sequence Number=SeqID_12145
  Probeset Number=SeqID_19920
nncagnnnatnaccaagtaataacattgttattacttggttangncttcgganncngtcgtggtcggaaagtcagttcaagcgaccatgcttgtaccccgctcgaacgggcgcgggctcatcttcagtgaagttcgcgtggttcgcgcattcgactacccgatagcagggcggtcgttccgtttcgccattcatccccctgttgcgcctctggagcacgtcgcctacgtcatttccgagttcaagacaggtcggcagtgcggcctgctgcacatgaaagcgaagcgccgcttgatctccgctgctgagcgacatctcgcggaggttgttcgcgttcagggtgaaaccgagctcgtgcggttgatcgagcagacccaggccgagggcacgttgaatgactactgagcagcccgctgcaggcgctgcctggcagctgggcaaccaggcgtttcgtgacggaaagaatctggacgataacccgtatccggctggaacaaagttggcggaagagtggcaggccggctttaaccgtgcctgtgaagatgagctgagggggtgcccatgattgctgagtgtatcggttgcgggtgcactgatatgtgcgcctgcgtttcagaggatgggccctgttactggctgcgggtggattacagccgtggcgagggcgtctgcagttgttgctccgagcgggtggccgaatgggacgccgagatcggacgcaaatcgatcgacgaccagttcattgagctgatggacgctctcgatgggtacgatagcccggaagcgatcagtcaacggcttgctgagctccaaggcccgatcagggaactcgcggcggcttgccggcagacggtgctattcaaccgagctcaagtcgagttccan

SEQ ID NO: 5518 - DNA, 597 bp, Zea mays
  misc_feature (1)..(1): n is a, c, g, or t
  misc_feature (596)..(597): n is a, c, g, or t
  Peptide Sequence Number=SeqID_12146
  Probeset Number=SeqID_19921
nctgcatccatcgccgtcgctgaagtgcgcgccctgagcaccgagatttccctggccgccggcagcaccctgttcgaactcgcgggcagccaggccaccctcgccgaacacggtctggaccgccactggcgcaacgctcgggtgcacaccctgcacgacccggtgcgctggaagtaccacgcggtgggcaattactacctcaacgatgaaaacccgccactgcgggggactatctgatggcaaagaaaaagatcctgctcaatgccttcaacatgaactgcatcgggcacatcaaccatggcctgtggacccatccacgggacacttcgactcaatacaagaccctcgaatactggaccgaactggcacagctgctggagcgcggactgttcgacgggctgttcatcgccgacatcgtcggcgtgtacgacgtctaccagaattcggtggatgtgccgctcaaagagtctatccagctgccggtcaacgacccgttgctgctggtctcggccatggcggcggtgaccaaaaacctcggcttcggcctgaccgccaacctcacctacgaaccgccgtatctgttcgcccggcgcatnn

SEQ ID NO: 5519 - DNA, 831 bp, Zea mays
  misc_feature (1)..(5): n is a, c, g, or t
  misc_feature (12)..(12): n is a, c, g, or t
  misc_feature (14)..(22): n is a, c, g, or t
  misc_feature (27)..(32): n is a, c, g, or t
  misc_feature (35)..(38): n is a, c, g, or t
  misc_feature (41)..(45): n is a, c, g, or t
  misc_feature (47)..(58): n is a, c, g, or t
  misc_feature (60)..(67): n is a, c, g, or t
  misc_feature (69)..(69): n is a, c, g, or t
  misc_feature (75)..(75): n is a, c, g, or t
  misc_feature (78)..(80): n is a, c, g, or t
  misc_feature (83)..(87): n is a, c, g, or t
  misc_feature (89)..(96): n is a, c, g, or t
  misc_feature (99)..(107): n is a, c, g, or t
  misc_feature (110)..(113): n is a, c, g, or t
  misc_feature (115)..(115): n is a, c, g, or t
  misc_feature (117)..(117): n is a, c, g, or t
  misc_feature (119)..(120): n is a, c, g, or t
  misc_feature (134)..(134): n is a, c, g, or t
  misc_feature (136)..(137): n is a, c, g, or t
  misc_feature (142)..(143): n is a, c, g, or t
  misc_feature (151)..(153): n is a, c, g, or t
  misc_feature (829)..(831): n is a, c, g, or t
  Peptide Sequence Number=SeqID_12147
  Probeset Number=SeqID_19922
nnnnntaccaangnnnnnnnnnaaaannnnnnccnnnnccnnnnncnnnnnnnnnnnnannnnnnnngncatggnttnnnccnnnnnannnnnnnnatnnnnnnnnntannnncncngnngccaaaagtctctngnnatgtnntgcaaaannntgatgctcgacggcgccaacaagtcgttcaaccgcatcaccatcgacggcgatacctcgaccaacgactgctgcatgttgatcgccaccggccaggccgacctgccggaaatcacctcgtccaacggcgcgtatttcgcagccttgaagcaggcggtgttcgaagtgtgcatggacgtggcccaagccattgtgcgtgatggcgaaggcgccaccaagtttgtgacggttgaagtcaacggcggcggcaaccatcaggaatgcctggacgtcggctacaccgtggcccactcgccgctgatcaagactgcactgtttgcctccgacccaaactggggccgtatcctggccgctgtggggcgtgccggtgtgccgaacctggacgtgagcaagatcgatgtgttcctcggcgaggtgtgcatcgccagccgtggcgcccgggccgagacgtacaccgaagcccagggttctgcggtgatgcagcaggaagaaatcaccatccgtatcgaattgggccgcggtgagtgcagcgaaaccatctggaccaccgacctgtcccacgagtacgtgaagatcaacgcggaataccgcacctgataccaggcaggtcttcaaaccgattcagaggaaatagtgcggtgaaacgagttcatgtagcagcagcggtcatccggggnnn

SEQ ID NO: 5520 - DNA, 348 bp, Zea mays
  misc_feature (1)..(5): n is a, c, g, or t
  Peptide Sequence Number=SeqID_12148
  Probeset Number=SeqID_19923
nnnnnctatcagcgctttcgtgcctggcgcaattgggggacgttctaccagatgtttgagcggcttcacatctggttgaacgagctagggttaatcggtctggagacctggatgattgactccacgacggtacgcgcaacccgggcgtcttctggtgccgggaaaaaagggggcctgaagaaccgcaaaaccatgcactcggacgtagccggggcggcctggcgaccaagatccacatgttgtgcgatgccaatggcgtaccgttaaactttctactgtcaggtgggcaagccagcgacatcacctatgcgcaaccgctgctggataacgcttacatcccgcgtttgc

SEQ ID NO: 5521 - DNA, 348 bp, Zea mays
  misc_feature (344)..(348): n is a, c, g, or t
  Peptide Sequence Number=SeqID_12149
  Probeset Number=SeqID_19924
gcaaacgcgggatgtaagcgttatccagcagcggttgcgcataggtgatgtcgctggcttgcccacctgacagtagaaagtttaacggtacgccattggcatcgcacaacatgtggatcttggtcgccaggccgccccggctacgtccgagtgcatggttttgcggttcttcaggcccccttttttcccggcaccagaagacgcccgggttgcgcgtaccgtcgtggagtcaatcatccaggtctccagaccgattaaccctagctcgttcaaccagatgtgaagccgctcaaacatctggtagaacgtcccccaattgcgccaggcacgaaagcgctgatagnnnnn

SEQ ID NO: 5522 - DNA, 978 bp, Zea mays
  misc_feature (1)..(2): n is a, c, g, or t
  misc_feature (825)..(829): n is a, c, g, or t
  misc_feature (881)..(882): n is a, c, g, or t
  misc_feature (904)..(912): n is a, c, g, or t
  misc_feature (914)..(918): n is a, c, g, or t
  misc_feature (923)..(938): n is a, c, g, or t
  misc_feature (940)..(947): n is a, c, g, or t
  misc_feature (952)..(955): n is a, c, g, or t
  misc_feature (958)..(968): n is a, c, g, or t
  misc_feature (971)..(976): n is a, c, g, or t
  misc_feature (978)..(978): n is a, c, g, or t
  Peptide Sequence Number=SeqID_12150
  Probeset Number=SeqID_19925
nnaccgcgctgggattcggcatgagtgctcgggagatggacctggattaccagccgttccccctgagcaccctctatgaccctgaacatcccggtggcacggcgttcctgtcattcgtcaacgcatggatcgaactggccggcatgctcaacgaactgtcccgcagcatgggccagccggatttctatccgttcgtcctgccgccggcggtgattgccaagctgcacttcattcacctggtgatccagcaagagggcggcagggcggacgaggtgttgcaggcccagtaggcaagtgcttgaagcccttcatattttaatcccgcaggaacggttgtaacttccgatgagatcggtacaatggccccgcttgccgagaggcgagcgtcgttatggtgatcccatcggtccccccgcaacgattacccgtgaacctggtcagagccggaaggcagcagccacagcgggaacattgtgtgccggggtgtggctggtggggttgcctccataacgccacctccttgattcaaaaaaatacttttatgaagcccttcgctgacaatcgtcatctgcgaagcgatttctgctgttcgtccttcagcacagtgctcacaagcccgaaagcaatcgttaccggcaaaagactgtgagggctctttcacaacttcaagcttccactctggacaacccaaaaccaccttgctagtttgcgccagtcacatatttcaaaatatgtcgatggcacatggatgatattaaagtgatggcgctttatggctcattcacctcaactaaacaaggatgtcggtcatgaaaagcctgcaannnnngcccacgcttatcagcgcttccgtcggtgcccccggcaaagcccgcaacctnncccgccgacgttcagtgcatcnnnnnnnnngnnnnnctttnnnnnnnnnnnnnnnngnnnnnnnnccttnnnncannnnnnnnnnnggnnnnnngn

SEQ ID NO: 5523 - DNA, 607 bp, Zea mays
  misc_feature (1)..(6): n is a, c, g, or t
  misc_feature (511)..(512): n is a, c, g, or t
  misc_feature (529)..(531): n is a, c, g, or t
  misc_feature (539)..(541): n is a, c, g, or t
  misc_feature (543)..(543): n is a, c, g, or t
  misc_feature (550)..(551): n is a, c, g, or t
  misc_feature (561)..(574): n is a, c, g, or t
  misc_feature (576)..(598): n is a, c, g, or t
  misc_feature (600)..(601): n is a, c, g, or t
  misc_feature (605)..(607): n is a, c, g, or t
  Peptide Sequence Number=SeqID_12151
  Probeset Number=SeqID_19926
nnnnnnagcgaaatcaccgccgatcaaaaagagcagttcctcctgaacaacccggcgctgcaatcggtggacgcgatcaagaaccagcgttttatcgtgatcccctacgtgcaagccacgccgggcatcgacaacgtgctggcggttgaaaccctggccaaggggttccacggcgaatgattacccgtcgctacgccctgctgctgagtgcccttggcgcgttgttgctgatctcatgcgtggtctcgctggggttcggctcggcgcgggtgccggtggacgtggtgtggcggatcttgctgcataaagccttcggcatgggcgaggtggactggagcgccgggcaggaacatatcgtgtggctgatccgcgtaccgcgcatgttgctcggtgccctggtgggcgccgggctggcgttgattggtgcggtgttgcaggcggtgacgcgcaacccgctggcggatccgcacctgctgggcgtgacctccggcgccaccctcggcgcggtganngtggtgttgcatgtggnnnaagtgatnnngntgctgannctgcccatcnnnnnnnnnnnnnngnnnnnnnnnnnnnnnnnnnnnnncnntggnnn

SEQ ID NO: 5524 - DNA, 894 bp, Zea mays
  misc_feature (1)..(12): n is a, c, g, or t
  misc_feature (15)..(15): n is a, c, g, or t
  misc_feature (17)..(33): n is a, c, g, or t
  misc_feature (38)..(38): n is a, c, g, or t
  misc_feature (40)..(42): n is a, c, g, or t
  misc_feature (45)..(49): n is a, c, g, or t
  misc_feature (51)..(73): n is a, c, g, or t
  misc_feature (76)..(86): n is a, c, g, or t
  misc_feature (91)..(92): n is a, c, g, or t
  misc_feature (94)..(94): n is a, c, g, or t
  misc_feature (98)..(101): n is a, c, g, or t
  misc_feature (103)..(107): n is a, c, g, or t
  misc_feature (110)..(122): n is a, c, g, or t
  misc_feature (131)..(147): n is a, c, g, or t
  misc_feature (150)..(150): n is a, c, g, or t
  misc_feature (155)..(157): n is a, c, g, or t
  misc_feature (161)..(164): n is a, c, g, or t
  misc_feature (170)..(172): n is a, c, g, or t
  misc_feature (175)..(177): n is a, c, g, or t
  misc_feature (179)..(179): n is a, c, g, or t
  misc_feature (183)..(189): n is a, c, g, or t
  misc_feature (194)..(194): n is a, c, g, or t
  misc_feature (196)..(196): n is a, c, g, or t
  misc_feature (198)..(200): n is a, c, g, or t
  misc_feature (205)..(205): n is a, c, g, or t
  misc_feature (209)..(213): n is a, c, g, or t
  misc_feature (891)..(894): n is a, c, g, or t
  Peptide Sequence Number=SeqID_12152
  Probeset Number=SeqID_19927
nnnnnnnnnnnnctncnnnnnnnnnnnnnnnnngcggngnnnttnnnnncnnnnnnnnnnnnnnnnnnnnnnnggnnnnnnnnnnnggaanntntacnnnntnnnnnggnnnnnnnnnnnnnggccttggnnnnnnnnnnnnnnnnnggnattcnnngccnnnnggtgtnnntcnnncngcannnnnnncatgngncnnnccgcnatgnnnnncgcaaggtcgcggccatctgccagaccgtacaggcgttgatcgcgctgtccctggcaatcggcggactgaccggcaacgtcacccgcgaaatgatttttatcttggcgttcctgctaggcgcggcgcgttcgtttgaaatgcccaccacccaggccctgctgccgagcatcgtgcccactgcgctgtttccccgcgccgtggcgtcgtcgcaatcggcacagcaattggccaccatcgtggcgccggcactgggcggtttgttatacgccttcggcagtgtctgggtgtacggccctacggtggtgctgtacctgattgcctgcgtgctgaccctgaacctgcccgcacgccagacgcccttgaacaaggccaaggcgaccatggattcgctgctggccgggattcgttttatccgcagccggccggacatcctcggggcgatttccctggacctgtttgccgtactgctgggcggcgccacggcgttgctgccggtgtttgccaaggacatcctgctgaccgggccgtgggggctcgggctgctgcggtcggcgccggcagtcggggcgttgctgatgtcgttgtggctggcgcggtttgccgtagaccggcacgtcgggcggatcatgtttacggcggttggggtgtttggcgtggccaccatcgcgttcggcctnnnn

SEQ ID NO: 5525 - DNA, 187 bp, Zea mays
  misc_feature (1)..(3): n is a, c, g, or t
  Peptide Sequence Number=SeqID_12153
  Probeset Number=SeqID_19928
nnntttgtcggccatggaatgggtcaacctgttcgccctcgccgtcaacgaagaaaacgctgccggtggtcgcatggtcaccgcgccgaccaatggcgcagcgggaatcatcccggcggtgctgcactactacatgaagttcaacccggacgcgtccgacgatgacgtggtgaatttcttcctcgcc

SEQ ID NO: 5526 - DNA, 187 bp, Zea mays
  misc_feature (185)..(187): n is a, c, g, or t
  Peptide Sequence Number=SeqID_12154
  Probeset Number=SeqID_19929
ggcgaggaagaaattcaccacgtcatcgtcggacgcgtccgggttgaacttcatgtagtagtgcagcaccgccgggatgattcccgctgcgccattggtcggcgcggtgaccatgcgaccaccggcagcgttttcttcgttgacggcgagggcgaacaggttgacccattccatggccgacaaannn

SEQ ID NO: 5527 - DNA, 849 bp, Zea mays
  misc_feature (1)..(8): n is a, c, g, or t
  misc_feature (765)..(768): n is a, c, g, or t
  misc_feature (790)..(791): n is a, c, g, or t
  misc_feature (802)..(849): n is a, c, g, or t
  Peptide Sequence Number=SeqID_12155
  Probeset Number=SeqID_19930
nnnnnnnngtctacatgccgggcgacaagatcccgatgcagcccgacaacgtcatcaaggcgttctcgctggacgcgggccgcgaggtgccggtgctgtcgctgtacgtgacggccaacccggaaaccggcgaggtcatcgaatccgacacgcgcctggagcgcgtggtggtgcgcgagaacctgcgccacaacatgctcgacgcccaagtcacggaagagagcctgaacgacacgtccaccgacatgccctacggccactggctgcgcccgctgtggaagctggcgcaggcgctgtcggcgcagcgcgagaacgtgcgcggcaagcccgagaacaactcgcgggtggagtacagcttctacctggacggcgaccccgacgatcccgacaccccggtgcgcctggtgccgcgccagcgcaacgcgccgctggaccggatggtggccgagtacatgatcctggccaacaacctgtggggcggcctgctgaaccagcacggcgtgcccggcatctaccgctcgcaacaggccggccgcgtgcgcatgagcacgcaggcgctgccgcacgaggccatcggcgtgccgcaatacgcctggagcacgtcgccgctgcgccgctacgtggacctggtgaaccagtggcagctgatcgccgcggtggaacacggcgtctcggcgcgcctggtggcccccttcaagccgcgcgacgcggacctgttcgcgatcatcggcgcgttcgacgcgcagtacgcggcctgggccgagnnnnagagcgcgatggagcgctactnntgcctgcgctnnnnnnnnnnnnnnnnnnnnnnnnnnnnnnnnnnnnnnnnnnnnnnnn

SEQ ID NO: 5528 - DNA, 966 bp, Zea mays
  misc_feature (1)..(2): n is a, c, g, or t
  misc_feature (698)..(698): n is a, c, g, or t
  misc_feature (701)..(703): n is a, c, g, or t
  misc_feature (705)..(705): n is a, c, g, or t
  misc_feature (709)..(713): n is a, c, g, or t
  misc_feature (737)..(745): n is a, c, g, or t
  misc_feature (753)..(755): n is a, c, g, or t
  misc_feature (759)..(798): n is a, c, g, or t
  misc_feature (803)..(816): n is a, c, g, or t
  misc_feature (818)..(860): n is a, c, g, or t
  misc_feature (862)..(885): n is a, c, g, or t
  misc_feature (888)..(890): n is a, c, g, or t
  misc_feature (895)..(898): n is a, c, g, or t
  misc_feature (900)..(910): n is a, c, g, or t
  misc_feature (913)..(945): n is a, c, g, or t
  misc_feature (947)..(962): n is a, c, g, or t
  Peptide Sequence Number=SeqID_12156
  Probeset Number=SeqID_19931
nntcgcggcaaaggaagtcggcgtggaaagcagcctgctgtcgccggcggaggtgatcaacctgatcagcgaggaaggctacagcgtcaagctcgcctgactttctgatagttagcgagctaacttaatgttcaaggcacccatgcccggctagactgtcgggctgccgactcacctgggtgcctgatgaaccttcgtataatcctgattttgggggccttgagcgcgttcgcgccgttggccatcgacttctacctgccgggttttccggccatggccgtggcattcggtaccgacgaaaaacacattcagctgaccttggccgtgtacttcacgggcctggcaatcggccagttgatctatgggccgctggcggaccgctttggccgacgcgggccgctgctcagcggtgtcaccctgtttaccctggcgtcgttcgcgtgtgcgtacgccccttccctggagtggctgatcggcgcgcgtttcgtccaggccttgggcggctgcgcgggcatggtgatctcccgggcggtggtcagcgataaatgcgacgcggtgggctcggccaaggtgttttcccaattgatgctggtcaccgggctggccccgatcctcgcgccgttggcgggcggggtgatggtcggtatctggggctggcagtcgatattcctggcgctgacggcattcagcgtgatggnggnnntncgcnnnnncggtcgggctgccggaaagtttcnnnnnnnnncaaccgcnnnagcnnnnnnnnnnnnnnnnnnnnnnnnnnnnnnnnnnnnnnnngccgnnnnnnnnnnnnnntnnnnnnnnnnnnnnnnnnnnnnnnnnnnnnnnnnnnnnnnnnntnnnnnnnnnnnnnnnnnnnnnnnntcnnntttannnnannnnnnnnnnnggnnnnnnnnnnnnnnnnnnnnnnnnnnnnnnnnncnnnnnnnnnnnnnnnntttt

SEQ ID NO: 5529 - DNA, 718 bp, Zea mays
  misc_feature (1)..(1): n is a, c, g, or t
  misc_feature (14)..(16): n is a, c, g, or t
  misc_feature (710)..(718): n is a, c, g, or t
  Peptide Sequence Number=SeqID_12157
  Probeset Number=SeqID_19932
ngcgtgctgatcgnnnacgagccggtgtcggcgctggacgtctcggtgcaggcgcaggtgctggcgctgctggcgcgcctgcgcgagcaactgggcctgtcgatcctgttcatcacccatgacctgcgggtcgcggcgcaggtgtgcgaccacgttgcggtcatgaaggacggcaaggtggtggaggaggggccgtgcgccgaggtcttcggccagccctcgcatccctatacccaggcattgctggcggcggtgccgggccggggttgggatccggccgaggccgccgcgcggcgggcggcctagcggcctggcggctttggccaggcgcggcattcgcggtataaccgactgatgccgtgccgcgtttcgcgcgccccgcgcgagtcgcgcccatcccggcgggagagcatccatggccgacatcgtccaattgcgtccggagggcctgtactgcgccgcgggcgggttctacatcgacccctggtgccccgtggacgtggccgtcctcacgcatggccatggcgaccacgcccgcgtcggcatgggttgctaccacaccagtgccgagggcctgcccatcctgcaatggcgactgcgtgagcaggactaccgcgtccacgcctatggcgagccgttcacgctgggccgggcgcgcgtttcgctgcattccgcgggccacgtgctgggctccgcgcaagtacgcatcnnnnnnnnn

SEQ ID NO: 5530 - DNA, 186 bp, Zea mays
  misc_feature (1)..(6): n is a, c, g, or t
  Peptide Sequence Number=SeqID_12158
  Probeset Number=SeqID_19933
nnnnnntttccatgttgcgccttggcgaacgccacgaacgcctgcatggactccagatccgtaacgtccagtgcgctcgcacttgccgagccgccttcggcctggatctcgcgcaccagtttgtccagccgctcggtacggcgggcaccgagtaccacctgagcgcctttggcggcgatcaacctc

SEQ ID NO: 5531 - DNA, 186 bp, Zea mays
  misc_feature (181)..(186): n is a, c, g, or t
  Peptide Sequence Number=SeqID_12159
  Probeset Number=SeqID_19934
gaggttgatcgccgccaaaggcgctcaggtggtactcggtgcccgccgtaccgagcggctggacaaactggtgcgcgagatccaggccgaaggcggctcggcaagtgcgagcgcactggacgttacggatctggagtccatgcaggcgttcgtggcgttcgccaaggcgcaacatggaaannnnnn

SEQ ID NO: 5532 - DNA, 967 bp, Zea mays
  misc_feature (1)..(3): n is a, c, g, or t
  misc_feature (840)..(846): n is a, c, g, or t
  misc_feature (854)..(860): n is a, c, g, or t
  misc_feature (862)..(862): n is a, c, g, or t
  misc_feature (873)..(876): n is a, c, g, or t
  misc_feature (886)..(887): n is a, c, g, or t
  misc_feature (893)..(893): n is a, c, g, or t
  misc_feature (897)..(907): n is a, c, g, or t
  misc_feature (910)..(923): n is a, c, g, or t
  misc_feature (925)..(927): n is a, c, g, or t
  misc_feature (929)..(929): n is a, c, g, or t
  misc_feature (931)..(933): n is a, c, g, or t
  misc_feature (935)..(935): n is a, c, g, or t
  misc_feature (941)..(967): n is a, c, g, or t
  Peptide Sequence Number=SeqID_12160
  Probeset Number=SeqID_19935
nnngatccaggtcaactcgattcattcacagggcatcgatcgcctggcgccaggttttcaggtcgaggccaccgcgccggacggcctgatcgaaggcttttcggttcccgcgggcaaggcttttgctttaggagtgcaatggcaccccgaatggcaggtaagctctaacccgcactacctcgcaatcttccaggcatttggcaatgcctgtcgaaagcgggtgatgcaacgcgacgcggatgctgcgtcaacttacgcctgacctttaatggatgtcaggaaacacagcccagaggcatttatgagtaacaacctcgaccagctcaccgattggttgaaagaccacaagatcacagaagtcgaatgcatgattggcgacctcaccggcatcacccggggcaagatctcgccgaccaacaagttcatcgccgaaaaaggcatgcgcctgcccgaaagcgttctgttgcagaccgtgaccggcgactatgtcgaagacgacatctattacgaattgctcgacccggccgacatcgacatgatttgccgcccggacgagaacgcggtgtacctcgtgccctgggccatagagcctacggcccaggtgatccacgacacctacgacaagcaaggcaacccgatcgagctgtcgccgcgcaacgtgctcaagaaagtcctcaagctctacgccgataaaggctggcagcccatcgtggcgccggagatggagttctacctgaccaagcgctgcgaagacccggacttcccgctgcaaccgccgattggccgttccggtcgcccggaaaccggccgccagtccttctctatagaagcagccaacgnnnnnnntccgttgnnnnnnnangtctacgactnnnncgagctgcannagctgnaccnnnnnnnnnnnatnnnnnnnnnnnnnncnnncncnnntngaaaannnnnnnnnnnnnnnnnnnnnnnnnnn

SEQ ID NO: 5533 - DNA, 432 bp, Zea mays
  misc_feature (1)..(6): n is a, c, g, or t
  misc_feature (412)..(426): n is a, c, g, or t
  misc_feature (430)..(432): n is a, c, g, or t
  Peptide Sequence Number=SeqID_12161
  Probeset Number=SeqID_19936
nnnnnntgaggtaggcgacggaaaactctttgccatgcgcggtcaccgactgagcctggaccactttgcggccgaggccgttcgcctcgaacgcgatatcgtccagctcaacatagtggccggcggggaactgaacggccgactggatgacgacctgcggataggtgaattgggtattcagagcaacagtcatggcgatacctctatctgaattggcaaatgttattttctgttattattgcgtattgtcaacggactttcaggctattcccgccctcttccagctcgttgctcatacgctgaactcccgccaacatttgcgcctcggacagcagcgaattcgcaaactggtcttcctgcagctcaaccaggccgtcacgcatttctctacgcagttcacgactgacctgannnnnnnnnnnnnnnggannn

SEQ ID NO: 5534 - DNA, 432 bp, Zea mays
  misc_feature (1)..(3): n is a, c, g, or t
  misc_feature (7)..(21): n is a, c, g, or t
  misc_feature (427)..(432): n is a, c, g, or t
  Probeset Number=SeqID_19937
nnntccnnnnnnnnnnnnnnntcaggtcagtcgtgaactgcgtagagaaatgcgtgacggcctggttgagctgcaggaagaccagtttgcgaattcgctgctgtccgaggcgcaaatgttggcgggagttcagcgtatgagcaacgagctggaagagggcgggaatagcctgaaagtccgttgacaatacgcaataataacagaaaataacatttgccaattcagatagaggtatcgccatgactgttgctctgaatacccaattcacctatccgcaggtcgtcatccagtcggccgttcagttccccgccggccactatgttgagctggacgatatcgcgttcgaggcgaacggcctcggccgcaaagtggtccaggctcagtcggtgaccgcgcatggcaaagagttttccgtcgcctacctcannnnnn

SEQ ID NO: 5535 - DNA, 1023 bp, Zea mays
  misc_feature (1)..(1): n is a, c, g, or t
  misc_feature (616)..(616): n is a, c, g, or t
  misc_feature (755)..(760): n is a, c, g, or t
  misc_feature (829)..(831): n is a, c, g, or t
  misc_feature (837)..(839): n is a, c, g, or t
  misc_feature (863)..(869): n is a, c, g, or t
  misc_feature (873)..(879): n is a, c, g, or t
  misc_feature (881)..(881): n is a, c, g, or t
  misc_feature (889)..(895): n is a, c, g, or t
  misc_feature (897)..(897): n is a, c, g, or t
  misc_feature (905)..(906): n is a, c, g, or t
  misc_feature (908)..(917): n is a, c, g, or t
  misc_feature (919)..(928): n is a, c, g, or t
  misc_feature (937)..(938): n is a, c, g, or t
  misc_feature (944)..(944): n is a, c, g, or t
  misc_feature (947)..(958): n is a, c, g, or t
  misc_feature (960)..(964): n is a, c, g, or t
  misc_feature (967)..(1023): n is a, c, g, or t
  Peptide Sequence Number=SeqID_12162
  Probeset Number=SeqID_19938
ntggacccaactgtccggcggcgccgccgtcaacgatgcgttgctctccggctccatcgacatcgccggcgctggcgtcggcccgctgctgaccatctgggaccgcacccacggcaagcagaacgtgaaagccgtcgcttccctgggcaacttcccttactacctggtgagcaacaatcccaaggtcaagaccattgccgacttcaccgaaaaagaccgcatcgccgtacccgcagtgggcgtctccgtgcagtcgcgcttcctgcaatacgccgcggccaagcagtggggcgacaaggaattcaatcgcctcgacaagtacaccgtcgccgtcccgcacccggacgccacggctgcgttgatcgccggtggtaccgagctgaccgggcacttctccaacccgccgttccaggagcaggccctgaccaacccgaacgtgcacgtggtgctcaattcctacgacatcctcggccccaactcgccgacggtgctgttcgccaccgagaaattccgcaacgacaacccgaaaacctacaaggcgttcgtcgaggcgctgaccgaagcggcccaattcgcccagaacgataaaggcgccgccgccgatacctacattcgngtgacgaaggccaagatcgaccgcgccgaactgctgaaaatcatcgaaaacccgcaattcgaattcagcgtcacaccgaaaaatacctacccgctggcggaattcctctaccgcgtcggcgcgatcaaaaacaaacccnnnnnntggaaggattacttcttccaggacaccaagccgctgcaagggagctgacatgaacgcgcccttgcaagnnnacacgnnnagcaacccgacgaccaccgaagcnnnnnnnttcnnnnnnntnaagtcagnnnnnnntnccgcacanncnnnnnnnnnncnnnnnnnnnnggggggccnncccccnttnnnnnnnnnnnncnnnnngannnnnnnnnnnnnnnnnnnnnnnnnnnnnnnnnnnnnnnnnnnnnnnnnnnnnnnnn

SEQ ID NO: 5536 - DNA, 323 bp, Zea mays
  misc_feature (321)..(323): n is a, c, g, or t
  Peptide Sequence Number=SeqID_12163
  Probeset Number=SeqID_19939
ttgttctggcgggatttgcacgcagtcgccggcttctggggcgcggcgttcctgctggtgatgctgctcagcggcatgacctggaccggcttctggggcaagcaatatgccgaactgtggaataaattcccggcggcgatgtggaacaacgtaccgcagtccgaccagcaggcccgcagcctcaacaccgcgagccaacagaccgtgccgtgggccatggaaaacacgccgatgccgatgtctggcgagcatgccgagcacatgaagcacgccggcatgagccagggcccggcagccccgagtatccgcctgcagcaagtnnn

SEQ ID NO: 5537 - DNA, 1032 bp, Zea mays
  misc_feature (739)..(741): n is a, c, g, or t
  misc_feature (764)..(764): n is a, c, g, or t
  misc_feature (781)..(785): n is a, c, g, or t
  misc_feature (788)..(793): n is a, c, g, or t
  misc_feature (801)..(808): n is a, c, g, or t
  misc_feature (812)..(823): n is a, c, g, or t
  misc_feature (825)..(831): n is a, c, g, or t
  misc_feature (833)..(836): n is a, c, g, or t
  misc_feature (840)..(859): n is a, c, g, or t
  misc_feature (861)..(871): n is a, c, g, or t
  misc_feature (874)..(894): n is a, c, g, or t
  misc_feature (898)..(945): n is a, c, g, or t
  misc_feature (952)..(956): n is a, c, g, or t
  misc_feature (961)..(999): n is a, c, g, or t
  misc_feature (1002)..(1005): n is a, c, g, or t
  misc_feature (1011)..(1026): n is a, c, g, or t
  misc_feature (1031)..(1032): n is a, c, g, or t
  Peptide Sequence Number=SeqID_12164
  Probeset Number=SeqID_19940
gggcggtggtgaaagccgccattgaaggccgggaaatgcagttggaggacgtagtccgcatcgccgacgaagcgtcggaagtgctgcagttcaaccgggcgctactgcaaggcgccatcgaaaacatcacccagggcatcagcgtggtggaccaatccctgcggctggtggcctggaaccggcggtacctggagctgttcaattatcccgaagggttgatcagcgtgggccggccgattgccgacatcattcgctacaacgccgaacgcgggctgtgcggcccgggcgaggccgaagtgcacgtggcgcgccgcctgcactggatgcgccaaggccgtgcgcatacctccgagcggctgttccccaatggcagggtgatcgagctgatcggcaacccgatgccgggcggcgggtttgtcatgagtttcaccgacatcaccgcgttccgcgaagccgagcaggcgttgaccgaggccaacgaaggcctggaacagcgagtgaccgagcgtactcacgaactgtcgcaactcaacgtcgccctgacggatgccaagggtgtcgccgagacggccagccagtcgaaaacccggttccttgcagcggtcagtcacgacttgatgcaaccgttgaacgccgcccggctgttctcggccgccctctcccaccagaacgacggcatgtcgccggatgcccggcaactggtgcagcacctggacagttcgctgcgctcagcggaagnnntgatcagcgacctgctggatatntcacgcctggaaaacgnnnnnatnnnnnngcagcgcnnnnnnnncgtnnnnnnnnnnnngnnnnnnncnnnngggnnnnnnnnnnnnnnnnnnnngnnnnnnnnnnnggnnnnnnnnnnnnnnnnnnnnngggnnnnnnnnnnnnnnnnnnnnnnnnnnnnnnnnnnnnnnnnnnnnnnnnggggggnnnnnaaaannnnnnnnnnnnnnnnnnnnnnnnnnnnnnnnnnnnnnnggnnnncgggtnnnnnnnnnnnnnnnnccccnn

SEQ ID NO: 5538 - DNA, 1126 bp, Zea mays
  misc_feature (1)..(3): n is a, c, g, or t
  misc_feature (856)..(860): n is a, c, g, or t
  misc_feature (862)..(865): n is a, c, g, or t
  misc_feature (867)..(867): n is a, c, g, or t
  misc_feature (869)..(869): n is a, c, g, or t
  misc_feature (871)..(887): n is a, c, g, or t
  misc_feature (890)..(892): n is a, c, g, or t
  misc_feature (898)..(901): n is a, c, g, or t
  misc_feature (904)..(905): n is a, c, g, or t
  misc_feature (907)..(923): n is a, c, g, or t
  misc_feature (925)..(967): n is a, c, g, or t
  misc_feature (969)..(970): n is a, c, g, or t
  misc_feature (976)..(977): n is a, c, g, or t
  misc_feature (979)..(979): n is a, c, g, or t
  misc_feature (983)..(984): n is a, c, g, or t
  misc_feature (987)..(990): n is a, c, g, or t
  misc_feature (995)..(1001): n is a, c, g, or t
  misc_feature (1006)..(1007): n is a, c, g, or t
  misc_feature (1011)..(1018): n is a, c, g, or t
  misc_feature (1021)..(1126): n is a, c, g, or t
  Peptide Sequence Number=SeqID_12165
  Probeset Number=SeqID_19941
nnnaagctggcggccaagctgctgggtgaacgcccgctgacccgcaagaccttcgagcgctacaccacgctgatggggcgtatcccgggtgtgacgttgcaggcacaagtgccgccacccggcaccaccgatggcggcacgcacatgcagatccaggccagccgcaaaccgttcaccaccagcatgagcctggacgaagacaaccgtagcggcacgcaggcgctgctggccgccaccagtaactcccagacctcgatgggcgagcaattgagcctcagtggcctgttcccgccgggcaaggatgatgagcattactaccgcctgggctacagccagttcatcaatgccgaaggcagccagttggtactcaacgctgaacgctaccgcgccgaccccaacagcaacgtacaactggacggtggctttgagctcaagccgcaccaagcgattgaccgctactccatcggcctgtctcaccccttgattgcctcccccacggagtcattgacccttggcacgcgcctttacgcggtggaccaaactacccgctatcaactcgtgggttacccgctgcgcttcgacgtggaaaccgacctgcgagccctcgcgttcgagggcgactggcgcaagtccgacgaccgccagctgcggattctcagcgccgggctctaccagggaatcaacggcctgggggcacgcacccacagcgatatcgaaggcacgcagccggacctggaattcttccgcctgcgtctgtcgggggtgcaaagcaacaagttcttcgaccactggcaaggcgtggcatcgggtgccttctactggagcaacgacaccctgcccgacagcgaacgcgcgnnnnncnnnngncnannnnnnnnnnnnnnnnnatnnngatgannnnggnncnnnnnnnnnnnnnnnnngnnnnnnnnnnnnnnnnnnnnnnnnnnnnnnnnnnnnnnnnnnncnngggggnncnaaanncgnnnnccacnnnnnnnggggnncccnnnnnnnnccnnnnnnnnnnnnnnnnnnnnnnnnnnnnnnnnnnnnnnnnnnnnnnnnnnnnnnnnnnnnnnnnnnnnnnnnnnnnnnnnnnnnnnnnnnnnnnnnnnnnnnnnnn

SEQ ID NO: 5539 - DNA, 889 bp, Zea mays
  misc_feature (1)..(4): n is a, c, g, or t
  misc_feature (788)..(789): n is a, c, g, or t
  misc_feature (791)..(791): n is a, c, g, or t
  misc_feature (827)..(832): n is a, c, g, or t
  misc_feature (842)..(850): n is a, c, g, or t
  misc_feature (862)..(865): n is a, c, g, or t
  misc_feature (870)..(889): n is a, c, g, or t
  Peptide Sequence Number=SeqID_12166
  Probeset Number=SeqID_19942
nnnnggccttcttcgccaagcacagcgtcagcgcgctgctggagcagagcgactactggctggaatatcagggccgcctgaccgagccgatgagctacgacgccgaaaccgaccgttacaagcccatcagctgggaatcggctttcgacctgatcggcaagcacctcaatgcgctgccaaacccggacatggccgagttctatacctcgggccgggccagcaacgaggcggcttacctgtatcaactgttcgtgcgtgcctacggcaccaacaacttcccggactgctcgaacatgtgccacgaagccagcggcgtcgccctggcgcaaagcgtgggcgtgggcaaaggcaccgtaaccttcgatgacttcgagcatgcggacgcgattttcgtctggggccagaaccccggcaccaaccatccacgtatgctcgagccattacgtgaggcggtaaaacgcggcgcccaggtggtgtgcatcaacccgctgaaagagcgtggcctggagcgtttccagcacccgcaacacccgctggaaatgctcaccaacggcgacaaaccaaccaacactgcctacttccgcccggcgctgggaggcgacatggccatcctgcggggcatggccaagttcctgctgctgtgggaacgccaggcccaggccgaaggcaaagaggccgtgttcgaccacgacttccttaatgaacacaccgccaacgtgctggattacctgggcaagatcgacgacacctcatgggatgagatcgtcgagcagtccggcctgaccctnntngagatcgagcaagcggcgcgcatgtacgccaaaggnnnnnncgtgatcatnnnnnnnnngatgggcatcannnncatcnnnnnnnnnnnnnnnnnnnn

SEQ ID NO: 5540 - DNA, 1104 bp, Zea mays
  misc_feature (1)..(14): n is a, c, g, or t
  misc_feature (17)..(29): n is a, c, g, or t
  misc_feature (38)..(38): n is a, c, g, or t
  misc_feature (40)..(50): n is a, c, g, or t
  misc_feature (55)..(93): n is a, c, g, or t
  misc_feature (95)..(99): n is a, c, g, or t
  misc_feature (101)..(123): n is a, c, g, or t
  misc_feature (125)..(125): n is a, c, g, or t
  misc_feature (127)..(135): n is a, c, g, or t
  misc_feature (139)..(223): n is a, c, g, or t
  misc_feature (226)..(232): n is a, c, g, or t
  misc_feature (234)..(234): n is a, c, g, or t
  misc_feature (236)..(246): n is a, c, g, or t
  misc_feature (248)..(248): n is a, c, g, or t
  misc_feature (250)..(253): n is a, c, g, or t
  misc_feature (255)..(258): n is a, c, g, or t
  misc_feature (260)..(271): n is a, c, g, or t
  misc_feature (273)..(293): n is a, c, g, or t
  misc_feature (295)..(295): n is a, c, g, or t
  misc_feature (301)..(307): n is a, c, g, or t
  misc_feature (394)..(395): n is a, c, g, or t
  misc_feature (1101)..(1104): n is a, c, g, or t
  Peptide Sequence Number=SeqID_12167
  Probeset Number=SeqID_19943
nnnnnnnnnnnnnngannnnnnnnnnnnngaaaaaggnannnnnnnnnnnagggnnnnnnnnnnnnnnnnnnnnnnnnnnnnnnnnnnnnnnntnnnnngnnnnnnnnnnnnnnnnnnnnnnncngnnnnnnnnngggnnnnnnnnnnnnnnnnnnnnnnnnnnnnnnnnnnnnnnnnnnnnnnnnnnnnnnnnnnnnnnnnnnnnnnnnnnnnnnnnnnnnnaannnnnnncncnnnnnnnnnnnancnnnngnnnnannnnnnnnnnnncnnnnnnnnnnnnnnnnnnnnngncgcagnnnnnnntcggcagcctgatggagatcatcaacaacgtcacgatgctgtcgatcatcctgaccggcgcggccctgatccgcgagcgcgagcacnncaccatcgagcacctgctggtcatgcctgttacaccgaccgagatcatgctggcgaaagtctggtccatggggctggtcgtcctggtgtcggctgcgctatcgttgacattcgtcgtgcgtggcctgctgcaggtgccggtcgagggatcggtggcgctgttcctggccggggtggcgctgcacttgttcgcgaccacctccatgggcatcttcatggccaccctcgcacgcagcatgccgcaattcggcatgctgctggtgctggtgctgctgccgctgcagatgctgtcgggcggcaccacgccgcgcgaaagcatgccggatttcgtgcagaacatcatgctggccgcccccaccacccatttcgtggaactcggccaggccattcttttccgcggcgcgggcttgagcgtcgtgtggcagcccttcctggcgctggcgctgatcggcagcgtcctgttcgccttctcgttgacccgattccgcaagaccctcagccagatggcgtgaggcctgtgcattcgttgccccttaccactctcttaaaaggacgcatgatgaagaagacaaccgcccccacgccccaggacctcgccggcgccaacgccgcctattgccaacgactgggcgagctggcgcgcgaaagccagcagcgctggctgcagctgggccagcgcctggccagcgacggcaccggccagtacnnnn

SEQ ID NO: 5541 - DNA, 1270 bp, Zea mays
  misc_feature (1)..(1): n is a, c, g, or t
  misc_feature (743)..(743): n is a, c, g, or t
  misc_feature (759)..(759): n is a, c, g, or t
  misc_feature (761)..(761): n is a, c, g, or t
  misc_feature (767)..(771): n is a, c, g, or t
  misc_feature (782)..(782): n is a, c, g, or t
  misc_feature (797)..(799): n is a, c, g, or t
  misc_feature (801)..(802): n is a, c, g, or t
  misc_feature (819)..(834): n is a, c, g, or t
  misc_feature (837)..(838): n is a, c, g, or t
  misc_feature (840)..(844): n is a, c, g, or t
  misc_feature (848)..(869): n is a, c, g, or t
  misc_feature (871)..(884): n is a, c, g, or t
  misc_feature (886)..(919): n is a, c, g, or t
  misc_feature (926)..(928): n is a, c, g, or t
  misc_feature (930)..(944): n is a, c, g, or t
  misc_feature (946)..(970): n is a, c, g, or t
  misc_feature (977)..(977): n is a, c, g, or t
  misc_feature (979)..(979): n is a, c, g, or t
  misc_feature (981)..(981): n is a, c, g, or t
  misc_feature (983)..(990): n is a, c, g, or t
  misc_feature (992)..(996): n is a, c, g, or t
  misc_feature (998)..(1021): n is a, c, g, or t
  misc_feature (1024)..(1027): n is a, c, g, or t
  misc_feature (1029)..(1037): n is a, c, g, or t
  misc_feature (1039)..(1042): n is a, c, g, or t
  misc_feature (1051)..(1051): n is a, c, g, or t
  misc_feature (1053)..(1055): n is a, c, g, or t
  misc_feature (1057)..(1059): n is a, c, g, or t
  misc_feature (1061)..(1270): n is a, c, g, or t
  Peptide Sequence Number=SeqID_12168
  Probeset Number=SeqID_19944
natatttaatccaaaggctgatctcccttgactgagtctacccgcaacccgctgaccctttacctcacccgcctggcaccctccagccagctgaccatgcgctacgtgctgcaagacgccgccgaccgcctgggctttgaagacatcaacctcgaagacatcgactggcacctgctgcagcctgaacacgtcatggccctggtggcggcgttgcgggaagacggttatgcgccgaacacctcatcgctgtacgtcaacgccgtgcgtggggtgatgaacgaggcctggcgcatgagcctgatcagccaggatcacctgttgaagatgcgttcggtcaaggccatggccggcacgcggctgagccagggccgcaacctgcggcgtacgctgattcgtgagttgatggaggtctgcgccgccgacccgcgtccccagggcctgcgggacgcagcggtgatcgggatcctgtatggctcgggcatgcgcaagtcggagtcggtgaatatcgagttgggccaggtcaattttgacgagcgcagcctgcaggtcaccggcaagggcaacaaacaactgatcaagtacgcgccggcctgggccttcgccaagctggaggcgtggctggagttccgtcgcagccagttgaaacccggtgagcaggacgacaggttcctgttcaaccgcattcgccggggcagccacatcacccgcgagcgcatcaccaagcacgcgatttactacatcgnccgtcagcgcggggancnagtcgnnnnnaaaatcatgcnccatgatttccgccnnncnntcatcacccgggtgatnnnnnnnnnnnnnnnntgnncnnnnnccannnnnnnnnnnnnnnnnnnnnnannnnnnnnnnnnnncnnnnnnnnnnnnnnnnnnnnnnnnnnnnnnnnnncgccggnnngnnnnnnnnnnnnnnntnnnnnnnnnnnnnnnnnnnnnnnnnaaaaaananantnnnnnnnncnnnnncnnnnnnnnnnnnnnnnnnnnnnnnaannnnannnnnnnnncnnnnacccctggncnnngnnncnnnnnnnnnnnnnnnnnnnnnnnnnnnnnnnnnnnnnnnnnnnnnnnnnnnnnnnnnnnnnnnnnnnnnnnnnnnnnnnnnnnnnnnnnnnnnnnnnnnnnnnnnnnnnnnnnnnnnnnnnnnnnnnnnnnnnnnnnnnnnnnnnnnnnnnnnnnnnnnnnnnnnnnnnnnnnnnnnnnnnnnnnnnnnnnnnnnnnnnnnnnnnnnnnn

SEQ ID NO: 5542 - DNA, 259 bp, Zea mays
  misc_feature (1)..(2): n is a, c, g, or t
  Peptide Sequence Number=SeqID_12169
  Probeset Number=SeqID_19945
nntacgacgccgtgaccagcctgtcgttcgaagtgcgccagaaactcaagacgcatcggcccgaaaccatcggccaggccgcccgcatttcgggcgtgacgccggcggcgatctcgctgctgctgatccacctgaagcgcctgcactacggctcgcgcaagcaagccgcatgagcgcccatccccaaccggccggcgcggacatggccggccgcctttcgcatgccttcgagcagctcggactgcaggcggacgccgcc

SEQ ID NO: 5543 - DNA, 259 bp, Zea mays
  misc_feature (258)..(259): n is a, c, g, or t
  Peptide Sequence Number=SeqID_12170
  Probeset Number=SeqID_19946
ggcggcgtccgcctgcagtccgagctgctcgaaggcatgcgaaaggcggccggccatgtccgcgccggccggttggggatgggcgctcatgcggcttgcttgcgcgagccgtagtgcaggcgcttcaggtggatcagcagcagcgagatcgccgccggcgtcacgcccgaaatgcgggcggcctggccgatggtttcgggccgatgcgtcttgagtttctggcgcacttcgaacgacaggctggtcacggcgtcgtann

SEQ ID NO: 5544 - DNA, 722 bp, Zea mays
  misc_feature (1)..(3): n is a, c, g, or t
  misc_feature (601)..(722): n is a, c, g, or t
  Peptide Sequence Number=SeqID_12171
  Probeset Number=SeqID_19947
nnngtggcgcgccacaccgcgcgggtgttcgacgccatgggctacggcgccctggatgccgccgacacgccggtggtcggcagcgccgacctgcgcagcgcggcggcgccgctcttgcgcaagatccgcaacatcggctggctgatcgggcgctacggcagcaatcgcaccgcgctcagcccggtggcccgcaccgcgccccaggccgatccgtcgcagggcctgctggtgatcggcgcctcggccggcggcccgtccacgctggcgcagctgctgcgcgacattccgttgagctttcccgccggcatcgtgctggtgcagcacgtggacgcatccttcgcggccggcatggccgactggctcaatgaccagatcgcgctgccggtgcggctggtgcgcgagggcgagcggccggcgcccggacaggtgctgctggccggcaccgacgaccatctgcacctgctggccgatggtacgctgcgttacaccgagaatccgaaagaaagcctgtaccggccctctattgatgtatttttccatagcgtcgcgcagcattggcgcggcctggtcgtcggcgtgctgctgacgggcatggggcagnnnnnnnnnnnnnnnnnnnnnnnnnnnnnnnnnnnnnnnnnnnnnnnnnnnnnnnnnnnnnnnnnnnnnnnnnnnnnnnnnnnnnnnnnnnnnnnnnnnnnnnnnnnnnnnnnnnnnnnnnn

SEQ ID NO: 5545 - DNA, 303 bp, Zea mays
  misc_feature (3)..(15): n is a, c, g, or t
  misc_feature (30)..(30): n is a, c, g, or t
  misc_feature (32)..(37): n is a, c, g, or t
  misc_feature (40)..(44): n is a, c, g, or t
  Peptide Sequence Number=SeqID_12172
  Probeset Number=SeqID_19948
gcnnnnnnnnnnnnngggtccgggaaattncnnnnnncgnnnnngtggctgatgcccggggtcgttatcgcgaatccgatgactatgctcatggtagccaggtggtggtggcggatacgccggtcggccgcctggggctgacagtgtgttacgacttgcgttttccggagctttacagcgaattgcgcgcggcgggtgctgaactgattaccgcaccctccgcgtttacggcggtgacgggtgccgcgcactgggatgtgctgattcgtgcccgggccatcgagacccagtgctacctgcttc

SEQ ID NO: 5546 - DNA, 1121 bp, Zea mays
  misc_feature (1)..(36): n is a, c, g, or t
  misc_feature (40)..(40): n is a, c, g, or t
  misc_feature (43)..(55): n is a, c, g, or t
  misc_feature (57)..(61): n is a, c, g, or t
  misc_feature (66)..(82): n is a, c, g, or t
  misc_feature (85)..(114): n is a, c, g, or t
  misc_feature (116)..(129): n is a, c, g, or t
  misc_feature (131)..(163): n is a, c, g, or t
  misc_feature (168)..(172): n is a, c, g, or t
  misc_feature (177)..(177): n is a, c, g, or t
  misc_feature (179)..(186): n is a, c, g, or t
  misc_feature (190)..(213): n is a, c, g, or t
  misc_feature (218)..(219): n is a, c, g, or t
  misc_feature (221)..(228): n is a, c, g, or t
  misc_feature (230)..(232): n is a, c, g, or t
  misc_feature (242)..(243): n is a, c, g, or t
  misc_feature (251)..(255): n is a, c, g, or t
  misc_feature (257)..(257): n is a, c, g, or t
  misc_feature (259)..(260): n is a, c, g, or t
  misc_feature (265)..(267): n is a, c, g, or t
  misc_feature (269)..(269): n is a, c, g, or t
  misc_feature (284)..(284): n is a, c, g, or t
  misc_feature (292)..(292): n is a, c, g, or t
  misc_feature (295)..(298): n is a, c, g, or t
  misc_feature (311)..(311): n is a, c, g, or t
  misc_feature (313)..(313): n is a, c, g, or t
  misc_feature (336)..(336): n is a, c, g, or t
  misc_feature (345)..(346): n is a, c, g, or t
  misc_feature (1087)..(1121): n is a, c, g, or t
  Peptide Sequence Number=SeqID_12173
  Probeset Number=SeqID_19949
nnnnnnnnnnnnnnnnnnnnnnnnnnnnnnnnnnnntttntgnnnnnnnnnnnnngnnnnnggggnnnnnnnnnnnnnnnnnggnnnnnnnnnnnnnnnnnnnnnnnnnnnnnnannnnnnnnnnnnnngnnnnnnnnnnnnnnnnnnnnnnnnnnnnnnnnnttttnnnnncaatncnnnnnnnngatnnnnnnnnnnnnnnnnnnnnnnnnggatnngnnnnnnnntnnngttgacgcgnngagtagannnnntngnngctgnnntntgacccatgggatangccccccntannnnatgctatgcgtancntataataggtataccccctatanctatgcaanngccgacagcccttgaactggacagaagctttaattgcgagggagctcaagagcaccggattgtccgcttctggcaatggtaggcccgtcgccaaggtcctggcgacgctgcaagcagctagacgtttaaacgagcccccctgaaaaaggaggaagaatttatcactggattgtcaacgctaggcgcacttcgcggagctgttgaaattactgagtcattgttaatagttggttgaggcatactcagcaatgagttgcgcatcgattggtagaatccctggatgtggcagccaaataaagctcgctgccattcgaacaaccggacggggtaacagcatgcaggtcgatcgagccaaccttgccgattttgtattatttttggccattgccaggcacaaaagcttcagccgggccggacaagaggttggtattagcgcttcagcattgagccatgcaatcaaaggtctggagacacgtctcggtgttcgccttctgaaccgcactacccgcagcgtcacgctaacagccgctggtgaagaacttcacagcgtgatcagcgtaccaatggacgagatcggtcaagccatggaagccctcaatcgcttccgcgacgagccaaccggccgcattcgactgaacaccctgagcgatgccgccgatcttctcctcggccctgttttgccagtattcaatgaccgctatcctgaaatccagatcgacttgacggtgaccaatttgattnnnnnnnnnnnnnnnnnnnnnnnnnnnnnnnnnnn

SEQ ID NO: 5547 - DNA, 318 bp, Zea mays
  misc_feature (316)..(318): n is a, c, g, or t
  Peptide Sequence Number=SeqID_12174
  Probeset Number=SeqID_19950
agcattgccctcaagcgcctggaaacccgcctgggcattcggctgctggcgcgctccactcgcagcatgcgcctgaccgaagaaggccggcgctacctggacagcgtgcgggtggccctggaggcgttgtccgaaggcgaacaggcgatcaagcaacaaggccaaagcctcagtggtttgctgcaattggccgcgccctcggatttcgggcgcaatgtgctgctgggctggctggatgagttcaagctcgagcacccgaacgttcgcctgcaattgctgctcaacgacagcaatgccgacctgtttcgcgaaaccnnn

SEQ ID NO: 5548 - DNA, 322 bp, Zea mays
  misc_feature (1)..(1): n is a, c, g, or t
  Peptide Sequence Number=SeqID_12175
  Probeset Number=SeqID_19951
ntgagcctggggattgttgttgatcagcatgatcaggacacctgtggatgtgggcggtgccacaggaggagcaattagcgtgcccaatggtgtggccccgtgtttacggggcttttggccgccaccgtcggcaagccttggcatgccgacggccagggtttgccgctagtgggcaatgttctccagcgccaggttgcgggtgcgcgggccgaaccaactgatggtgatcatcacgatcaacatgctgctggcgataaacgccaacacgccgggcgtgccgaggtgttcgaggatcacaccgatcaacaggctgctgaacacc

SEQ ID NO: 5549 - DNA, 322 bp, Zea mays
  misc_feature (322)..(322): n is a, c, g, or t
  Peptide Sequence Number=SeqID_12176
  Probeset Number=SeqID_19952
ggtgttcagcagcctgttgatcggtgtgatcctcgaacacctcggcacgcccggcgtgttggcgtttatcgccagcagcatgttgatcgtgatgatcaccatcagttggttcggcccgcgcacccgcaacctggcgctggagaacattgcccactagcggcaaaccctggccgtcggcatgccaaggcttgccgacggtggcggccaaaagccccgtaaacacggggccacaccattgggcacgctaattgctcctcctgtggcaccgcccacatccacaggtgtcctgatcatgctgatcaacaacaatccccaggctcan

SEQ ID NO: 5550 - DNA, 904 bp, Zea mays
  misc_feature (1)..(4): n is a, c, g, or t
  misc_feature (773)..(778): n is a, c, g, or t
  misc_feature (789)..(793): n is a, c, g, or t
  misc_feature (796)..(796): n is a, c, g, or t
  misc_feature (798)..(798): n is a, c, g, or t
  misc_feature (800)..(904): n is a, c, g, or t
  Peptide Sequence Number=SeqID_12177
  Probeset Number=SeqID_19953
nnnntggactaccacgtcaagctgctgccccaaagtgatcaggcagaggtgcgcctgagcctgtcccagggctcggcggtgcgcagcctcaacttcgacctgggccgcgacggcgactacagcgatttcaaggccgatggccagtggcaagtgatgccgggcaatacgccgggcgccagccgtggtctgtggcaacccagtgccgacaaggccagcctgacctaccgcgttcgcctgacccacgcccgcaagaagggcgtttacgaagcacgcatgacccctagctgggcgctgtttcgtggcgaagacctggtgcccaccgcgcgtctggatcagcaggacggcattgaactggtgtcgcgcctggtgtttgaactgcccgccggctggaaaagcgtcgagacgtcctggccgcgcatcggcaagaacaaattccgcatcgataatgtttcccgcctgtttgaccggcccaccggctggatgctcgcgggtacgttgggcagccgcaggatgcgcctgggggaaaccgaaatcaccgtggcgtcgcccaaagggcagggcatgcatcgcatggatgtgctgaccttgctgacgtttgtctggccgcaagtgcaagcggcattcccgcggcacccggcgaaactcctggtggtgggcgccagtgacccgatgcggcgcggtgcgtactcggcgcgggactcgatctacctcaacagccgaacaccgctggtcagcgaaaacggcagcagcccgttgatccgcgaagtggtgcnnnnnnatcggtcgctnnnnnacnancnnnnnnnnnnnnnnnnnnnnnnnnnnnnnnnnnnnnnnnnnnnnnnnnnnnnnnnnnnnnnnnnnnnnnnnnnnnnnnnnnnnnnnnnnnnnnnnnnnnnnnnnn

SEQ ID NO: 5551 - DNA, 843 bp, Zea mays
  misc_feature (600)..(601): n is a, c, g, or t
  misc_feature (736)..(737): n is a, c, g, or t
  misc_feature (794)..(798): n is a, c, g, or t
  misc_feature (825)..(826): n is a, c, g, or t
  misc_feature (828)..(843): n is a, c, g, or t
  Peptide Sequence Number=SeqID_12178
  Probeset Number=SeqID_19954
gacgtgatgcgccataccccaggcattaccgtgtcggccttcgacaccgatcgcaccaactactatgcccgcggtttctccatcaacaacttccagtacgacggcattccttccaccgcgcgcaacgtcgcctattcggcgggcaataccctgagcgacatggcgatctatgatcgggtcgaagtgcttaaaggcgccacgggcctgctgaccggtgccggttcgctgggtgccacgatcaacctggtgcgcaagaaacctacggctgatttccagggccatgccagcctcggcgcgggctcctgggataactatcgcagcgaactggacgtcagcggcccgatgaccgaaagcggcaacgtgcgtggccgggccgtcgcggcgtatcaggacaagcgctcgttcatggaccgttactcgcgcaaaagcccggtgtactacggcatcatggaattcgacctgtcccccgacacgatgctgaccgtgggcggcgactatcaggacagcctgcccaccgcctcgagctggtccggcagcttcccgctgatcaacgccaatggcgaccgcaatagcgtaaagcgctcgttcaacaacgcggcnnaactggagcagttgggagcaatacacccgcaccgccttcgccatgctcgagcatgacttgggtaatggctgggtcaccaagttgcaactggatcacaagatcaacggctaccatgcgctgatgggctcgatccanngcgatgagccacgggcagatggcaccgccaaaatcacctcgggcaaatacaccgggnnnnncgtcagcgattccgccgacttgtatgnnannnnnnnnnnnnnnnn

SEQ ID NO: 5552 - DNA, 917 bp, Zea mays
  misc_feature (1)..(6): n is a, c, g, or t
  misc_feature (527)..(529): n is a, c, g, or t
  misc_feature (596)..(596): n is a, c, g, or t
  misc_feature (649)..(649): n is a, c, g, or t
  misc_feature (651)..(666): n is a, c, g, or t
  misc_feature (681)..(684): n is a, c, g, or t
  misc_feature (688)..(691): n is a, c, g, or t
  misc_feature (745)..(758): n is a, c, g, or t
  misc_feature (785)..(786): n is a, c, g, or t
  misc_feature (788)..(788): n is a, c, g, or t
  misc_feature (822)..(823): n is a, c, g, or t
  misc_feature (830)..(830): n is a, c, g, or t
  misc_feature (832)..(834): n is a, c, g, or t
  misc_feature (843)..(843): n is a, c, g, or t
  misc_feature (845)..(845): n is a, c, g, or t
  misc_feature (847)..(847): n is a, c, g, or t
  misc_feature (852)..(855): n is a, c, g, or t
  misc_feature (863)..(867): n is a, c, g, or t
  misc_feature (887)..(891): n is a, c, g, or t
  misc_feature (893)..(893): n is a, c, g, or t
  misc_feature (896)..(902): n is a, c, g, or t
  misc_feature (909)..(909): n is a, c, g, or t
  misc_feature (913)..(913): n is a, c, g, or t
  misc_feature (915)..(915): n is a, c, g, or t
  misc_feature (917)..(917): n is a, c, g, or t
  Peptide Sequence Number=SeqID_12179
  Probeset Number=SeqID_19955
nnnnnnctaccagatcgtcgaagctcgtgccttgggcgccgattgcgtgctgttgatcgtctccgcactggatgacgtgaagatggccgaactggcggccgtggccaaaagcgtcggcctcgacgtgctggtggaagtgcacgacggtgatgaactcggaacgcgcgttgaaaaccctcgacacaccgttggtgggcgtcaacaaccgcaacctgcacacgtttgaagtcagcctggaaaacaccctcgacctgttgccgcgtatcccgcgtgaccggttggtgattaccgaaagtggcatcgtcaatcgcgccgatgtcgaactgatggaaatcagcggcgtgtactcgttcctcgtcggcgaaaccttcatcgcgtgccgagaacccgggggctgaattgcagcgcctgttcttcccggagcgtggcgttgctgtcagcggttcgaccctggattgatgatgacccagccggtggcgatgacggtcgaggcaggccttaaggccgagcaggatgtgctcgccgcnnntctgcgcgggggagcagccgttcggcctgctgttctggcagcccagcgatcaaggcgttggtgatgnctcgtcgtttgagccgccttccggcattcgagaccgccagccaggtatcggcngnnnnnnnnnnnnnnnngtgctgctgcgggannnnggcnnnnagccggttccgcaatcggcagccacggtcaatattgcgctggtctacgcgccannnnnnnnnnnnnntgaccaagggcgcatcgaaaccggctnncngcgtttgtgccagccgatttgcgacctgcttatnnagctggntnnnatgcatcgntngncgagnnnnacggggcnnnnngcgacggtcgctacaacgtnnnnntngannnnnnnaaaatgntcgntncn

SEQ ID NO: 5553 - DNA, 968 bp, Zea mays
  misc_feature (1)..(1): n is a, c, g, or t
  misc_feature (8)..(20): n is a, c, g, or t
  misc_feature (24)..(31): n is a, c, g, or t
  misc_feature (39)..(43): n is a, c, g, or t
  misc_feature (47)..(48): n is a, c, g, or t
  misc_feature (57)..(63): n is a, c, g, or t
  misc_feature (66)..(77): n is a, c, g, or t
  misc_feature (82)..(82): n is a, c, g, or t
  misc_feature (84)..(84): n is a, c, g, or t
  misc_feature (86)..(86): n is a, c, g, or t
  misc_feature (93)..(93): n is a, c, g, or t
  misc_feature (111)..(114): n is a, c, g, or t
  misc_feature (962)..(968): n is a, c, g, or t
  Peptide Sequence Number=SeqID_12180
  Probeset Number=SeqID_19956
ngaatgcnnnnnnnnnnnnncgcnnnnnnnntttttttnnnnngatnnctcgcatgnnnnnnnctnnnnnnnnnnnnctatnangnttagtcntgccgagaaaatatcgcnnnntgcgatattccttggcggaccagtggcgcaattccaagctcccttcaacagcctagatacgccgcgatagaagacaccatcaaaaatgtgaacgcgtacgtcactagcgtcgaaccttgataaacacccttcccggctccaaatagaacccattggccactttcacggagcccagcatgtccgactctctagtaattccctgcccccactgcaacggtcttaaccgcatccccaacgaacgcctgggcgatgcgccgaagtgcgggcgctgcaagcagccggtgctgctgagcaaaccctttgagctgaaacagggcgattacgccagccagatcaaaggtgatttacccctgttggtggatgtgtgggccgaatggtgcgggccgtgcaagtcgtttgcgccggtgtttgagcaggccgccgggcagttggccgggaagtgtcgattggccaagctcgatagtgaggccaatcagcagttatccgctcagttggggattcgctcgattcccagcctgatcctgttcaagaatggccgggaagtggcgcgtcagagcggtgcgtttccgttaccgcagttgatgagctggctgcgcagtcagggcgtttgaggtaacggggcaccccggtccatcacttgccccattagcaatacgcccaattcgctcaattgatgaatggccaacgcgacatcgcgctgcttgccggtgaggtcgtcggaaaggtcgagcaagagggtggtgactgaggagaaggtttcgtaggagttgaggatcagggtttcggtggcttggcctgggctgactgtgaaaaggtacgacggaggatttggagtagctttaaacatnnnnnnn

SEQ ID NO: 5554 - DNA, 530 bp, Zea mays
  misc_feature (525)..(530): n is a, c, g, or t
  Peptide Sequence Number=SeqID_12181
  Probeset Number=SeqID_19957
ggctactttgacaacatgaacgcgttcttcagtggcaacggctaccgcgtagtggaccagagcagcgtgcctgaagcggaaatcagcttcaaaaacgcctggggcatggccgacgaagacctctataaacagacgctgaaactggcagatgccgactacgccaagcagcaaccgttcctgctgcaactgatgaccacctccaaccaccgcccgtatacctacccggcaggccgcattgatatcaaatccggcgacggtcgcgacggtgcggtgaagtacaccgaccatgccatcggccagttcctggaggcggcccgccagaagccatggttcgacaacacaatctttatcttcgtcgccgaccacacagccggcagcgcgggcaaggaagacctgccgatggtgaactaccagatcccactgttcatctacgcccccaagctggtggacgccggcgagaacgcgaagctggccagccagatcgacctggccccgacgctgctgggcttgctgaacctgagctannnnnn

SEQ ID NO: 5555 - DNA, 512 bp, Zea mays
  misc_feature (511)..(512): n is a, c, g, or t
  Peptide Sequence Number=SeqID_12182
  Probeset Number=SeqID_19958
gtcgccgtggcgctggaactgggctatccggccgatgccgtccgcgatcaggtaagcgagatcgccgtggcggcgctggccgccgctggcgcgcccggggcccaggtgagcgtgtcctggaaggtggcggcgcatgcggtgcagaagggcctgaagccgctgcccaatgtgcgcaacattattgcagtggcctccggcaagggcggcgtgggcaagagcaccacggccgtgaacctggcgctggccctggccgccgagggcgccaaggtcggcctgctggacgccgacatctacggccccagcgtgccgaccatgctgggcgtctcgggtcgtcccgagagcctcgacaacaagagcatggagccgctcaccggccacggcctgcaggccaattccatcggtttcctgatcgacgccgattcgcccgccatctggcgcggcccgatggtcacccaggcgctcgaacaactgctgcgccagaccaattggcgcgacctcgactacctgatcnn

SEQ ID NO: 5556 - DNA, 1100 bp, Zea mays
  misc_feature (1)..(5): n is a, c, g, or t
  misc_feature (759)..(760): n is a, c, g, or t
  misc_feature (762)..(762): n is a, c, g, or t
  misc_feature (764)..(767): n is a, c, g, or t
  misc_feature (769)..(769): n is a, c, g, or t
  misc_feature (808)..(812): n is a, c, g, or t
  misc_feature (818)..(818): n is a, c, g, or t
  misc_feature (835)..(842): n is a, c, g, or t
  misc_feature (849)..(851): n is a, c, g, or t
  misc_feature (859)..(864): n is a, c, g, or t
  misc_feature (866)..(872): n is a, c, g, or t
  misc_feature (874)..(876): n is a, c, g, or t
  misc_feature (878)..(897): n is a, c, g, or t
  misc_feature (899)..(920): n is a, c, g, or t
  misc_feature (923)..(923): n is a, c, g, or t
  misc_feature (926)..(934): n is a, c, g, or t
  misc_feature (937)..(968): n is a, c, g, or t
  misc_feature (973)..(980): n is a, c, g, or t
  misc_feature (983)..(1007): n is a, c, g, or t
  misc_feature (1009)..(1055): n is a, c, g, or t
  misc_feature (1060)..(1068): n is a, c, g, or t
  misc_feature (1070)..(1078): n is a, c, g, or t
  misc_feature (1085)..(1098): n is a, c, g, or t
  misc_feature (1100)..(1100): n is a, c, g, or t
  Peptide Sequence Number=SeqID_12183
  Probeset Number=SeqID_19959
nnnnnggtggcttccacctccggcgggcacttcaatcgctggcaaagccgggtttccgggcgaccggagtacggtggcgagctgccggtgtcggcactggccgaagaaatgctcaccgagggcgaaggacaaatccgtgcgctggtgacggtggcagggaatccggtgctctccacgcctaacggccggcagttggagcaggcgttggatggcctggaattcatggtcagtatcgacctgtatatcaacgaaaccacgcgctatgccgacctgatcctgccgtctacctcggcactggaaaacgatcactacgacaccaccttcaatatgttcgcggtgcgcaacgtcacccgcttcaatcgcgccatcctgccaaagcctgacggcgcattgcatgactgggaaatcttcgtcggcctggcccaggcgtttgccgcgaagacgggtaatacgctcaaaccgaccatgccaccggcgcagatgatcgatttcgggctgcgcgccggaccttatggcgataccttgtctattgccgcgctggctgattatccccacggtctagaccttgggccgctgaagcccaacctggcagggcgcatgaaaaccgccaacggccatttgcaggctgcgccgccggtgatcctcgcagacttggcgcgctttgccgcacaaccagtgcctgggctgaatgaattgttgctgatcggccgtcgccatgtgcgcagcaacaactcgtggatgcataactaccatcggttnntnannnncnagccccgtcaccagttgctgatgcatcccgatgacctgnnnnntcgcangttgagcgacgggcaannnnnnnnggtcagnnntcggatcnnnnnnannnnnnntnnngnnnnnnnnnnnnnnnnnnnngnnnnnnnnnnnnnnnnnnnnnngcnccnnnnnnnnnggnnnnnnnnnnnnnnnnnnnnnnnnnnnnnnnnttttnnnnnnnnggnnnnnnnnnnnnnnnnnnnnnnnnnannnnnnnnnnnnnnnnnnnnnnnnnnnnnnnnnnnnnnnnnnnnnnnttttnnnnnnnnnannnnnnnnngttttannnnnnnnnnnnnncn

SEQ ID NO: 5557 - DNA, 446 bp, Zea mays
  misc_feature (1)..(1): n is a, c, g, or t
  Peptide Sequence Number=SeqID_12184
  Probeset Number=SeqID_19960
ngcggtattcagtatctaagcggtattcatcgagcaaggtgttgataaatcggcgggcttgccaggtatcaaggtctgtctctccacggccccccatcagatactctcccgttcgccacccaactggagcccatgatgctcggtttatgtccagggtgagcccgtagtagtccggagcattcacctcgctttcatcaaagtaagcccagtaaacacggcctaaagctgggtgctctgcgccaatgacaacgtaccctgttgggtccctcaaaacttcatccatcggcacgtcctaatttgtagtggttctctaatgaggtcgggggaaacgatgagctgtttcccccaacaccgacagctacacgaatgggccgaaaaattaagcccctgttttcagaattgcggtggatcggtatctggatattcatccgggcctggagctggct

SEQ ID NO: 5558 - DNA, 446 bp, Zea mays
  misc_feature (446)..(446): n is a, c, g, or t
  Probeset Number=SeqID_19961
agccagctccaggcccggatgaatatccagataccgatccaccgcaattctgaaaacaggggcttaatttttcggcccattcgtgtagctgtcggtgttgggggaaacagctcatcgtttcccccgacctcattagagaaccactacaaattaggacgtgccgatggatgaagttttgagggacccaacagggtacgttgtcattggcgcagagcacccagctttaggccgtgtttactgggcttactttgatgaaagcgaggtgaatgctccggactactacgggctcaccctggacataaaccgagcatcatgggctccagttgggtggcgaacgggagagtatctgatggggggccgtggagagacagaccttgatacctggcaagcccgccgatttatcaacaccttgctcgatgaataccgcttagatactgaataccgcn

SEQ ID NO: 5559 - DNA, 1107 bp, Zea mays
  misc_feature (1)..(5): n is a, c, g, or t
  misc_feature (778)..(779): n is a, c, g, or t
  misc_feature (790)..(791): n is a, c, g, or t
  misc_feature (796)..(796): n is a, c, g, or t
  misc_feature (812)..(813): n is a, c, g, or t
  misc_feature (816)..(816): n is a, c, g, or t
  misc_feature (827)..(837): n is a, c, g, or t
  misc_feature (846)..(848): n is a, c, g, or t
  misc_feature (864)..(895): n is a, c, g, or t
  misc_feature (905)..(905): n is a, c, g, or t
  misc_feature (907)..(908): n is a, c, g, or t
  misc_feature (911)..(927): n is a, c, g, or t
  misc_feature (929)..(954): n is a, c, g, or t
  misc_feature (956)..(956): n is a, c, g, or t
  misc_feature (959)..(1005): n is a, c, g, or t
  misc_feature (1010)..(1022): n is a, c, g, or t
  misc_feature (1025)..(1043): n is a, c, g, or t
  misc_feature (1047)..(1047): n is a, c, g, or t
  misc_feature (1049)..(1094): n is a, c, g, or t
  misc_feature (1101)..(1107): n is a, c, g, or t
  Peptide Sequence Number=SeqID_12185
  Probeset Number=SeqID_19962
nnnnngacgccaaccctgctgttccgctacagcgccgtgaccttcaacggccaccgcatccactacgactatccctatgtcaccggcaccgagggttattcggggctggtggtgcacggtccgctgatcgccaccttgagcctgcgcgcgttttgtcgggcgaaccctggggccgcgttgcgccgtttttcctatcgtggcgtgcggccattgattgccccgcaaccctttgaagttggcgggcgcatcacggcgccgggcgtggccgaactgtgggcgggcaacgctgacggcctggcccagcgcgccgaactgcatttcgaataaacctccaagaacaacaggcggagagccgttaatgaacccgaatgacaacgaagaactgaatgcaatccgcgaaggcgtccgcgcactgtgcgccgaattcgacgctgcctattggcgcaaggtcgatgaagaaaagagctttccggaagccttcgtcaaagccttgaccgacgccggctggctgtcggcaatgatccccgaagcctacggcggctccggcctcgggttggcggaagcctcggtgattcttgaggaagtgaaccgctgtggcggcaactccggtaccgtccacggccagatgtacaacatgttcaccttgctgcgccacggcagcgaagcgcagaaaagcttctacctgcccaagctcgccagcggcgaactgcgtctgcagtcgatggcggtgaccgagcccaccaccggcactgacaccaccaaaatcaagaccacccgnngtcaaagcgtnncgacnagtacgtgatcacggnnagnaagtctggatnnnnnnnnnnncagcattcnnncctgatgatcctgctnnnnnnnnnnnnnnnnnnnnnnnnnnnnnnnnaaaaaaatcnannagnnnnnnnnnnnnnnnnngnnnnnnnnnnnnnnnnnnnnnnnnnnanacnnnnnnnnnnnnnnnnnnnnnnnnnnnnnnnnnnnnnnnnnnnnnnnaaacnnnnnnnnnnnnnttnnnnnnnnnnnnnnnnnnntttncnnnnnnnnnnnnnnnnnnnnnnnnnnnnnnnnnnnnnnnnnnnnnnatttttnnnnnnn

SEQ ID NO: 5560 - DNA, 194 bp, Zea mays
  misc_feature (1)..(3): n is a, c, g, or t
  Peptide Sequence Number=SeqID_12186
  Probeset Number=SeqID_19963
nnngaactcgaacgccatcaggaagagaccggcatccaactgctgtggggcacggccaactgcttcagcaacccgcgctttgccgccggtgccgcgagcaatcccaaccccgaggtgtttgcctatgcggcggcccaggtgttcagcgcgatgaatgccacccaccgtctcaagggttccagctatgtgctgtg

SEQ ID NO: 5561 - DNA, 194 bp, Zea mays
  misc_feature (192)..(194): n is a, c, g, or t
  Peptide Sequence Number=SeqID_12187
  Probeset Number=SeqID_19964
cacagcacatagctggaacccttgagacggtgggtggcattcatcgcgctgaacacctgggccgccgcataggcaaacacctcggggttgggattgctcgcggcaccggcggcaaagcgcgggttgctgaagcagttggccgtgccccacagcagttggatgccggtctcttcctgatggcgttcgagttcnnn

SEQ ID NO: 5562 - DNA, 174 bp, Zea mays
  Peptide Sequence Number=SeqID_12188
  Probeset Number=SeqID_19965
aatgcaccagccttgttgccgcacttcctgcaggcattcgagcaaggcttgcggggtggtgagggtacggctggtcttggtttgcaggtcggcgtggtcgaggtagtcctgcagcgaggcgtcatccagcgccgccagcaggatacggcccatggaggtgcagtaggccggcaa

SEQ ID NO: 5563 - DNA, 174 bp, Zea mays
  Peptide Sequence Number=SeqID_12189
  Probeset Number=SeqID_19966
ttgccggcctactgcacctccatgggccgtatcctgctggcggcgctggatgacgcctcgctgcaggactacctcgaccacgccgacctgcaaaccaagaccagccgtaccctcaccaccccgcaagccttgctcgaatgcctgcaggaagtgcggcaacaaggctggtgcatt

SEQ ID NO: 5564 - DNA, 665 bp, Zea mays
  misc_feature (1)..(18): n is a, c, g, or t
  misc_feature (21)..(24): n is a, c, g, or t
  misc_feature (28)..(39): n is a, c, g, or t
  misc_feature (41)..(50): n is a, c, g, or t
  misc_feature (53)..(76): n is a, c, g, or t
  misc_feature (78)..(89): n is a, c, g, or t
  misc_feature (96)..(108): n is a, c, g, or t
  misc_feature (113)..(117): n is a, c, g, or t
  misc_feature (122)..(127): n is a, c, g, or t
  misc_feature (131)..(139): n is a, c, g, or t
  misc_feature (144)..(146): n is a, c, g, or t
  misc_feature (148)..(155): n is a, c, g, or t
  misc_feature (158)..(162): n is a, c, g, or t
  misc_feature (164)..(164): n is a, c, g, or t
  misc_feature (172)..(177): n is a, c, g, or t
  misc_feature (179)..(185): n is a, c, g, or t
  misc_feature (188)..(191): n is a, c, g, or t
  misc_feature (211)..(215): n is a, c, g, or t
  misc_feature (235)..(236): n is a, c, g, or t
  misc_feature (306)..(308): n is a, c, g, or t
  misc_feature (656)..(665): n is a, c, g, or t
  Peptide Sequence Number=SeqID_12190
  Probeset Number=SeqID_19967
nnnnnnnnnnnnnnnnnngannnncagnnnnnnnnnnnncnnnnnnnnnnttnnnnnnnnnnnnnnnnnnnnnnnngnnnnnnnnnnnnaggtagnnnnnnnnnnnnncggtnnnnnagaannnnnncaannnnnnnnnctcgnnngnnnnnnnnagnnnnngncaaattgnnnnnngnnnnnnnccnnnngccaaaagtgctgatgcagnnnnncagcatgagcaagctgaaannctcctataccgatcgcttgccggagcagatcatcccgcgtaccgggcgggttcatacgtcctatcaccannncgtcgcagctaccgggcggctgtcttccagcgatccaaacctgcagaacattccggtgcgtaccgccgaaggccggcgtattcgccaggcgtttgtcgcgcccaagggctacaagctgctggcggcggactattcccagatcgagctgcgcatcatggcgcatttgtccaaggacgcagggttgctgaatgcgttccgcgacgacctcgacgtgcacaccgccacggcggctgaggtgttcaaggttgagttggctgaggtcacatccaatcagcgtcgcagcgccaaggcgatcaactttggcctgatctacggcatgggcgcccagaagctcggcaaggacattgnnnnnnnnnn

SEQ ID NO: 5565 - DNA, 479 bp, Zea mays
  misc_feature (475)..(479): n is a, c, g, or t
  Peptide Sequence Number=SeqID_12191
  Probeset Number=SeqID_19968
ataacatcctgctgcgtgacgataagtcctacccgtacgtgtttctctcggacggcgacttcccacgcctgagcatccatcgcggtgccaagaagcagaagggcaagtacttcgggccttaccccagcgccggcgccatccgcgaaagcctgagcctgttgcaaaaggcgtttttcgtgcgccagtgcgaagacagtttctacaagaaccgcaaccgcccatgcctgcagtaccagatcaaacgctgcaaggcgccatgcgtaggcctggttgagccgtcggaatacgccgaggacgtgcgccattcggtaatgttcctagaaggccgcagcaatgccctggccgatgaactgtccggcgccatggagcaagcggccagcaccctggatttcgagcgcgccgccgaactgcgcgaccagatctccctgctgcgccgcgtgcaggaccagcagagcatggagggcggcaccggtgnnnnn

SEQ ID NO: 5566 - DNA, 770 bp, Zea mays
  misc_feature (1)..(91): n is a, c, g, or t
  misc_feature (176)..(177): n is a, c, g, or t
  misc_feature (767)..(770): n is a, c, g, or t
  Peptide Sequence Number=SeqID_12192
  Probeset Number=SeqID_19969
nnnnnnnnnnnnnnnnnnnnnnnnnnnnnnnnnnnnnnnnnnnnnnnnnnnnnnnnnnnnnnnnnnnnnnnnnnnnnnnnnnnnnnnnnnncgcgggcagggcaaaggcgtggtgcacagccatcaactgtctgtggatttcccgccggcggcggcctatcaggcccacgccagcnncctgttggcgttctgtctgcccaagccggtggacaacgcaatgatgtggtttcgcccggaggtcaagtccacggtggagtggagcggccagccggtcaaacatcaagaaccgggcagcacgaccttgagtccgcgcctgtcgtttgacctatggaagcagcaggtcgatggcaaggccctgtactggtcgctctcggaattgctggcggtggagagcctgcggcgcaatgccctggagcatgacctcgcgcgccaggtgcagcgtgaacatgaagccgtacgggcgcgtgatgaactggtggcagtggtctcccatgacttgcgcagcccgctgacgatcctgctgatgcaatgcggcatgatgcgcagcctggtgcccgctgacggcagcaaggccaatcgtcgcctcgccaccgcgattgaaaccatgcaaaacgcgacgtcccgcatgaacaccctgctggaagacctgatggatatctcgcgtatcgaggccgggcgctacagcgtttcgctgcaatcgctcgatgtggccgcgactcaggaacagatctgctcgatgtggcagccgctggcggcagccaagggtnnnn

SEQ ID NO: 5567 - DNA, 229 bp, Zea mays
  misc_feature (1)..(3): n is a, c, g, or t
  misc_feature (5)..(9): n is a, c, g, or t
  misc_feature (11)..(24): n is a, c, g, or t
  misc_feature (27)..(27): n is a, c, g, or t
  misc_feature (29)..(43): n is a, c, g, or t
  misc_feature (46)..(46): n is a, c, g, or t
  Peptide Sequence Number=SeqID_12193
  Probeset Number=SeqID_19970
nnntnnnnncnnnnnnnnnnnnnncgnannnnnnnnnnnnnnntanatcaagcgcgtggtcggcctgcctggtgacgaaatcgcctacctcgacaaaaaactgtatgtgaacggtcaattggtgccgcatgagcgcgccggcgactatttcgaacccgaccgtgtctcgtatatcgcgcaatataaagagaagttgggcgaagttagtcacaatatcctgctggatgag

SEQ ID NO: 5568 - DNA, 229 bp, Zea mays
  misc_feature (184)..(184): n is a, c, g, or t
  misc_feature (187)..(201): n is a, c, g, or t
  misc_feature (203)..(203): n is a, c, g, or t
  misc_feature (206)..(219): n is a, c, g, or t
  misc_feature (221)..(225): n is a, c, g, or t
  misc_feature (227)..(229): n is a, c, g, or t
  Peptide Sequence Number=SeqID_12194
  Probeset Number=SeqID_19971
ctcatccagcaggatattgtgactaacttcgcccaacttctctttatattgcgcgatatacgagacacggtcgggttcgaaatagtcgccggcgcgctcatgcggcaccaattgaccgttcacatacagttttttgtcgaggtaggcgatttcgtcaccaggcaggccgaccacgcgcttgatntannnnnnnnnnnnnnntncgnnnnnnnnnnnnnngnnnnnannn

SEQ ID NO: 5569 - DNA, 803 bp, Zea mays
  misc_feature (583)..(583): n is a, c, g, or t
  misc_feature (681)..(685): n is a, c, g, or t
  misc_feature (692)..(694): n is a, c, g, or t
  misc_feature (697)..(701): n is a, c, g, or t
  misc_feature (704)..(706): n is a, c, g, or t
  misc_feature (720)..(725): n is a, c, g, or t
  misc_feature (735)..(754): n is a, c, g, or t
  misc_feature (759)..(762): n is a, c, g, or t
  misc_feature (765)..(765): n is a, c, g, or t
  misc_feature (769)..(787): n is a, c, g, or t
  misc_feature (794)..(801): n is a, c, g, or t
  misc_feature (803)..(803): n is a, c, g, or t
  Peptide Sequence Number=SeqID_12195
  Probeset Number=SeqID_19972
aggtcggcaccgagtcgtggtcgcagttcgagcgttcgatcatgctgcaggcgatcgacacgcactggcgcgaacacctgtcggcgctggattacctgcgtcagggcatccatctgcgcggctatgcgcagaagaaccccaagcaggaatacaagcgcgaagccttcgaactgttctcgggcatgctggaccgcatccgcgacgacgtggtgcgcgtgctgatgacggtgcgcgtgcagtcgtccgaacaggtcgagcaggccgaggccgaagccgcccagtcccacgtgcagaacgtgcagtatcaccactccgactacgacgaggccctggcccagtcggccgaggacacgggcgcccagccggtgcgcaacgtgctgcccaaggtgggccgcaacgatccgtgcccgtgcggcagcggcaagaagtacaagcagtgccacggcaagctggtctgagcggataacgccatgctgcatgccgtcggccagaccgagttcgaccacgccgtggtcatggtgcgggaccggctggatgcgctggcgccgcacttcgagcgccagggtttccacctgagcgatanggcggtgcacaacctcggttcgtgcaaccgcctgatcgtgctcgaaggcacctacgtcgaactgctgggctggccgcccggcgcgccgccggcgcgcnnnnnaatcgcnnnttnnnnnttnnngctcgaggcgctgnnnnnncgcacctatnnnnnnnnnnnnnnnnnnnngcgcnnnntcnaggnnnnnnnnnnnnnnnnnnntccgatnnnnnnnncn

SEQ ID NO: 5570 - DNA, 163 bp, Zea mays
  Peptide Sequence Number=SeqID_12196
  Probeset Number=SeqID_19973
gaactcgacggcgcgatcctcatcacccccaccgtggcccatgtggccccggccctggcgccgttggagtctgattttgaactgttcgtcagcaccaacctcgccaccctgcgcctgaccatgcccggcagcctgctggacatgcccggcgtcagcctgccca

SEQ ID NO: 5571 - DNA, 163 bp, Zea mays
  Peptide Sequence Number=SeqID_12197
  Probeset Number=SeqID_19974
tgggcaggctgacgccgggcatgtccagcaggctgccgggcatggtcaggcgcagggtggcgaggttggtgctgacgaacagttcaaaatcagactccaacggcgccagggccggggccacatgggccacggtgggggtgatgaggatcgcgccgtcgagttc

SEQ ID NO: 5572 - DNA, 914 bp, Zea mays
  misc_feature (1)..(5): n is a, c, g, or t
  misc_feature (7)..(7): n is a, c, g, or t
  misc_feature (10)..(13): n is a, c, g, or t
  misc_feature (16)..(25): n is a, c, g, or t
  misc_feature (27)..(29): n is a, c, g, or t
  misc_feature (36)..(36): n is a, c, g, or t
  misc_feature (38)..(42): n is a, c, g, or t
  misc_feature (47)..(47): n is a, c, g, or t
  misc_feature (59)..(74): n is a, c, g, or t
  misc_feature (120)..(120): n is a, c, g, or t
  misc_feature (136)..(139): n is a, c, g, or t
  misc_feature (912)..(914): n is a, c, g, or t
  Peptide Sequence Number=SeqID_12198
  Probeset Number=SeqID_19975
nnnnnangannnnatnnnnnnnnnncnnnagcagangnnnnngactnacgcagaggtcnnnnnnnnnnnnnnnngaggatattcagatccagagcaggtggaagacatcatccgcatgantaatgacatggggatnnnncgtacacgagagtgctccggatgcggacgcccttatgttggccgacgccgataccgacgaggcagccgctgaagaagcagccgccgcgttggcagcggtcgagaccgacatcggtcgcacgactgacccagtgcgcatgtatatgcgcgaaatgggtacggtagagctgctgacacgtgaaggcgaaatcgaaatcgccaagcgtatcgaagagggcatccgtgaagtgatgggcgcaatcgcgcacttcccaggcacggttgaccacattctctccgagtacactcgcgtcaccaccgaaggtggccgcctgtccgacgtcctgagcggttatatcgacccggatgacggcattgcgccacctgcggctgaagttcctccacctatcgatgccaaggctgccaaagcagacgacgacaccgacgatgaagaagctgaagccagcaccgacgacgaagaagaagtcgaaagcggtccggatccgatcatcgcagcccagcgctttggcgcggtctccgatcagatggagctggctcgcaaggccctgaagaagcacggtcgcggcagcaagcaggcaactgctgaattgctggccctggctgaactcttcatgccgatcaaactggtaccgaagcaattcgaaggcctggttgagcgggttcgtagcgcccttgagcgtctgcgtgcacaagagcgtgcgatcatgcagctctgtgtccgtgatgcgcgcatgccgcgtgccgacttcctgcgccagttcccgggcaatgaannn

SEQ ID NO: 5573 - DNA, 1017 bp, Zea mays
  misc_feature (1)..(4): n is a, c, g, or t
  misc_feature (803)..(803): n is a, c, g, or t
  misc_feature (836)..(836): n is a, c, g, or t
  misc_feature (839)..(839): n is a, c, g, or t
  misc_feature (846)..(848): n is a, c, g, or t
  misc_feature (857)..(857): n is a, c, g, or t
  misc_feature (872)..(874): n is a, c, g, or t
  misc_feature (876)..(876): n is a, c, g, or t
  misc_feature (878)..(880): n is a, c, g, or t
  misc_feature (889)..(889): n is a, c, g, or t
  misc_feature (891)..(891): n is a, c, g, or t
  misc_feature (893)..(897): n is a, c, g, or t
  misc_feature (899)..(904): n is a, c, g, or t
  misc_feature (907)..(910): n is a, c, g, or t
  misc_feature (912)..(912): n is a, c, g, or t
  misc_feature (915)..(915): n is a, c, g, or t
  misc_feature (918)..(932): n is a, c, g, or t
  misc_feature (935)..(948): n is a, c, g, or t
  misc_feature (950)..(950): n is a, c, g, or t
  misc_feature (952)..(952): n is a, c, g, or t
  misc_feature (956)..(1017): n is a, c, g, or t
  Peptide Sequence Number=SeqID_12199
  Probeset Number=SeqID_19976
nnnngacatcgaccaggccgtacaactcggcctgggttacccgcaggggccgctggcgtggggcgatgccctcgggccccggcgcatcctcacgattttgcagcgcatgagcgaactcacccacgacccacgttatcgtccaagcccctggctgcggcggcgtgcagtgctggggatttccctgcgtcatgaagagccggcagtcggctgatttcgattcatcacaggacaagaataatgggtgcattgacaggtttgcgggtgctggatttaagccgggtattggccgggccctggtgtggccaggtattggccgacctcggcgccgaagtgatcaagatcgaacggccgcaaagcggtgacgacacccgtggttggggcccgccgtggatgaagaccgacactggcgagtcgtccgggcaagcgtcttattaccagtccaccaaccgcggcaaattatccgtggccatcgacctcgccacctccgaaggccaggaactggtgcgagccctggcggccagctccgacgtactgatcgaaaactacaaggccggctccctggcgcgttatggcctggattacgcgaccctggccgagatcaatccgcggctggtgtattgctccatcaccggcttcggccagaccggcccgcgtgccgaagagcccggctacgacttcatcatccagggcatcggcggcctgatgagcatcaccggcgaacgcgacgacctgcccggcggcggcccgcaaaaagtcggcgtggcgttttccgacctgatgaccggcctgtattccaccgtcgncatccaggccgcactgctcagccgcgaacgcancgncgttggnnngcacatcgncatggcgctgctggnnntncnnngcgcaaccntngnnnnncnnnnnntgnnnncntangcnnnnnnnnnnnnnnnggnnnnnnnnnnnnnngncncgcnnnnnnnnnnnnnnnnnnnnnnnnnnnnnnnnnnnnnnnnnnnnnnnnnnnnnnnnnnnnnn

SEQ ID NO: 5574 - DNA, 752 bp, Zea mays
  misc_feature (1)..(1): n is a, c, g, or t
  misc_feature (748)..(752): n is a, c, g, or t
  Peptide Sequence Number=SeqID_12200
  Probeset Number=SeqID_19977
ngacggcgcaacaggcctcgctgcaaaccctcgatgcgcaaatgggtgagcagcagcaacgcattgcccaggcaaaggcggcgttgagcagtggcgaggccgaggcccggcgcgcgggactcgattatcagcgttatcgtgagttggtcgcacaacaggtggccagcgcccagcacctcgaaaccgtcagtgccagccaggccaaagcccaggcggccctggcacaagcccgcgcccaagttgcgcggcagcaggcgcagttgcaggtgttgcaggcgcgccggcaacaggcgcaggcgcaaatcgtcgagcatcaggcacgcatcggcgaggcccaggccaatctcgccctggccggtaatgcgttgaaggacaccgagattcgcgcgcctttcgacggcgtggtgggccagcgcaaggttcgtcgccagcaatacgtgatgcccggcctgccattgttggcggtggtgccggtggagcaggcctatgtgattgccaattacaaggaaacccagctgcagcacatggcgccggggcagtcagtggagatcgcggtggacagctttgccggcgcgcagtggcacggcaaagtggaaagcatcgcccctggctccggtgccgtgttcgccttgctgccgccggacaacgccaccggcaacttcaccaaaatcgtccagcggtttccggtgaaaatccgcctggagcctggcgaatctcgggttctgccgggcatgtcggtcatcgccannnnn

SEQ ID NO: 5575 - DNA, 944 bp, Zea mays
  misc_feature (1)..(5): n is a, c, g, or t
  misc_feature (725)..(725): n is a, c, g, or t
  misc_feature (727)..(728): n is a, c, g, or t
  misc_feature (770)..(771): n is a, c, g, or t
  misc_feature (779)..(779): n is a, c, g, or t
  misc_feature (790)..(799): n is a, c, g, or t
  misc_feature (805)..(807): n is a, c, g, or t
  misc_feature (828)..(828): n is a, c, g, or t
  misc_feature (836)..(837): n is a, c, g, or t
  misc_feature (839)..(839): n is a, c, g, or t
  misc_feature (841)..(841): n is a, c, g, or t
  misc_feature (845)..(846): n is a, c, g, or t
  misc_feature (861)..(866): n is a, c, g, or t
  misc_feature (872)..(876): n is a, c, g, or t
  misc_feature (878)..(882): n is a, c, g, or t
  misc_feature (884)..(884): n is a, c, g, or t
  misc_feature (889)..(907): n is a, c, g, or t
  misc_feature (911)..(936): n is a, c, g, or t
  misc_feature (941)..(944): n is a, c, g, or t
  Peptide Sequence Number=SeqID_12201
  Probeset Number=SeqID_19978
nnnnncaccttcctcaataccgtggctactcagtccggccactggggcagcaccacctacctgcctgtcgtgaacaacgccagcgccaacaactcgcttaatggctcttcgggcaacctgggcgccaacattgctgcaggcgtgggcaatcaacagggcaacaccactgtgatttcctccggcgtacgtttctgatgcaacggggccttggcaacaaggcccctttttattccagtgtccaccaggccattcgatcatgcggatcatcgccctcaccctcctgttattgctcaccggcccgacttgggcggggcaaatggcgattgctgccatgcccggcggtggcgtgatcttcaagaaggtcgagagcatccgtgaacgcaagttcgccaacctggtggaacagaaaaccgatttcagctgcggtgccgccgccctggccaccatcctgcgccaggcctactggatggatgtggatgaagaccacatcatcaaaggcatgctggtcaacgccgatcaggacctggtccgtacccagggtttctccatgctggacatgaagcgctacctggaaagcatcggcatgcgcgcccggggttaccggatcaacgccgacacactgctaacggtgaaaatcccggtggtggtgctgctggagatccgtggctacaagcacttcgtggtgatgcagcgtgccgacaaggactgggtctacatcggcgacncnntattgggtcacaaacgctatgccaaggacgacttcgtcaaannctggaatngcatcgtcttnnnnnnnnnnggcgannnctatgacaaaaccaacgtgcngcttgacnngncnacanngctgaccgccaaaannnnnntcaatnnnnncnnnnntnctggnnnnnnnnnnnnnnnnnnnggtnnnnnnnnnnnnnnnnnnnnnnnnnncccannnn

SEQ ID NO: 5576 - DNA, 965 bp, Zea mays
  misc_feature (1)..(1): n is a, c, g, or t
  misc_feature (800)..(801): n is a, c, g, or t
  misc_feature (817)..(817): n is a, c, g, or t
  misc_feature (819)..(819): n is a, c, g, or t
  misc_feature (844)..(850): n is a, c, g, or t
  misc_feature (854)..(858): n is a, c, g, or t
  misc_feature (867)..(868): n is a, c, g, or t
  misc_feature (874)..(875): n is a, c, g, or t
  misc_feature (877)..(877): n is a, c, g, or t
  misc_feature (879)..(879): n is a, c, g, or t
  misc_feature (881)..(889): n is a, c, g, or t
  misc_feature (894)..(896): n is a, c, g, or t
  misc_feature (900)..(965): n is a, c, g, or t
  Peptide Sequence Number=SeqID_12202
  Probeset Number=SeqID_19979
naggttcggctgctgcttcgaggggatcaatcggctcctcgatcgggggagggctggatggcaatgccggtgacgacgaggctgccggcgcctcatcgctcatgctcaagcggaccgacgggccatcggcgctaaagctccgatcatcgccgcgctcccacagcatggcagtcgcttctgccgtcttacgatcatccttgaccctggaaatctgctcagacgtggcgttggaatcgtgtcggagtaactcttcgacctgcagcgcttcttgcgcagccttatacagcgcatcttgttgctgactgacgctgaatttttgcagccactcagggccaaactcgtttctaagctgctgcagaacggccgcatgctgagtcccaaggcctgggtagctggagcgactccagcagttgttcagctcggctttccagcttcggcctttcagggtgcggaagaccctgatggcctccagttgcaacaaagaaagcttcgtgtcctgccggctggcattgttagaggctacaggagcatgggccggcggcgcctgtgtcgccgaatcgctgggacgaaggcgtttgatcagggccatcagccttactccccgtccagatcttcggcatcctgcagatcgcccgggacggcgtccagcccgaggtcacggacttcctgccagcccagatcgtcgtgggggatatcacgggctccgacttcaggcaggatcttctgtgtattggtgttggcggtatcgctcatggcagtctccatctagggggaaatcaccatgattctattaactgagnngtttaaaaacaaacgntngtcaattttgagcgcgaaaaaaccnnnnnnngggnnnnncaggatgcnnagaaannangncnnnnnnnnnctggnnnagcnnnnnnnnnnnnnnnnnnnnnnnnnnnnnnnnnnnnnnnnnnnnnnnnnnnnnnnnnnnnnnnnnn

SEQ ID NO: 5577 - DNA, 965 bp, Zea mays
  misc_feature (1)..(66): n is a, c, g, or t
  misc_feature (70)..(72): n is a, c, g, or t
  misc_feature (77)..(85): n is a, c, g, or t
  misc_feature (87)..(87): n is a, c, g, or t
  misc_feature (89)..(89): n is a, c, g, or t
  misc_feature (91)..(92): n is a, c, g, or t
  misc_feature (98)..(99): n is a, c, g, or t
  misc_feature (108)..(112): n is a, c, g, or t
  misc_feature (116)..(122): n is a, c, g, or t
  misc_feature (147)..(147): n is a, c, g, or t
  misc_feature (149)..(149): n is a, c, g, or t
  misc_feature (165)..(166): n is a, c, g, or t
  misc_feature (965)..(965): n is a, c, g, or t
  Probeset Number=SeqID_19980
nnnnnnnnnnnnnnnnnnnnnnnnnnnnnnnnnnnnnnnnnnnnnnnnnnnnnnnnnnnnnnnnnngctnnnccagnnnnnnnnngncntnntttctnngcatcctgnnnnncccnnnnnnnggttttttcgcgctcaaaattgacnancgtttgtttttaaacnnctcagttaatagaatcatggtgatttccccctagatggagactgccatgagcgataccgccaacaccaatacacagaagatcctgcctgaagtcggagcccgtgatatcccccacgacgatctgggctggcaggaagtccgtgacctcgggctggacgccgtcccgggcgatctgcaggatgccgaagatctggacggggagtaaggctgatggccctgatcaaacgccttcgtcccagcgattcggcgacacaggcgccgccggcccatgctcctgtagcctctaacaatgccagccggcaggacacgaagctttctttgttgcaactggaggccatcagggtcttccgcaccctgaaaggccgaagctggaaagccgagctgaacaactgctggagtcgctccagctacccaggccttgggactcagcatgcggccgttctgcagcagcttagaaacgagtttggccctgagtggctgcaaaaattcagcgtcagtcagcaacaagatgcgctgtataaggctgcgcaagaagcgctgcaggtcgaagagttactccgacacgattccaacgccacgtctgagcagatttccagggtcaaggatgatcgtaagacggcagaagcgactgccatgctgtgggagcgcggcgatgatcggagctttagcgccgatggcccgtcggtccgcttgagcatgagcgatgaggcgccggcagcctcgtcgtcaccggcattgccatccagccctcccccgatcgaggagccgattgatcccctcgaagcagcagccgaacctn

SEQ ID NO: 5578 - DNA, 884 bp, Zea mays
  misc_feature (1)..(24): n is a, c, g, or t
  misc_feature (26)..(30): n is a, c, g, or t
  misc_feature (36)..(37): n is a, c, g, or t
  misc_feature (40)..(40): n is a, c, g, or t
  misc_feature (42)..(44): n is a, c, g, or t
  misc_feature (50)..(54): n is a, c, g, or t
  misc_feature (56)..(57): n is a, c, g, or t
  misc_feature (66)..(66): n is a, c, g, or t
  misc_feature (82)..(86): n is a, c, g, or t
  misc_feature (118)..(119): n is a, c, g, or t
  misc_feature (123)..(125): n is a, c, g, or t
  misc_feature (312)..(312): n is a, c, g, or t
  misc_feature (882)..(884): n is a, c, g, or t
  Peptide Sequence Number=SeqID_12203
  Probeset Number=SeqID_19981
nnnnnnnnnnnnnnnnnnnnnnnncnnnnncctgcnncgngnnnagcagnnnnnanncgacgatgncgggcgcgtagaccannnnnatggaggcggcgatgaagatcgcggcccccgnnaggnnnacgcggcggcggccgtagcggtcggccagcgcgccagccaccagcagcgtgctgccgaacaccagcatgaaggcgttggtgatccagttcagcgcctcggggctgccgcccaggtcgcgcgcgatcgacggcagtgcgatggccgggccggtgaaggtgaacggcatggccgcgcacgccaggcacncggcgatcaggatcaggatcttgcgggccgcggcgggcggcggggtaacggacgatggcatggacggcatcacaagggaacgggaacgggaacggtattgaagataccgaggctcgcctggtggataaataggttaaaaatccacacatcacggaattaatttcttcaatggaaccgccatggaccgcctgagcggcttgttgccctttgtccgcagcgccgagctgggcggctttgccgccgccggccgcgacctggacctgtcgccctcggccgtcggcaaggccgtggcgcggctggagcaggacctgcacgtgcggctgttccagcgcagcacgcgccgcatgcaattgaccgaggaaggccggctgttctacgagcgctgcaagcgcatcctggaagacctggacgaggcgcacgacatgctgtcgcagacgctgcgcgaaccgcgcggccggctgcgcgtcagcgcgccgctggtgagctaccacttcctgctgccggtgctgccggccttcgccgcgcgctatccgggcatcgagctggacatggatttcaacgaccgcatcnnn

SEQ ID NO: 5579 - DNA, 887 bp, Zea mays
  misc_feature (1)..(5): n is a, c, g, or t
  misc_feature (7)..(8): n is a, c, g, or t
  misc_feature (10)..(17): n is a, c, g, or t
  misc_feature (22)..(27): n is a, c, g, or t
  misc_feature (29)..(36): n is a, c, g, or t
  misc_feature (38)..(47): n is a, c, g, or t
  misc_feature (56)..(76): n is a, c, g, or t
  misc_feature (78)..(87): n is a, c, g, or t
  misc_feature (96)..(102): n is a, c, g, or t
  misc_feature (104)..(104): n is a, c, g, or t
  misc_feature (109)..(109): n is a, c, g, or t
  misc_feature (111)..(113): n is a, c, g, or t
  misc_feature (118)..(118): n is a, c, g, or t
  misc_feature (120)..(130): n is a, c, g, or t
  misc_feature (132)..(132): n is a, c, g, or t
  misc_feature (134)..(136): n is a, c, g, or t
  misc_feature (146)..(146): n is a, c, g, or t
  misc_feature (148)..(156): n is a, c, g, or t
  misc_feature (181)..(184): n is a, c, g, or t
  misc_feature (883)..(886): n is a, c, g, or t
  Peptide Sequence Number=SeqID_12204
  Probeset Number=SeqID_19982
nnnnntnncnnnnnnnntcgcnnnnnntnnnnnnnncnnnnnnnnnncacgccgannnnnnnnnnnnnnnnnnnnntnnnnnnnnnngacgggcannnnnnncngatcnannncgacngnnnnnnnnnnngncnnnctgtccgacngnnnnnnnnnagggcaacatggaacgcctgcgccnnnncctggtcaaagtggcgggggaggacggcgagcgcttctggctcaaattgcgcgacagctactggaccgcctggggggttggcgtacagccttgaggcaggcggcgccaccggcccgatccgggcccaattgcggcaaattgcgctaaatctcccggtaaagttgggcaggtcatcgctaaaaggctttatgattccgccttttggtactcctgtaacttacggcatatagctggggggctggtaatgaaactacgggcgggaatgcgctgggcgctggggacgatgctgatcgcggcagccacgtcggcggcggtggcgcagaacaaggtcgtcaacgtctacaactgggccgaatacacggctccggacacgatctcgggtttcgagaaggaaaccggcatcaaggtccgctacgacgtctacgacagcaacgacaccctgcaggccaagctcctggccggcaaatcgggttacgacgtcgttgtcccgtccacgcattacgcctcgcgccagatcgaggccggcctgttccagaaactggacaagtccaagatccccaactggaagtacctggatcccgacgtcatggcgctggtcgccgcggtcgatcccggcaacgaatacgccattccctggggctacggcaccaacggcctgggctacaacgtcaccaaggtcaagcagatcatgggcgacannnng

SEQ ID NO: 5580 - DNA, 666 bp, Zea mays
  misc_feature (1)..(5): n is a, c, g, or t
  misc_feature (536)..(537): n is a, c, g, or t
  misc_feature (548)..(559): n is a, c, g, or t
  misc_feature (563)..(573): n is a, c, g, or t
  misc_feature (576)..(582): n is a, c, g, or t
  misc_feature (586)..(666): n is a, c, g, or t
  Peptide Sequence Number=SeqID_12205
  Probeset Number=SeqID_19983
nnnnngacgaacgctcggcctcgctgttcctgggctacgcggcggctgcgctgcggctgcgcgaacagatcgcgcaggccggcatcgtggtcgatgccgagcatccgctgttcgtctacctgccctgcggcgtgggcggcgcgccgggtggcatcgcattcggcctgtcattgctgtatggcgcgcacgcgcactgcttctttgccgaaccggtgcagtcgccctgcttcttgctgcgcatgatggccggccatggccaattgcccggcgtgccggtgccgccgtcggtctacgacatcggcctgaccaaccagaccgaggccgacggcctggcggtgccgcgcgcctccgacctggcgtatgccgccgtcggccagtcgctggccggcgtctacacggtggccgatgacacgctctacggcgatctggcgcggctgcacgacagcgaaggcctgcgcatcgagccgtcggcggcggccggtttttccggtccgcgccaactgttgggcagcctggccgggcagcaatggctgcgnnagcgcggcctnnnnnnnnnnnntctnnnnnnnnnnntannnnnnncttnnnnnnnnnnnnnnnnnnnnnnnnnnnnnnnnnnnnnnnnnnnnnnnnnnnnnnnnnnnnnnnnnnnnnnnnnnnnnnnnn

SEQ ID NO: 5581 - DNA, 656 bp, Zea mays
  misc_feature (1)..(1): n is a, c, g, or t
  misc_feature (654)..(656): n is a, c, g, or t
  Peptide Sequence Number=SeqID_12206
  Probeset Number=SeqID_19984
ngctgtaccctaacgattgccgcgacctgctgactcgccagtacggccccaatctcaagttgcaggccgaccacctgcacactgccgagccgcgttcgatcctgcagcggctgtcacgcaatctgcgccagttgcacctgtccaacgacgaccacctggccgctctggtggacgccgaacgcgtgctggagctgggcaacgccagcgccgccgactacctggcccgggccagtttgtatcagcgtctggattgcccgaacgccgagcgttttgacctggaacacgcgttgatgctcagcgaagacccgatccagcgcctgcgcctgaccgagcgcctggggcatttgccgcccaactctgtggtgcattgacccgcttggcgtaagctgtaccgccccatggatgaggttgtcatgcccctgcgctcccccgccgaacgttacctcgaagattttcaccaacgccagcccggcaccaccagcgcggcattcgccgaactgaaggcggtgaaatacagctcatcctatgccgcattgactgcacatgtgcccaccgcacaaagcccgttgaacgtgctggacttggcctgcggcgatggctacctgctcaagctgctggctgaccgccagcaacccggcttgcaactgaccggtnnn

SEQ ID NO: 5582 - DNA, 898 bp, Zea mays
  misc_feature (642)..(649): n is a, c, g, or t
  misc_feature (717)..(718): n is a, c, g, or t
  misc_feature (722)..(725): n is a, c, g, or t
  misc_feature (728)..(731): n is a, c, g, or t
  misc_feature (741)..(742): n is a, c, g, or t
  misc_feature (744)..(746): n is a, c, g, or t
  misc_feature (793)..(795): n is a, c, g, or t
  misc_feature (799)..(804): n is a, c, g, or t
  misc_feature (815)..(815): n is a, c, g, or t
  misc_feature (817)..(823): n is a, c, g, or t
  misc_feature (826)..(838): n is a, c, g, or t
  misc_feature (842)..(846): n is a, c, g, or t
  misc_feature (848)..(850): n is a, c, g, or t
  misc_feature (853)..(867): n is a, c, g, or t
  misc_feature (872)..(873): n is a, c, g, or t
  misc_feature (875)..(875): n is a, c, g, or t
  misc_feature (877)..(878): n is a, c, g, or t
  misc_feature (880)..(883): n is a, c, g, or t
  misc_feature (886)..(887): n is a, c, g, or t
  misc_feature (889)..(894): n is a, c, g, or t
  Peptide Sequence Number=SeqID_12207
  Probeset Number=SeqID_19985
atgtcgatgttcttcggctcggtgcgcagctttaaatccgctgttgccgccgagttgggcgcgttggccgcgtggatggtgttcaacgcgggtgaccgggtgggcgggctggtgttcaacgatgagcacatcgacagtgtggcgccgttgcgcagccgcaaacgcgtcgaaaccttgtgcagccgcatcgtccgacagaacgccgcgttgagcgccggcaacccggaccatgaagccgacggccagctcgacaaggtgctgcaacgttgcctcgcgctgaccgggcatgaccacctgatctgcatcatcagcgacttcgccggggccggtgaccgcaccctgcaattgatgaggcagctgtcggcgcacaacgatgtggttgccctgcaagtctacgacccgctggcgttgaacgtgccggataccgggcacctgatggtcacccagggccagttgcaggtggaacttgccgtacagaaacgccaggtacgccaacccctgggggactttcttggcgggcgcctaaaggacgtagccagcctgctgcgccgcagccaggtgccgctgttgatgatcagcacggcgctgcctgcagttgaccaactgcgcgatgagctgggccggcgcaatggagcgcggcgnnnnnnnncaatgtgccgagcatcgaacaactcaaggagctaggtctgccggcgccggtcagctactggccgcagnnctgnnnnctnnnnggtgatgctnncnnngctggcgattgccctgctggtgctggcaacccgtgcctggttgcgcnnncttnnnnnngacatatgagntnnnnnnnttnnnnnnnnnnnnnttcnnnnntnnntgnnnnnnnnnnnnnnnatagnncnanngnnnngcnntnnnnnntatt

SEQ ID NO: 5583 - DNA, 793 bp, Zea mays
  misc_feature (658)..(662): n is a, c, g, or t
  misc_feature (682)..(686): n is a, c, g, or t
  misc_feature (688)..(688): n is a, c, g, or t
  misc_feature (691)..(691): n is a, c, g, or t
  misc_feature (701)..(715): n is a, c, g, or t
  misc_feature (717)..(793): n is a, c, g, or t
  Peptide Sequence Number=SeqID_12208
  Probeset Number=SeqID_19986
gggttattagcattgcactattggttcttaaggacgctcaggtgccttgccgtaaagtggtgggcatttcgtcaggagtgaagaccgtgagtgagcgttccagtcattggcaattacagaccatcgtcagccagctgcgcagcgcccgggaccagtggcgcacccgcaatggccgggtcagcggcgagcagggtgggcgcgagctgccttcacgggaagccgtggcgcagattctcgaggcgttgtgtggtgcgctgttccccatgcgtttggggccggtggacctgcgtgaagaaagtgaagacttctacgtcggccataccctggatgtggcgctgaacgcgttgctcgcccaggcgcgactggagctgcggtatgccgcacggcaaggcggccaggatgacagtgaggtagacgcccatgccatccacctgatccaggatttcgccctggcattgccggccttgcgcagcctgttggacaccgacgtactcgccgcctaccacggggacccggcggcgcgcagcgtggatgaagtgctgttgtgctacccggggattctggcggtgattcaccatcgcctggcgcaccacttgtatcgggcgggcttgccgttgctggcgcggatcagtgcggaaatcgcgcactctgcgaccgnnnnngatatccacccgggcgcgcnnnnncnccngagcttcttnnnnnnnnnnnnnnnannnnnnnnnnnnnnnnnnnnnnnnnnnnnnnnnnnnnnnnnnnnnnnnnnnnnnnnnnnnnnnnnnnnnnnnnnnnn

SEQ ID NO: 5584 - DNA, 889 bp, Zea mays
  misc_feature (1)..(3): n is a, c, g, or t
  misc_feature (804)..(806): n is a, c, g, or t
  misc_feature (817)..(820): n is a, c, g, or t
  misc_feature (822)..(825): n is a, c, g, or t
  misc_feature (834)..(836): n is a, c, g, or t
  misc_feature (851)..(889): n is a, c, g, or t
  Peptide Sequence Number=SeqID_12209
  Probeset Number=SeqID_19987
nnngctttgtcgctggcagcctgggtgtcgtcgcgttggcagcgctgtttctcggtcgtcgccagggctggttggtggataccggcgagctgtccactggcactggggagcgtaaacacttcacgctggacgacggcagcttgctgacgctgaacgcacagagccgggcgattgcgcgtttcgacgcacaccagcgtgtgctggagttacgggagggggagttgctggtggacgtggccaaggacccggcgcggcccttcgtggtgcaaacccggcatggccagattcgcgcgttgggtacccgattcctggtgcagcgtgacgaagcgtccacccgtctggtgatgctgcattcgcgagtggaagtggtcactcaggacggcgcgcgccaaatcgtggaggcggggcagagcatgcggtttgatgagcaacacaccttcggccttggcccgctaaagggcgatgaagccggttggagccaaggacgccttgaagtccacgaccggtcgttaagcgaagtgatcgacagcctgcgcagctatcgccacgggattctgcgcctgaatcccaatgtggcgcagctgcgcctgagcggcatctatcccctggacgatacggaccgcaccctgcagctgctggagaattcattaccgattcgcgtgacgtatcacagcgcctattgggtaagtattgaggcccgttaaaccggttataaactcatagcatcttcgcctaaacaccgccctataaaaacgcgtctgccgctgctcaacccctgtagacacattcaacagggagatcctnnntgttctttatnnnnannnnaattacctnnnctgacgctggcggcnnnnnnnnnnnnnnnnnnnnnnnnnnnnnnnnnnnnnnn

SEQ ID NO: 5585 - DNA, 870 bp, Zea mays
  misc_feature (769)..(769): n is a, c, g, or t
  misc_feature (820)..(820): n is a, c, g, or t
  misc_feature (822)..(823): n is a, c, g, or t
  misc_feature (839)..(839): n is a, c, g, or t
  misc_feature (841)..(841): n is a, c, g, or t
  misc_feature (845)..(849): n is a, c, g, or t
  misc_feature (860)..(868): n is a, c, g, or t
  Peptide Sequence Number=SeqID_12210
  Probeset Number=SeqID_19988
gtgctgtgttttggcggcaccaagaacggcatggccgtgggtgaagcgatcctgttcttcaaccacaagctggccgaagacttcgactaccgctgcaaacaggcagggcagcttgcctcaaagatgcgcttcctctccgccccgtgggtgggcctgctggaaaacgacgcatggctcaaacatgcccgccacgccaaccactgcgcgcaattgctcagcagcctggtggcggatattccgggtgtggagttgatgttcccggtgcaggccaacggcgtgttcctgcaactgtcggaaccggcgattgccgcgctgacggccaagggctggcgcttctacaccttcatcggcaagggtggcgcgcggttcatgtgtgcgtgggataccgaggaagagcgcgtaagagaattagccgctgatattcgggaagtgatgagcgcttgaagtaggcatcagtccctcagataatggcgaaaggccgagactgttttttgatatttctgacagcaaccaactccgctttcattgactagcctcttggaacccgaaaggaaaaggccgcctttcgggactaaccgccagccgaacagtcggccggaaacggaaatccagcagagggcaataccatggaagcacaacgctacggaaacaacctgctaggcgaaggcactatcagcaccaccgtcatcgactgggatgaattcagaaaatccgcgaaaatcggtgacaccatcagcgagccgacgaggacattgcagatcactgacanagtctatgaactgacagcatcaggccagcacttcgtcgtgcacatctacgncnnataaccctaactgatnantccnnnnntatgcgtgggnnnnnnnnncc

SEQ ID NO: 5586 - DNA, 173 bp, Zea mays
  misc_feature (1)..(3): n is a, c, g, or t
  Peptide Sequence Number=SeqID_12211
  Probeset Number=SeqID_19989
nnntggcaaaaactcgcctgcgccctggccacacgcggtgcattcagcatcgtcaccggcggcccgggcaccggcaagaccaccacggtggtgcgcttgctcgcgctgttgcaggcgccagcggtagagagtggtagcgcgttgcgcatccgcctggcggcacccaccggcaa

SEQ ID NO: 5587 - DNA, 173 bp, Zea mays
  misc_feature (171)..(173): n is a, c, g, or t
  Peptide Sequence Number=SeqID_12212
  Probeset Number=SeqID_19990
ttgccggtgggtgccgccaggcggatgcgcaacgcgctaccactctctaccgctggcgcctgcaacagcgcgagcaagcgcaccaccgtggtggtcttgccggtgcccgggccgccggtgacgatgctgaatgcaccgcgtgtggccagggcgcaggcgagtttttgccannn

SEQ ID NO: 5588 - DNA, 919 bp, Zea mays
  misc_feature (1)..(3): n is a, c, g, or t
  misc_feature (822)..(823): n is a, c, g, or t
  misc_feature (825)..(825): n is a, c, g, or t
  misc_feature (828)..(829): n is a, c, g, or t
  misc_feature (834)..(835): n is a, c, g, or t
  misc_feature (843)..(848): n is a, c, g, or t
  misc_feature (851)..(857): n is a, c, g, or t
  misc_feature (864)..(864): n is a, c, g, or t
  misc_feature (866)..(866): n is a, c, g, or t
  misc_feature (884)..(884): n is a, c, g, or t
  misc_feature (896)..(896): n is a, c, g, or t
  misc_feature (902)..(902): n is a, c, g, or t
  misc_feature (905)..(906): n is a, c, g, or t
  misc_feature (908)..(913): n is a, c, g, or t
  misc_feature (915)..(915): n is a, c, g, or t
  misc_feature (917)..(917): n is a, c, g, or t
  misc_feature (919)..(919): n is a, c, g, or t
  Peptide Sequence Number=SeqID_12213
  Probeset Number=SeqID_19991
nnngttcccaaggtaatgaccttcatcaccagggatttcttgatcgtcaacgagtgatgatcttcaggcctggcggggggcagcttgcagcctttcaagtcaataaaatgatacggaatctgagcttcgccggtgtttgcggacttggtcccggctgctgcggcaagcgtcagtatttgcttgaagacatgggtcgctgtctgcaggtcttccttggaatctatcgcgcccagaaagtaccgatcggactttttgcgcaacgctgcgatgtatacccgtgaactgccgggttctgtctcttcatccagactataggcaaggaagttcgaagcgatctgggccactgcaaaaccacaaagcagtgcgccgttgaccggtgcatcatgcccggattgttcaagaacaagggtacgtagaagcagcatgacgttcaggctccatttcaaattggcagaacaaatacacgccaaataaacaacgacaataattaaaacatcaaaagcctcacaattgtttcagcgagccatcgcttgacacgtaggacttatcttattcatgcgctacaacgtttccaagactgcctattgaacgtaccattttttaacaatacgaccctggacacgcacacaacaaaatatttcaacttttgacttttctaacattcacaacctgccgctcatgcaggttaatcgaggcctcgtcttaacgagccttgccataaacattcagtagaaaagcataatgatcgagataacgagcctgacaaaaaagatgggcgggaaaaacatcgtccacgacttttcatttaatgtccaacctcannantgnntgggnntatttggnnnnnnatnnnnnnngggaaancnactatcgtcaaaatgatngcaggctcgatnctcccntcnncnnnnnntntnan

SEQ ID NO: 5589 - DNA, 919 bp, Zea mays
  misc_feature (1)..(1): n is a, c, g, or t
  misc_feature (3)..(3): n is a, c, g, or t
  misc_feature (5)..(5): n is a, c, g, or t
  misc_feature (7)..(12): n is a, c, g, or t
  misc_feature (14)..(15): n is a, c, g, or t
  misc_feature (18)..(18): n is a, c, g, or t
  misc_feature (24)..(24): n is a, c, g, or t
  misc_feature (36)..(36): n is a, c, g, or t
  misc_feature (54)..(54): n is a, c, g, or t
  misc_feature (56)..(56): n is a, c, g, or t
  misc_feature (63)..(69): n is a, c, g, or t
  misc_feature (72)..(77): n is a, c, g, or t
  misc_feature (85)..(86): n is a, c, g, or t
  misc_feature (91)..(92): n is a, c, g, or t
  misc_feature (95)..(95): n is a, c, g, or t
  misc_feature (97)..(98): n is a, c, g, or t
  misc_feature (917)..(919): n is a, c, g, or t
  Peptide Sequence Number=SeqID_12214
  Probeset Number=SeqID_19992
ntnanannnnnngnngangggagnatcgagcctgcnatcattttgacgatagtngntttcccnnnnnnnatnnnnnnccaaatanncccanncantnntgaggttggacattaaatgaaaagtcgtggacgatgtttttcccgcccatcttttttgtcaggctcgttatctcgatcattatgcttttctactgaatgtttatggcaaggctcgttaagacgaggcctcgattaacctgcatgagcggcaggttgtgaatgttagaaaagtcaaaagttgaaatattttgttgtgtgcgtgtccagggtcgtattgttaaaaaatggtacgttcaataggcagtcttggaaacgttgtagcgcatgaataagataagtcctacgtgtcaagcgatggctcgctgaaacaattgtgaggcttttgatgttttaattattgtcgttgtttatttggcgtgtatttgttctgccaatttgaaatggagcctgaacgtcatgctgcttctacgtacccttgttcttgaacaatccgggcatgatgcaccggtcaacggcgcactgctttgtggttttgcagtggcccagatcgcttcgaacttccttgcctatagtctggatgaagagacagaacccggcagttcacgggtatacatcgcagcgttgcgcaaaaagtccgatcggtactttctgggcgcgatagattccaaggaagacctgcagacagcgacccatgtcttcaagcaaatactgacgcttgccgcagcagccgggaccaagtccgcaaacaccggcgaagctcagattccgtatcattttattgacttgaaaggctgcaagctgccccccgccaggcctgaagatcatcactcgttgacgatcaagaaatccctggtgatgaaggtcattaccttgggaacnnn

SEQ ID NO: 5590 - DNA, 863 bp, Zea mays
  misc_feature (1)..(8): n is a, c, g, or t
  misc_feature (736)..(863): n is a, c, g, or t
  Peptide Sequence Number=SeqID_12215
  Probeset Number=SeqID_19993
nnnnnnnngtctgtcgccacgcctgccgctcgccggggcagcactgctagtgctgtttgtcggggtcgagtgggtgggcgtgaagaccaacgccaccgtcgatgaacatgaccaattcaacgtggtggtggagttcgtcaatcgtaactaccaggaagatgaccgcatcgtcatcagcgacatgctgtggtacctgccctacgtctattacgatgagaccgacgcccagttgcagctcttcacaccgccgaccgcctccggcaagtccacacggccgaacgcctatggttttggcaccttggtggaccaggacggcgggcgtatttaccttgatcgcttgtcggcgttacccgccgagacccagcgtgtatggctgatcagcggcacggagccgccggatgagtttgctccgttaccgacagggtggcgccagctcagccagcaggatggcggtggcgcacgagcccggctgttcgtgctgtgtaacgcgccagcgggcgtgcaccgcgagggttgcgattaatctgcgcaacaccggagaggttcatgttcgcctggggggctagactcaggtgaaccatttctccaggaacgcctcatggaatccccagtccacaacttgccatcgttgttcaaacagctcggtttgcccgatgacccggtcagcattgagcggttcatcgcggtccactccccactcaaacccgaactgcacctggcggatgcgtttttctgnnnnnnnnnnnnnnnnnnnnnnnnnnnnnnnnnnnnnnnnnnnnnnnnnnnnnnnnnnnnnnnnnnnnnnnnnnnnnnnnnnnnnnnnnnnnnnnnnnnnnnnnnnnnnnnnnnnnnnnnnnnnnnnn

SEQ ID NO: 5591 - DNA, 935 bp, Zea mays
  misc_feature (1)..(56): n is a, c, g, or t
  misc_feature (58)..(62): n is a, c, g, or t
  misc_feature (66)..(68): n is a, c, g, or t
  misc_feature (99)..(101): n is a, c, g, or t
  misc_feature (104)..(106): n is a, c, g, or t
  misc_feature (140)..(142): n is a, c, g, or t
  misc_feature (931)..(935): n is a, c, g, or t
  Peptide Sequence Number=SeqID_12216
  Probeset Number=SeqID_19994
nnnnnnnnnnnnnnnnnnnnnnnnnnnnnnnnnnnnnnnnnnnnnnnnnnnnnnnngnnnnncctnnncagccggtgacggtagcgggtgtgcagacgnnnggnnntgtacctgggcgaggaagtgctcaacaacaattnnnctgaagttgatgagttcaagcagatgtcgggcggcgtggcgaccttgttcgtacgcagcggcgaagactttgtccgtgtcagcacctccctgaccaagcaggacggcagccgcgccatcggtacggcgctggatcaccagcatccggcctatcaacgtttgctgggcgggcagggctacgtcggccgcgcggtgctgttcgatcgctcctacatgacccaatacagcccggtgcgtgatgccagcggcaaagtgattgcggtgctgtttgtcggcttcgactacaccgacgcgcagaacgcccagttcgacaacctcaagcgcttccgcatcggccagaccggctcccttgcgctgctggatgagcagaagcattggctggtaccgcccgctggggtgcaggcgctggatcagtcgattccggtcatgctcgacctggccgccaaacctggaaaaggccgtttctggagcgacaagaacgaagatttctacagcgtcgcggtgccgtttgaaggcggcccgtggtcggtggtggcgagcatgccgaaagccgaaattcgcgcggtgacctggtcggtggggattcgcctggcgatcggcagtttgctcgcgatgctgctggcggtgggcgcagcggtctggctgctgcgcagcaagttgcagccgttgggcgacctggtacgtcaggcagaagccctgggcgccggtgatttgagcgcgcgcttgaacgtttccagccatgacgaaatcggccagttggcccgcagtttcaaccagatgggcgaagcgnnnnn

SEQ ID NO: 5592 - DNA, 1006 bp, Zea mays
  misc_feature (1)..(1): n is a, c, g, or t
  misc_feature (4)..(12): n is a, c, g, or t
  misc_feature (16)..(69): n is a, c, g, or t
  misc_feature (72)..(105): n is a, c, g, or t
  misc_feature (107)..(126): n is a, c, g, or t
  misc_feature (134)..(141): n is a, c, g, or t
  misc_feature (144)..(158): n is a, c, g, or t
  misc_feature (165)..(171): n is a, c, g, or t
  misc_feature (175)..(175): n is a, c, g, or t
  misc_feature (177)..(182): n is a, c, g, or t
  misc_feature (209)..(211): n is a, c, g, or t
  misc_feature (214)..(216): n is a, c, g, or t
  misc_feature (220)..(220): n is a, c, g, or t
  misc_feature (222)..(226): n is a, c, g, or t
  misc_feature (274)..(276): n is a, c, g, or t
  misc_feature (1006)..(1006): n is a, c, g, or t
  Peptide Sequence Number=SeqID_12217
  Probeset Number=SeqID_19995
ncannnnnnnnnaatnnnnnnnnnnnnnnnnnnnnnnnnnnnnnnnnnnnnnnnnnnnnnnnnnnnnnnggnnnnnnnnnnnnnnnnnnnnnnnnnnnnnnnnnngnnnnnnnnnnnnnnnnnnnnttttttgnnnnnnnncannnnnnnnnnnnnnncagcgtnnnnnnncagntnnnnnngctggcggggcagggcgccgtgggtannnaannncgcncnnnnngacagcgaaattcatgcgctgctcaagccgctggatcaccaagacacnnnagttcgcgtcaccgccgaacgcgctctgaacaagcacctcaacggtggctgccaggtgccgatcgcctgttacgccgtgcttgagggcgaaaacctctggctgcgtggcctggtgggcgacccgagtggtgggctgctgctcactgcagagattcgcgggccgcaaagcgaggcgaccagcctgggtatcaaagtcgccgaagaactgctggaaaaaggcgccggtgccatcctgcaggcggtgtacggcgaggccggcccgcagtgacgcaatggcgtgtgctgctgacgcggcccgccgaggagtcggcggccctggcggcgacgttatctgaggaaggtattttcagcagcagcctgccgttgctggagatcgaagcgctgcccgtcacgcttgagcaacacgcgatctttcgccagctggaccgttattgtgcggtgatcgtggtgagcaagcctgcggcgcgcctgagcgtgcagttgttggcgcaacactggtcgcaacctccggcgttgccatggttcagcgtcggcgccgctacggcgaaggtgttggccgaccacggccttgacgtcagttgtccccaggaaggtgacgacagtgaggccttgcttgaattggctgccctgcgcgaggctattgcacagcccggtgcccgggtgctgatcctgcggggcgagggcgggagagagctgctggctgagcgtttacgcgagcaaggtgctagtn

SEQ ID NO: 5593 - DNA, 698 bp, Zea mays
  misc_feature (1)..(6): n is a, c, g, or t
  misc_feature (533)..(533): n is a, c, g, or t
  misc_feature (572)..(573): n is a, c, g, or t
  misc_feature (587)..(587): n is a, c, g, or t
  misc_feature (613)..(615): n is a, c, g, or t
  misc_feature (617)..(617): n is a, c, g, or t
  misc_feature (621)..(624): n is a, c, g, or t
  misc_feature (631)..(634): n is a, c, g, or t
  misc_feature (638)..(651): n is a, c, g, or t
  misc_feature (654)..(675): n is a, c, g, or t
  misc_feature (677)..(679): n is a, c, g, or t
  misc_feature (683)..(693): n is a, c, g, or t
  misc_feature (697)..(698): n is a, c, g, or t
  Peptide Sequence Number=SeqID_12218
  Probeset Number=SeqID_19996
nnnnnnaacaccaccaaactgatgggcagcgaagacttcgcctggatgctgcaacgctgccccggcagctacctgtttatcggcaacggcgtctcgcggccgatggtccacaaccccgcctatgacttcaacgacgacatcctgttgaccggcgccgcctactggggcgcgctggccgagagctggctcaagcccgcctgacgacctcttttttctgccgctggaccctttcccaacaggttgaatggagtgttcctcatgcagactgcaaaacagggcgtatcccgcacccgccaggtcgtggcggcggtgatcggcaatgcgctggaatggtatgacttcatcgtttacggctttctcgccagcatcatcgcccggcaatttttcccgtcggaggatgaatacgcctcgctgctgatggccctggccacctttggcgtcggcttcttcatgcgcccggtgggcgggattctgctgggcatgtattcggaccgtaaaggccgcaaggccgcgatgcagttgatcatccggcngatgaccgtctccatcgccttgatcgctttcgctcccanntacgccgcgatcgncatgggcgcgccgatgctgatcgtgnnngnacgnnnnctccagnnnnttgnnnnnnnnnnnnnntannnnnnnnnnnnnnnnnnnnnngnnngaannnnnnnnnnntcann

SEQ ID NO: 5594 - DNA, 651 bp, Zea mays
  misc_feature (1)..(8): n is a, c, g, or t
  misc_feature (43)..(48): n is a, c, g, or t
  misc_feature (497)..(498): n is a, c, g, or t
  misc_feature (534)..(549): n is a, c, g, or t
  misc_feature (556)..(567): n is a, c, g, or t
  misc_feature (570)..(577): n is a, c, g, or t
  misc_feature (582)..(592): n is a, c, g, or t
  misc_feature (597)..(624): n is a, c, g, or t
  misc_feature (628)..(644): n is a, c, g, or t
  Peptide Sequence Number=SeqID_11637
  Probeset Number=SeqID_19997
nnnnnnnncgccagccgcggaccggccgccaatgcgtaatcgnnnnnngccacggcctgccgcgccagcgcctcgacgtcggccggcggatcgccacgcacgccttgcagcagcgtgccgatgcgcaggccgcgcagcttttcgatcacctgcgcggcgtcgaacggcggcatcagcaccgccacgtcgcgcagcgcttccacgtatttgccgccgctgccgatcatgacgaccggccccagcactggatcgacgcgcgcgcccaacgcgcattcgtgcaggccgcgctgcatccgcgccaccagccaggcgccatcccgcacgttcagcttacccaaggtttgggcctgatgggcaaacgccgcgcgcagcgcggcctcgtcgttcagtcccagcgccaccagcccgtgctcggacttgtgcggcagttgtgccgagcaggctttcaacgccaccggcgcgccgatacggcgccacgcggcgacggcctcgtcggnngtgcggcagacggcgtgctcgatcaccgccagcccnnnnnnnnnnnnnnnngcaaggnnnnnnnnnnnngannnnnnnncgccnnnnnnnnnnnacgcnnnnnnnnnnnnnnnnnnnnnnnnnnnntccnnnnnnnnnnnnnnnnngaccgtc

SEQ ID NO: 5595 - DNA, 651 bp, Zea mays
  misc_feature (8)..(24): n is a, c, g, or t
  misc_feature (28)..(55): n is a, c, g, or t
  misc_feature (60)..(70): n is a, c, g, or t
  misc_feature (75)..(82): n is a, c, g, or t
  misc_feature (85)..(96): n is a, c, g, or t
  misc_feature (103)..(118): n is a, c, g, or t
  misc_feature (154)..(155): n is a, c, g, or t
  misc_feature (604)..(609): n is a, c, g, or t
  misc_feature (644)..(651): n is a, c, g, or t
  Peptide Sequence Number=SeqID_11638
  Probeset Number=SeqID_19998
gacggtcnnnnnnnnnnnnnnnnnggannnnnnnnnnnnnnnnnnnnnnnnnnnngcgtnnnnnnnnnnnggcgnnnnnnnntcnnnnnnnnnnnnccttgcnnnnnnnnnnnnnnnngggctggcggtgatcgagcacgccgtctgccgcacnnccgacgaggccgtcgccgcgtggcgccgtatcggcgcgccggtggcgttgaaagcctgctcggcacaactgccgcacaagtccgagcacgggctggtggcgctgggactgaacgacgaggccgcgctgcgcgcggcgtttgcccatcaggcccaaaccttgggtaagctgaacgtgcgggatggcgcctggctggtggcgcggatgcagcgcggcctgcacgaatgcgcgttgggcgcgcgcgtcgatccagtgctggggccggtcgtcatgatcggcagcggcggcaaatacgtggaagcgctgcgcgacgtggcggtgctgatgccgccgttcgacgccgcgcaggtgatcgaaaagctgcgcggcctgcgcatcggcacgctgctgcaaggcgtgcgtggcgatccgccggccgacgtcgaggcgctggcgcggcaggccgtggcnnnnnncgattacgcattggcggccggtccgcggctggcgnnnnnnnn

SEQ ID NO: 5596 - DNA, 293 bp, Zea mays
  misc_feature (279)..(286): n is a, c, g, or t
  misc_feature (291)..(293): n is a, c, g, or t
  Peptide Sequence Number=SeqID_11639
  Probeset Number=SeqID_19999
tcggcgccctcgcccgcctgggtggcgaccagttcgccctggtgcaggccgatatcgagcaaccctacgaagccgccgagctggcgcaaagcatcctcgatgacctggaggccgaattcgccctcgaccacgaacagatccgcctgcgtgccaccatcggcatcaccctgttcccggaagacggcgacagcaccgagaagctgctgcaaaaagccgaacagaccatgaccctggccaagagccgttcgcgcaaccgctaccagttctatatcgccagcnnnnnnnngggannn

SEQ ID NO: 5597 - DNA, 913 bp, Zea mays
  misc_feature (1)..(1): n is a, c, g, or t
  misc_feature (9)..(9): n is a, c, g, or t
  misc_feature (12)..(17): n is a, c, g, or t
  misc_feature (24)..(28): n is a, c, g, or t
  misc_feature (30)..(32): n is a, c, g, or t
  misc_feature (56)..(61): n is a, c, g, or t
  misc_feature (69)..(69): n is a, c, g, or t
  misc_feature (71)..(74): n is a, c, g, or t
  misc_feature (76)..(76): n is a, c, g, or t
  misc_feature (78)..(90): n is a, c, g, or t
  misc_feature (92)..(92): n is a, c, g, or t
  misc_feature (144)..(145): n is a, c, g, or t
  misc_feature (148)..(162): n is a, c, g, or t
  misc_feature (206)..(206): n is a, c, g, or t
  misc_feature (218)..(219): n is a, c, g, or t
  Peptide Sequence Number=SeqID_11640
  Probeset Number=SeqID_20000
nccgccaangannnnnnggtgtannnnncnnnatgcagccgcaaagcggccaaagnnnnnnccaagagntnnnncngnnnnnnnnnnnnncntggcgggctcgggcggtgatggtgttcctgatcgcgttgtttgcgcagaacnntgnnnnnnnnnnnnnnnttcgctggcgatctgggtcggcatctgcactgctggcgcgaccngcaatcgcaacnntcgcgcctacggttttgtgctggcaggctacaccgcggcgatggttggcttgccggccctggcccatcccgatggcgccttcatggcggccgtgtggcgggtcctggagatctcgttggggattgtctgctccacgttggtcagcgccgcgatcctgccgcaaaccgccagcgccgcgatgcgcaacgctctgtaccaacgtttcggtgtgtttgcgctgttcgtcaccgacggtctgcgcggtcgcagcgagcgtgaagggtttgaacgcagcaacgtacgctttatcgccgaagccgtgggcctggaagggctgcgcagcatcacggtgttcgaagacccgcacatgcgtcggcgcaatggtcggctgacgcgcttgaacagcgagttcatgagcatcactactcgcttcaatgccttgcaccaattgctcgaacgcctgcgcagccaagaggccgatcacgtggtggccgccatcaaacccggcctgcaagacctcgcggaattgctcgacggtttttccggccgtgccctcaccagccccgacgcggcgcgcctggccaatcagttgaatacctataaggaaggcctgcccgccaaggtacgcagcctgcgcacgagcttccaggaaagtcagcccagcgacgccgagcagctggattttcacaccgcctacgaactgctgtaccgcttc

SEQ ID NO: 5598 - DNA, 655 bp, Zea mays
  misc_feature (1)..(2): n is a, c, g, or t
  misc_feature (641)..(641): n is a, c, g, or t
  misc_feature (648)..(655): n is a, c, g, or t
  Peptide Sequence Number=SeqID_11641
  Probeset Number=SeqID_20001
nnagccgcggcagatacgtcatgcgcaccgcgaattcgaaatcgcgattgagcaggaattcgagcggggtcttgttctcgtcgccgcgctggtcgggccgggcgccggcggccagcagcatgtccaggatctcgggcgtgccgtacagcagggccagttgcagcgacggacggcgcgattcgtaggtgatgtcgtcgagcgccggccgggtcgccagcagcgccgccagcatgcggctgcgggccggcagcgcggcctgataggcctggcgcaggcgcgccgcctcgtccgccggcatgtcccaatacacgtgcttgccgcgctcgcccgccggcctcagcagcgcgtgcagcagcggcacgccttccagcgcgtagtcgcccggctgcttcactttggccagcgcggcggtgaaggccgcctcgtcgccggcggcggcggcgctgaacaaggcgcgggtctcggcggtctcggccgcctggtattcgcggtagggcgatacgcagtcgcaatcggaccgcggcttgggtggcggcgcggccgggggcggtggcgccacggacggcggcgcggcgggcggcggcggcggatcgatctggaattcggccggggccggggcgggagcgggagtggatgcgggngccgcgnnnnnnnn

SEQ ID NO: 5599 - DNA, 655 bp, Zea mays
  misc_feature (1)..(8): n is a, c, g, or t
  misc_feature (15)..(15): n is a, c, g, or t
  misc_feature (654)..(655): n is a, c, g, or t
  Probeset Number=SeqID_20002
nnnnnnnncgcggcncccgcatccactcccgctcccgccccggccccggccgaattccagatcgatccgccgccgccgcccgccgcgccgccgtccgtggcgccaccgcccccggccgcgccgccacccaagccgcggtccgattgcgactgcgtatcgccctaccgcgaataccaggcggccgagaccgccgagacccgcgccttgttcagcgccgccgccgccggcgacgaggcggccttcaccgccgcgctggccaaagtgaagcagccgggcgactacgcgctggaaggcgtgccgctgctgcacgcgctgctgaggccggcgggcgagcgcggcaagcacgtgtattgggacatgccggcggacgaggcggcgcgcctgcgccaggcctatcaggccgcgctgccggcccgcagccgcatgctggcggcgctgctggcgacccggccggcgctcgacgacatcacctacgaatcgcgccgtccgtcgctgcaactggccctgctgtacggcacgcccgagatcctggacatgctgctggccgccggcgcccggcccgaccagcgcggcgacgagaacaagaccccgctcgaattcctgctcaatcgcgatttcgaattcgcggtgcgcatgacgtatctgccgcggctnn

SEQ ID NO: 5600 - DNA, 195 bp, Zea mays
  misc_feature (1)..(3): n is a, c, g, or t
  misc_feature (5)..(5): n is a, c, g, or t
  misc_feature (7)..(7): n is a, c, g, or t
  Peptide Sequence Number=SeqID_11642
  Probeset Number=SeqID_20003
nnnangntgctgaacgcggcggtggggccgaagatggcgcgctacctggagcgattcctgcagcgcgtgcgcgagctggacatcggccacgagccgcacaccatccactccaacggcggcctgatgtcgatcgccacggtgcgccagtatccggtgcgcacctgcctgtcggggccggccgccggcgtggtgggc

SEQ ID NO: 5601 - DNA, 195 bp, Zea mays
  misc_feature (189)..(189): n is a, c, g, or t
  misc_feature (191)..(191): n is a, c, g, or t
  misc_feature (193)..(195): n is a, c, g, or t
  Peptide Sequence Number=SeqID_11643
  Probeset Number=SeqID_20004
gcccaccacgccggcggccggccccgacaggcaggtgcgcaccggatactggcgcaccgtggcgatcgacatcaggccgccgttggagtggatggtgtgcggctcgtggccgatgtccagctcgcgcacgcgctgcaggaatcgctccaggtagcgcgccatcttcggccccaccgccgcgttcagcancntnnn

SEQ ID NO: 5602 - DNA, 1147 bp, Zea mays
  misc_feature (1)..(231): n is a, c, g, or t
  misc_feature (233)..(239): n is a, c, g, or t
  misc_feature (243)..(244): n is a, c, g, or t
  misc_feature (246)..(257): n is a, c, g, or t
  misc_feature (261)..(262): n is a, c, g, or t
  misc_feature (265)..(266): n is a, c, g, or t
  misc_feature (268)..(268): n is a, c, g, or t
  misc_feature (277)..(282): n is a, c, g, or t
  misc_feature (289)..(289): n is a, c, g, or t
  misc_feature (292)..(293): n is a, c, g, or t
  misc_feature (299)..(299): n is a, c, g, or t
  misc_feature (305)..(308): n is a, c, g, or t
  misc_feature (312)..(313): n is a, c, g, or t
  misc_feature (334)..(340): n is a, c, g, or t
  misc_feature (359)..(359): n is a, c, g, or t
  Peptide Sequence Number=SeqID_11644
  Probeset Number=SeqID_20005
nnnnnnnnnnnnnnnnnnnnnnnnnnnnnnnnnnnnnnnnnnnnnnnnnnnnnnnnnnnnnnnnnnnnnnnnnnnnnnnnnnnnnnnnnnnnnnnnnnnnnnnnnnnnnnnnnnnnnnnnnnnnnnnnnnnnnnnnnnnnnnnnnnnnnnnnnnnnnnnnnnnnnnnnnnnnnnnnnnnnnnnnnnnnnnnnnnnnnnnnnnnnnnnnnnnnnnnnnnnnnnnnnnnnnnncnnnnnnnatgnncnnnnnnnnnnnnccgnnacnncnagcacaccnnnnnntcatcgntcnnatcatncgcccnnnntttnngggcctgccgggcccctgctnnnnnnncgctgcgctgatcgcctcnctgctgtccgtggcgccctgcgcgcagtcggcggtgaagattgaaggcacgcgcctgatctactttggccaggataaagaagccagcctcaacgtgatcaaccagcagtcgcgccaggtggtggtgcaaagctggatcacccgcgaagacgaagatgcaacccgggcggtacccttcgccgtggtgcagccgctggtacaactggatgccgggcaacatcacgtgctgcgggtcctgtatgccggtgaagggttgcccggtgatcgggagtcgctgttctggctcaacgtcatggaaatcccgctgaagccggaaagccccaacagcgtgcagtttgcggtgcgccagcgcctcaagctgttctatcgcccgcccgggctcgcgggcggctcggcacaagccgtgcggcaactggcgtggagcagctctgacgggcactccattgccgtgaccaaccagagtgcctttcacctgtccctggtgaatctccagaccaataccgccggcaagactcacgcgctggacgactacctgctgctcaagcccggggagcgcaaggtcctcgacacccaagcgcctatcaatgccggaacccaaatccactttaccgaaatcaccgatatcggcttgcaggcgcgccatagcgcagccctcaagtgatagatcgcggggaacaccgacccatgccacacgttaaacacctgctactcgccgccctgtgcacttgcgccgccctccccgccaccagttatgcgctggcctgccgggaagacggcagcggatcgacc

SEQ ID NO: 5603 - DNA, 498 bp, Zea mays
  misc_feature (491)..(498): n is a, c, g, or t
  Peptide Sequence Number=SeqID_11645
  Probeset Number=SeqID_20006
gctataccgctggctggccatcggcgacccggacgtgttccgcgccatggtcgccagcctgttcgacatggcgcgggtgtcggtcgaggtgatggtgctgttgttcggcacgctgacgctgtggctggggttcctgcgcatcgccgagggcgccgggctggtggaacggctggcgcggctgctggggccgctgttcgcgcgcttgatgcccgaggtgccgcgcaaccaccccgcgatcggcttgatcacgctcaacttcgccgccaacggcctgggcctggacaatgccgccacgcccatcggcctgcgcgccatgcgcgaactgcaatcgctcaaccccaggcccgacaccgccagcaacgcccagatcctgttcctggtgctcaacgcctcgtcgctgacgctgctgccggtgacgctgttcatgttccgcgcgcagcagggcgcgcccgaccccaccctggtgttcctgccgatcctgctggccaccnnnnnnnn

SEQ ID NO: 5604 - DNA, 321 bp, Zea mays
  misc_feature (1)..(6): n is a, c, g, or t
  Peptide Sequence Number=SeqID_11646
  Probeset Number=SeqID_20007
nnnnnnagcgtgccaggatgccggtgtccaggcccagggcaattgccgccacacccgccagcatcaatgcacccaggccacggcgcagccattcaccggcgcccagggaacgcttcatgaagccaaagactttaccgccgaccagcaacgccaaggccagggaggtggcagcgcctgccgcgtaggccagcaagagcaaggtagtgccgatactggcgccttgcagcgcggcgcccgtcagcaccaaccccaggataggcccggcgcacggagcccacagcagcccggtggccacgccgatcaggaatgaagcgcccggac

SEQ ID NO: 5605 - DNA, 321 bp, Zea mays
  misc_feature (316)..(321): n is a, c, g, or t
  Peptide Sequence Number=SeqID_11647
  Probeset Number=SeqID_20008
gtccgggcgcttcattcctgatcggcgtggccaccgggctgctgtgggctccgtgcgccgggcctatcctggggttggtgctgacgggcgccgcgctgcaaggcgccagtatcggcactaccttgctcttgctggcctacgcggcaggcgctgccacctccctggccttggcgttgctggtcggcggtaaagtctttggcttcatgaagcgttccctgggcgccggtgaatggctgcgccgtggcctgggtgcattgatgctggcgggtgtggcggcaattgccctgggcctggacaccggcatcctggcacgctnnnnnn

SEQ ID NO: 5606 - DNA, 740 bp, Zea mays
  misc_feature (736)..(740): n is a, c, g, or t
  Peptide Sequence Number=SeqID_11648
  Probeset Number=SeqID_20009
tggtacctgcgggacaaccattgccgcctggtgccgggtgattcgcccttgggttatcgcctgccactggcctcgcagccgtgggtgacggcggcggactatccgttcgtacatcccaccgatcccaaccaggacctgcccgacctgccgaccccctcacagttgcaaagccacggtgagtcggccgccagcaaagaccgtattcctaagatcgacgagtccgcggactggctgacccgcaccgccctgtgtgccgaagcgcgggaaggccggctctacttgttcatgccgccgctggagcgggtggaggattatctggagctggtggcggccatcgaggccaccgctgaagagctgcattgcccggtgctgctggaaggctacgagccgccgagcgacccgcgcctgagcaacttccgggtgacgccggacccgggcgtgatcgaggtcaacgtgcagccgtccgccacctgggacgagttggtggagcgcaccgagtttctctacgaggaagcccggcaaacccgcctcaccacagaaaaattcatgatcgacggccgccacaccggcaccggcggcggtaaccactttgtgctcggtggcgctacgcccaaggactcaccgttcctgcggcgccccgatctgctgcgcagcctgatcagctattggcataaccacccgtcgttgtcctacctgttttccggcctgttcatcggcccgacttcccaggcgccannnnn

SEQ ID NO: 5607 - DNA, 548 bp, Zea mays
  misc_feature (1)..(1): n is a, c, g, or t
  Peptide Sequence Number=SeqID_11649
  Probeset Number=SeqID_20010
ngcgctgatcgttcaggacctgggggtgatggagctggatattccgcccatcgagctgcacgccagcacccagaccgacatccgcaccctgggccgggccaagttcctcgaccaggccgggttctcgcaactggtgttggcccgtgagctgaacctgcaagagatccgggcgattgccgatgaaaccgatgccgccatcgagttcttcatccacggtgccttgtgcgtggccttctccggccagtgcaacatctcccacgcccagaatggccgcagcgccaaccgcggcgattgctcccaggcctgccgcctaccctacaccctcaaggatgaccagggccgtgtggttgcctttgaaaagcacctgttgtcgatgaaagacaacaaccagagcgccaacctgcgcgccctggtggatgccggcgtgcgttcgttcaagatcgaaggccgctacaaggacatgggctatgtgaagaacatcaccgcctattaccgtcagcgcctggacgagattcttgaagaccgtccggacctggcccgcgcttcca

SEQ ID NO: 5608 - DNA, 855 bp, Zea mays
  misc_feature (1)..(4): n is a, c, g, or t
  misc_feature (607)..(610): n is a, c, g, or t
  misc_feature (767)..(767): n is a, c, g, or t
  misc_feature (790)..(790): n is a, c, g, or t
  misc_feature (792)..(792): n is a, c, g, or t
  misc_feature (798)..(802): n is a, c, g, or t
  misc_feature (812)..(813): n is a, c, g, or t
  misc_feature (815)..(818): n is a, c, g, or t
  misc_feature (820)..(820): n is a, c, g, or t
  misc_feature (826)..(832): n is a, c, g, or t
  misc_feature (839)..(848): n is a, c, g, or t
  misc_feature (853)..(853): n is a, c, g, or t
  Peptide Sequence Number=SeqID_11650
  Probeset Number=SeqID_20011
nnnngcaggccgcgcgcgatagtgctcaggaaggcccgcggctcgcgcgtgtcggccacggccggccggcgcagcaggcgcacgaacacatcatgcgccagatcggcggcctcgaacgaattgcccagctgacggcgcagccaaccgtgcaaccagctgtggtgatccacataaagcgattcgattcgatcctgcgtcgtggggggcatggccgcgcgccctcgcgggcaaatgaatgataaccattctctattgtaataacgagacacagccatcggcaagcgcgagtcccggcgcggctgcgcgccccgcggcgacgcgtccggttcaggccttggggccgtccgaggcaagcctgtccgcgacagcggctggcgccccgctttcgcggtgaaagaacagcggcgccaagccgcccttgccccggtccaggtactcgaacgccacccgctccccgggatgcgccgggccgccgccgtggctgaggtgatatagctcaccgcccagtcgatagacatacagcggggtccacgacgcctcctccggcatctgcacctgataggtcaggacctcatccacccggccgcgcaccccgtacttgacggtnnnncgccgcagggcccggcccggccgccccgcccaccatgccgccgccaggcacaacgcggcggcgccatacagcggccacgcgaaccaccccgcggccagcaacgccagcgccacgcccagcaacacattgcgcaacaaggtcgcatcccgccgcagcngcgcccggtcggcatcgctgatngnctcgtnnnnnttctgcacgnngnnnngnccgtcnnnnnnngcgcgcnnnnnnnnnngcgcncg

SEQ ID NO: 5609 - DNA, 855 bp, Zea mays
  misc_feature (3)..(3): n is a, c, g, or t
  misc_feature (8)..(17): n is a, c, g, or t
  misc_feature (24)..(30): n is a, c, g, or t
  misc_feature (36)..(36): n is a, c, g, or t
  misc_feature (38)..(41): n is a, c, g, or t
  misc_feature (43)..(44): n is a, c, g, or t
  misc_feature (54)..(58): n is a, c, g, or t
  misc_feature (64)..(64): n is a, c, g, or t
  misc_feature (66)..(66): n is a, c, g, or t
  misc_feature (89)..(89): n is a, c, g, or t
  misc_feature (246)..(249): n is a, c, g, or t
  misc_feature (852)..(855): n is a, c, g, or t
  Peptide Sequence Number=SeqID_11651
  Probeset Number=SeqID_20012
cgngcgcnnnnnnnnnngcgcgcnnnnnnngacggncnnnncnncgtgcagaannnnnacgagncnatcagcgatgccgaccgggcgcngctgcggcgggatgcgaccttgttgcgcaatgtgttgctgggcgtggcgctggcgttgctggccgcggggtggttcgcgtggccgctgtatggcgccgccgcgttgtgcctggcggcggcatggtgggcggggcggccgggccgggccctgcggcgnnnnaccgtcaagtacggggtgcgcggccgggtggatgaggtcctgacctatcaggtgcagatgccggaggaggcgtcgtggaccccgctgtatgtctatcgactgggcggtgagctatatcacctcagccacggcggcggcccggcgcatcccggggagcgggtggcgttcgagtacctggaccggggcaagggcggcttggcgccgctgttctttcaccgcgaaagcggggcgccagccgctgtcgcggacaggcttgcctcggacggccccaaggcctgaaccggacgcgtcgccgcggggcgcgcagccgcgccgggactcgcgcttgccgatggctgtgtctcgttattacaatagagaatggttatcattcatttgcccgcgagggcgcgcggccatgccccccacgacgcaggatcgaatcgaatcgctttatgtggatcaccacagctggttgcacggttggctgcgccgtcagctgggcaattcgttcgaggccgccgatctggcgcatgatgtgttcgtgcgcctgctgcgccggccggccgtggccgacacgcgcgagccgcgggccttcctgagcactatcgcgcgcggcctgcnnnn

SEQ ID NO: 5610 - DNA, 153 bp, Zea mays
  misc_feature (1)..(2): n is a, c, g, or t
  Peptide Sequence Number=SeqID_11652
  Probeset Number=SeqID_20013
nnggcctgatgggcatgctgcccacctacgccagctggggcgtgtgggcgccggtggcattggtggcgctgcgcttcatccagggcgtggcgctgggcggcgaatgggccggcgcggtgctgctgtcgatggaacacggcaagcccgaccagc

SEQ ID NO: 5611 - DNA, 153 bp, Zea mays
  misc_feature (152)..(153): n is a, c, g, or t
  Peptide Sequence Number=SeqID_11653
  Probeset Number=SeqID_20014
gctggtcgggcttgccgtgttccatcgacagcagcaccgcgccggcccattcgccgcccagcgccacgccctggatgaagcgcagcgccaccaatgccaccggcgcccacacgccccagctggcgtaggtgggcagcatgcccatcaggccnn

SEQ ID NO: 5612 - DNA, 961 bp, Zea mays
  misc_feature (1)..(148): n is a, c, g, or t
  misc_feature (150)..(150): n is a, c, g, or t
  misc_feature (166)..(166): n is a, c, g, or t
  misc_feature (168)..(168): n is a, c, g, or t
  misc_feature (175)..(178): n is a, c, g, or t
  misc_feature (960)..(961): n is a, c, g, or t
  Peptide Sequence Number=SeqID_11654
  Probeset Number=SeqID_20015
nnnnnnnnnnnnnnnnnnnnnnnnnnnnnnnnnnnnnnnnnnnnnnnnnnnnnnnnnnnnnnnnnnnnnnnnnnnnnnnnnnnnnnnnnnnnnnnnnnnnnnnnnnnnnnnnnnnnnnnnnnnnnnnnnnnnnnnnnnnnnnnnnnnngncgtatcccgcgtggcngnccgaacnnnntgctgctcaacggcatgttcaagggctttatcgacctgaccttcgaacacgaaggccgttactacgtggctgactacaaatccaactggctcggtccggacgattcggcctacacacaacaggccatggaactgtcgatccttgatcatcgttacgacctgcaatacgtcctttacctgctggccctgcatcgccagcttaaggctcgcctgccggattacgactacgaccgccacgtcggtggtgcgttgtacctgttcctgcggggcacccattccgcgagccagggtgcgtatttcacccgtccgccccgggaattgatcgaaggcctggacctgctgttccaaggcaaaccgctaccacccaaggccgagcccgcctgggaacaaggagagctgctatgagcctgtcgccgttaccgcttgaggagttgacgcccctcagtcgcgccgccgacctggtgcaattgctcgatctctgggtgcagcgcggctggttgcgtgcgttggataaagccttcgtcggcttcctccatgagcttgatccccaggctgatcctttggtgttgctggccgcagccctgaccagtcaccaactgggccatggccacgtgtgcctggacctgttcgaaaccctcaaggcgccggactttgctctgtcgctgccgcccgaaggcgatgcgcaaaccggcgtcatgctgttgccatcgcaattgctcgacggcctggatggcgctcactggtgccacgccctggccgccagtcgtctggcggcactgtccnn

SEQ ID NO: 5613 - DNA, 301 bp, Zea mays
  Peptide Sequence Number=SeqID_11655
  Probeset Number=SeqID_20016
taaacccaaatctcctctgtcattttcccgggtactccaactatcgaattggctgtcaatttggagttcaaattgagcacgaccacgaactgccgaacaagtgacagccaattcgagaatatctacagatacgtgcatgcggtagaggtaggcacatattacaaatgcacaccaggcagacgcaactcgtatgtctcttgttggcatgtcgctttccaaggttttcaggcgcattcagaaaccaattcttcacgcttgacgtgcgcgtctcgccggaacgctcgtctttcccgctaggtcc

SEQ ID NO: 5614 - DNA, 301 bp, Zea mays
  Probeset Number=SeqID_20017
ggacctagcgggaaagacgagcgttccggcgagacgcgcacgtcaagcgtgaagaattggtttctgaatgcgcctgaaaaccttggaaagcgacatgccaacaagagacatacgagttgcgtctgcctggtgtgcatttgtaatatgtgcctacctctaccgcatgcacgtatctgtagatattctcgaattggctgtcacttgttcggcagttcgtggtcgtgctcaatttgaactccaaattgacagccaattcgatagttggagtacccgggaaaatgacagaggagatttgggttta

SEQ ID NO: 5615 - DNA, 673 bp, Zea mays
  misc_feature (1)..(1): n is a, c, g, or t
  misc_feature (671)..(673): n is a, c, g, or t
  Peptide Sequence Number=SeqID_11656
  Probeset Number=SeqID_20018
nacctccattgatcgcacgccgcactggctgatcaagcaggcgattttcaattacctggagaaactcgagggtggtgcaaccctggccgagctcaacggcctggccagcaaggacgcagaagaagccggcgaggtccagaccgaccacgcccaccagtgcttcctggagttcgccgagagcatcctgccgcaatcggtgctgcgcgcgtcgatcaccgccgcttaccgtcgcccggaaccggaagtggtaccgatgctgatcgagcaggctcgcctgcccgcggcaatggccgaagccaccaacaagctcgcctcttcgatcgccgagaaactgcgcaatcagaaaagcgccggcggccgtgcaggcatcgtccagggcttgctgcaggaattttccctgtcgtcccaggaaggcgtagcgctgatgtgcctcgccgaagcgctgctgcgcatcccggacaagggcacccgcgacgcactgatccgcgacaagatcagcaccggcaactggcacccacacttgggcaacagcccatcgctgttcgtcaacgccgccacttggggcttgctgctgaccggcaagctggtcgccacccacaacgaagccggcctgacgtcgtccctgagccgcatcatcggcaaaagcggcgagccgatgatccgcaagggcnnn

SEQ ID NO: 5616 - DNA, 923 bp, Zea mays
  misc_feature (1)..(1): n is a, c, g, or t
  misc_feature (679)..(679): n is a, c, g, or t
  misc_feature (760)..(768): n is a, c, g, or t
  misc_feature (772)..(782): n is a, c, g, or t
  misc_feature (788)..(788): n is a, c, g, or t
  misc_feature (797)..(804): n is a, c, g, or t
  misc_feature (807)..(811): n is a, c, g, or t
  misc_feature (815)..(816): n is a, c, g, or t
  misc_feature (819)..(834): n is a, c, g, or t
  misc_feature (842)..(854): n is a, c, g, or t
  misc_feature (856)..(868): n is a, c, g, or t
  misc_feature (880)..(884): n is a, c, g, or t
  misc_feature (887)..(887): n is a, c, g, or t
  misc_feature (889)..(906): n is a, c, g, or t
  misc_feature (908)..(920): n is a, c, g, or t
  misc_feature (923)..(923): n is a, c, g, or t
  Peptide Sequence Number=SeqID_11657
  Probeset Number=SeqID_20019
ntcgccgagcttccatggcgccatgcagaccctgaaaggcctgggcatgaaagccctggaaatccccaccgacccactctcgggtatcagcctggaagcgctggaactggcgctggagcagtggccgatcaaagtcatccagctgacccccaactgcaacaacccactgggctacatcatgccggagtcgcgtaaacgcgcgctgctgaccctggcccagcgcttcgacgtggcaatcatcgaagacgatgtgtatggcgaactggcctacagctacccgcgtccacgcactatcaagtccttcgacgaagatggccgcgtcgtactgtgcagttccttctcgaaaaccctggcgcccggcctgcggattggctgggtagcacccggtcgttacctcgagcgcgtcctgcacatgaaatacatcagcaccggcgccaccgcgacccagccgcagatcgcgattgccgagtttctgaaaaatggccatttcgaaccgcatttgcggcggatgcgtacgcaataccagcgtaatcgcgacctgatgctcgattgggtcagccgctatttcccggcgggcacccgcgccagtcgtccacagggcagtttcatgctgtgggtggagctgccggaaggcttcgacaccctgaagctcaaccggctgctagtggatgaaggtgtncagattgccgtgggaagtatcttttccgcctccggcaagtaccggaaattgtttgcgcatgaactacgctgccaaaccgannnnnnnnnttgnnnnnnnnnnncgcaangtcggcgcnnnnnnnntcnnnnnactnnccnnnnnnnnnnnnnnnncccttttnnnnnnnnnnnnngnnnnnnnnnnnnnatccccctgacnnnnnacncnnnnnnnnnnnnnnnnnncnnnnnnnnnnnnnttn

SEQ ID NO: 5617 - DNA, 361 bp, Zea mays
  misc_feature (1)..(4): n is a, c, g, or t
  Peptide Sequence Number=SeqID_11658
  Probeset Number=SeqID_20020
nnnnttgctgcgggtattcaaccgtatctactcgatgtacccgaagcaggaagcccgcggtgaagtgctgctcaatggcgaaaacatcctcgcccccggctactcgatgaaccgcctgcgcagtcatgtcgggatggtcttccagaagccggtgccgttccccatgtcgatctacgacaacatcgcctatgccgtgcgccaccatgaaaagctgtcgcgccgggaaatggatgatcgagtcgagcaagccttgcgcggcggcgcgctgtgggatgaggtgaaagacaaactcaagcagagcgcccagagtctctcaggcgggcagcagcaacgcctgtgcatcgcccgcaccattgcgctg

SEQ ID NO: 5618 - DNA, 463 bp, Zea mays
  misc_feature (1)..(4): n is a, c, g, or t
  misc_feature (381)..(397): n is a, c, g, or t
  misc_feature (399)..(429): n is a, c, g, or t
  misc_feature (431)..(443): n is a, c, g, or t
  misc_feature (446)..(461): n is a, c, g, or t
  misc_feature (463)..(463): n is a, c, g, or t
  Peptide Sequence Number=SeqID_11659
  Probeset Number=SeqID_20021
nnnnatcagcgcgccggccggggcgatgcgcccgtgcagcacgccaatctggcgcaccaggcccatcacggcaaacgccagcgccagcagcagtacccacagcagtacgttggaaacaataaggccttccattgatcacctaccaatcagtttgagcagaagaggggagttcgccagcaggccatcggctgcggcgtaaatcagcagcgcgacggcgctggcggcgacggtgacgaagccgtcgaaaaaacccaggtcacgggcaatcggcagcacgctggccagcagggccacggccaccagtgcgccgttgcgcaacagcaggatcggccgcaacggctgcgcctggtcggggcctgcgcagccgcagtcgatgtcccnnnnnnnnnnnnnnnnntnnnnnnnnnnnnnnnnnnnnnnnnnnnnnnntnnnnnnnnnnnnngtnnnnnnnnnnnnnnnntn

SEQ ID NO: 5619 - DNA, 463 bp, Zea mays
  misc_feature (1)..(1): n is a, c, g, or t
  misc_feature (3)..(18): n is a, c, g, or t
  misc_feature (21)..(33): n is a, c, g, or t
  misc_feature (35)..(65): n is a, c, g, or t
  misc_feature (67)..(83): n is a, c, g, or t
  misc_feature (460)..(463): n is a, c, g, or t
  Probeset Number=SeqID_20022
nannnnnnnnnnnnnnnnacnnnnnnnnnnnnnannnnnnnnnnnnnnnnnnnnnnnnnnnnnnnannnnnnnnnnnnnnnnngggacatcgactgcggctgcgcaggccccgaccaggcgcagccgttgcggccgatcctgctgttgcgcaacggcgcactggtggccgtggccctgctggccagcgtgctgccgattgcccgtgacctgggttttttcgacggcttcgtcaccgtcgccgccagcgccgtcgcgctgctgatttacgccgcagccgatggcctgctggcgaactcccctcttctgctcaaactgattggtaggtgatcaatggaaggccttattgtttccaacgtactgctgtgggtactgctgctggcgctggcgtttgccgtgatgggcctggtgcgccagattggcgtgctgcacgggcgcatcgccccggccggcgcgctgatnnnn

SEQ ID NO: 5620 - DNA, 659 bp, Zea mays
  misc_feature (2)..(3): n is a, c, g, or t
  misc_feature (5)..(19): n is a, c, g, or t
  misc_feature (21)..(21): n is a, c, g, or t
  misc_feature (23)..(24): n is a, c, g, or t
  misc_feature (26)..(27): n is a, c, g, or t
  misc_feature (29)..(33): n is a, c, g, or t
  misc_feature (47)..(49): n is a, c, g, or t
  misc_feature (54)..(59): n is a, c, g, or t
  misc_feature (67)..(81): n is a, c, g, or t
  misc_feature (658)..(659): n is a, c, g, or t
  Peptide Sequence Number=SeqID_11660
  Probeset Number=SeqID_20023
gnncnnnnnnnnnnnnnnntncnngnngnnnnnggtgatgtaggttnnnaatgnnnnnngggcattnnnnnnnnnnnnnnncagattggggatgaacccggaacctttcagggcattttccagaaagggcttggccgcttcaggggcggtttccagggttagcatcggtacgcgggacatggagtggtctcctcatggaatcgtgtaccaagtctgttggttataaaaaatccgctcaatagtctaaagtagcgattacttgctctagagtctttccgttagatgaattcgtccagttcgctcgtcgattggttattagatagcctcgaactcaacaccagtctgtttcacgtcggccgttactgcggcggctggcacgccagcacccacggcctggcgagcgcgagttttcatctggtggtgcaagggcagtgctggatgcacatcgatggcgacccgaccccttacccactgaacaacggcgatgcggtgttcctgttgcgggatctcgcgtaccgcttgtccagcgatggcaccgccgccggtgcccaggagtgcccgcgcaagccaatggtgccactggacagccaggcgaatgacggcgtgggtttggtgtgcgggttctttcatttccagtccgggctgtcggcgatgattnn

SEQ ID NO: 5621 - DNA, 653 bp, Zea mays
  misc_feature (1)..(20): n is a, c, g, or t
  misc_feature (560)..(560): n is a, c, g, or t
  misc_feature (576)..(577): n is a, c, g, or t
  misc_feature (581)..(585): n is a, c, g, or t
  misc_feature (587)..(591): n is a, c, g, or t
  misc_feature (593)..(608): n is a, c, g, or t
  misc_feature (614)..(621): n is a, c, g, or t
  misc_feature (624)..(653): n is a, c, g, or t
  Peptide Sequence Number=SeqID_11661
  Probeset Number=SeqID_20024
nnnnnnnnnnnnnnnnnnnngaggccaatcccgcggcgattccgctgcgtccgggcttcctggaccgcatcgagcagcgcggcggacggctgatttccaacgtcgaagacgccaccgagcagctgcgccgcctgctgagcgaacagaacgtgcaggcgctgaccgccagcctgcagaacgccactgacatcacccagtcgttgaaagaggccagccgcgacctggcgccgaccctggccaagctggggccgctggtcgagtcgctgggcagcacctcgcgccaggcggaccgcgccgcgcgcgaagtggcggatctggcgcaacaggcgcggcagtcgctggcgcgcctgaacgcgcccgacggcgcgctggccatggccacgcgcagcctcagcgacatcgcctatgccgcctcgcgcctggacaacgagacgctgccggccatcaccggcatggcggccagcgtcaccgaggccgcgcgcggcgccacctacaccctgcgccgcgtggacaacacgccgcaatcgttattgttcgggccggcgccggcggcgcccggnccgggcgaggccggcnncgcnnnnntnnnnngnnnnnnnnnnnnnnnntgcgtnnnnnnnnctnnnnnnnnnnnnnnnnnnnnnnnnnnnnnn

SEQ ID NO: 5622 - DNA, 732 bp, Zea mays
  misc_feature (622)..(622): n is a, c, g, or t
  misc_feature (675)..(675): n is a, c, g, or t
  misc_feature (679)..(680): n is a, c, g, or t
  misc_feature (682)..(682): n is a, c, g, or t
  misc_feature (704)..(704): n is a, c, g, or t
  misc_feature (706)..(709): n is a, c, g, or t
  misc_feature (711)..(722): n is a, c, g, or t
  misc_feature (724)..(731): n is a, c, g, or t
  Peptide Sequence Number=SeqID_11662
  Probeset Number=SeqID_20025
accatccacaactcgctgcagggcacgcagggcttcgtcaagaccggcccgggatcgctgatcctgaccggcgacagcagcgggctgagcggccccatcctgatcgccgacggcgcgctggaaatcgacggcaagttgaacggcccggtcgatatcggccgcgaagtcgtgctggccggcgtcggccagctgggcaccaccacgctctaccccaccgccgtgatctccccgggcaacgacggctcgcccatcggcacgctgacgatcaacggcaacctgaccttcggcgccgacaccgtctatcgcgtgcacgccgatccggccagcagcgccagcgaccgcatccacgtcaccggcgtggccgtgctggacggcacggtggcgcacgtcggccccgccggcaactacgcgccgcgcaccacctacaacatcctgacggccgacggcggcatccagggccgcttcaccggcgcctccagcgcctacgccttcctgacccccacgctcagctacgacgccaagaacgccttcatgacgctgacgcgcaacgacgtgccgatcggcagcattggcggcaccggcaacgaaaccagcgtcggcggcgcgctggaccaggaagatncgcccgcgagcggcaacggctcggcctccagcggcaacggctcggccgccagnggcnntngctcgacgaccgccggcaacgncnnnncnnnnnnnnnnnncnnnnnnnnc

SEQ ID NO: 5623 - DNA, 712 bp, Zea mays
  misc_feature (19)..(20): n is a, c, g, or t
  misc_feature (22)..(22): n is a, c, g, or t
  misc_feature (51)..(52): n is a, c, g, or t
  misc_feature (83)..(84): n is a, c, g, or t
  misc_feature (711)..(712): n is a, c, g, or t
  Peptide Sequence Number=SeqID_11663
  Probeset Number=SeqID_20026
acactggcggacgcggcgnntnacgtagggttgagctcaaacactttcagnntgatcgtggacaccacagcacagacgcaaannactgtaatcagtaacttcgtcggggatgtcggcacaaaacagggcactttcgcgagtggcactaccactgacgacgccgccccagtgctcaacggcaccttcactggtacgttagcgacgggcgaagtggtgcgcatctacgatggcagcactttattgggcaatgcgacggtcactggcaataactggacgttcagcagcgacacgggcttggtggacggtaccacccacaacttccacgcggtggttgcggacagtgcgggtaacgaaggtacgtcatcggcgaacttcaccctgaccatcgacaccacacctccgacccaggtcgcgacgattgttacctacactgacaacgtcggtttgaatcagggtaactatgcttctgggacgaccagcgatgacatcacaccggtgctcaacggcaccttgtcggcggccctgggtgccaccgatatggtgcgcatctacgatggcagcaccttgttgggtaatgcgacggtcaccggtaccacttggactttcgccgggatcagcggcctgcttgacgccagtacccacacctacactgccaaggtgaccgacgtggcgggtaacgagggcacggtctcgaatgcctttaccctctcnn

SEQ ID NO: 5624 - DNA, 839 bp, Zea mays
  misc_feature (1)..(3): n is a, c, g, or t
  misc_feature (721)..(721): n is a, c, g, or t
  misc_feature (724)..(726): n is a, c, g, or t
  misc_feature (728)..(728): n is a, c, g, or t
  misc_feature (771)..(772): n is a, c, g, or t
  misc_feature (774)..(775): n is a, c, g, or t
  misc_feature (789)..(789): n is a, c, g, or t
  misc_feature (791)..(791): n is a, c, g, or t
  misc_feature (793)..(797): n is a, c, g, or t
  misc_feature (800)..(801): n is a, c, g, or t
  misc_feature (809)..(810): n is a, c, g, or t
  misc_feature (819)..(839): n is a, c, g, or t
  Peptide Sequence Number=SeqID_11664
  Probeset Number=SeqID_20027
nnntggctgatggccgaacaagccagcagcgcacaatcactgaccggcctggccctgccgtccattgcggtctaggatttgccgatcattgaggccggagcctgtcatgcaacgtatcaagggctaccacgcccatatctacttcgacgccaacaccatcgaccaggcgcgcaaactctgcgaggacgccgcgcaaatgttcccgctgcgcatgggccgggtgcatgaacgcccggtgggcccgcacccggactggagctgccagttggcgttcgagcctgaatacatcggcatcgtattgccgtggctggccctcaaccgcaacggcctggtggtgttcctgcacccgaccaccggtgatgacctcaaggaccacaccgaccatgcgatctggatgggggcgatgcgcacgctagacctgtcgatattctaagttcatatattccctatatatgggactgatatttatatattgagactttgccggtcttgggtttatattcgcctcatccgctcagaacactcaggtgaagcgatgcaggcgcaattgatcgcgctcgattggggaaccagttcccttcgtgcttacaagctcggcccggcaggcgtcgtgatcgaacggcgcactttggcgtcggggatcatgcacctgcccaccgaaccccgggacatttgccggggttcgcagcagcaacgggttcgagctggcattcgacgcagnctnnngntgactggctcgacacccagcccgaccttcccgttatcgcctgnngnnatggtcggcagcgncnannnnnggnncgaagcgnnttacggcgnnnnnnnnnnnnnnnnnnnnn

SEQ ID NO: 5625 - DNA, 907 bp, Zea mays
  misc_feature (1)..(18): n is a, c, g, or t
  misc_feature (21)..(41): n is a, c, g, or t
  misc_feature (43)..(46): n is a, c, g, or t
  misc_feature (53)..(56): n is a, c, g, or t
  misc_feature (61)..(65): n is a, c, g, or t
  misc_feature (67)..(69): n is a, c, g, or t
  misc_feature (73)..(77): n is a, c, g, or t
  misc_feature (92)..(92): n is a, c, g, or t
  misc_feature (96)..(98): n is a, c, g, or t
  misc_feature (100)..(101): n is a, c, g, or t
  misc_feature (901)..(907): n is a, c, g, or t
  Peptide Sequence Number=SeqID_11665
  Probeset Number=SeqID_20028
nnnnnnnnnnnnnnnnnnggnnnnnnnnnnnnnnnnnnnnnannnncggcaannnncccgnnnnnannngtannnnngcgcataggcaatcngggnnntnntcggtatactcgggcgcaattaatgcatattcaaggatttcgccatgaagcgcctgatctcttcccttgctgcgctcgtcgcggtcgcttgcctcgttagtgcctgtggtcaaaaaggcccgctgtatctgcccgatgacagcaaagacccgaatgaacaggcgcaatcgtcgcaaaccaaagcgcacaagcacgacacctactaagggaacatcatggacgcttttaactaccgggacggcgagctgttcgcggaaggtgtcgcgctgtccgccattgccgagcgctttggtaccccgacctacgtgtactcccgtgcccacatcgaagcgcaataccgctcctttgccgacgcgctggaaggcacgccaagcctggtgtgctacgcggtaaaagccaactccaacctgggtgtactcaatgtcctggcgcgcctgggcgccggtttcgacattgtgtcccggggcgagcttgagcgtgtgctggccgctggcggcaaagctgacaagatcgtgttctccggcgtcggcaagagccgcgaagacatgcgccgcgccctggaagttggcgtgcactgcttcaacgtcgagtccaccgacgagttggagcgcctgcaagtggtggccgccgagatgggcgttcgcgcaccgatctccctgcgggtcaacccggacgtagacgccggcactcacccgtacatttccaccggtctcaaagagaacaagttcggcatcgccattgccgacgccgaggacgtgtacatccgtgccgcccaactgccaaacctggaagtattgggnnnnnnn

SEQ ID NO: 5626 - DNA, 221 bp, Zea mays
  misc_feature (1)..(3): n is a, c, g, or t
  Peptide Sequence Number=SeqID_11666
  Probeset Number=SeqID_20029
nnngtagaccgcctgtacggcgccttcggtcttgatgcccaacatgttgtggcgggtggtctgaggcttgcgcgaggtgatcgccagcttctgtcccaggatgtggttcagcaacgtggacttgcccacgttcggacggccgacgatggcaacatagccacagcgagttgcggttgaatcagtcatggccattctccacgcccagggcaatcagtgctgca

SEQ ID NO: 5627 - DNA, 221 bp, Zea mays
  misc_feature (219)..(221): n is a, c, g, or t
  Peptide Sequence Number=SeqID_11667
  Probeset Number=SeqID_20030
tgcagcactgattgccctgggcgtggagaatggccatgactgattcaaccgcaactcgctgtggctatgttgccatcgtcggccgtccgaacgtgggcaagtccacgttgctgaaccacatcctgggacagaagctggcgatcacctcgcgcaagcctcagaccacccgccacaacatgttgggcatcaagaccgaaggcgccgtacaggcggtctacnnn

SEQ ID NO: 5628 - DNA, 206 bp, Zea mays
  misc_feature (1)..(2): n is a, c, g, or t
  Peptide Sequence Number=SeqID_11668
  Probeset Number=SeqID_20031
nnggcgtactgatcggccaaggcatccgttaaactgtcggtcacccacaaaaaatgccgctgaatcagcggcattgtcttttcggaagttcagtcatgaagcgtgagcaagtcagagaacagcatgcaggggggcatatatctgcgacccatgtgattcaaaatcccgcggatacgggcgagtggatcgtgttcttcaagaagagc

SEQ ID NO: 5629 - DNA, 206 bp, Zea mays
  misc_feature (205)..(206): n is a, c, g, or t
  Peptide Sequence Number=SeqID_11669
  Probeset Number=SeqID_20032
gctcttcttgaagaacacgatccactcgcccgtatccgcgggattttgaatcacatgggtcgcagatatatgcccccctgcatgctgttctctgacttgctcacgcttcatgactgaacttccgaaaagacaatgccgctgattcagcggcattttttgtgggtgaccgacagtttaacggatgccttggccgatcagtacgccnn

SEQ ID NO: 5630 - DNA, 745 bp, Zea mays
  misc_feature (1)..(137): n is a, c, g, or t
  misc_feature (201)..(203): n is a, c, g, or t
  misc_feature (737)..(745): n is a, c, g, or t
  Peptide Sequence Number=SeqID_11670
  Probeset Number=SeqID_20033
nnnnnnnnnnnnnnnnnnnnnnnnnnnnnnnnnnnnnnnnnnnnnnnnnnnnnnnnnnnnnnnnnnnnnnnnnnnnnnnnnnnnnnnnnnnnnnnnnnnnnnnnnnnnnnnnnnnnnnnnnnnnnnnnnnnnnnnnnggcagcagctggcgccggcggcgcgccagttgcaggccgcgcaggcgcgccgcgcccgcgtcgnnncggccggcgcggcgcgcgttcctgggcggcgcggtggcggcctgcggcgcgtggctggcgttcaagccgccgctgggcctgtggccggcggtggacgaattgaccgcggatgtgcgcagcggcaccggcgaacagcgccgcgtggcgctggcgggcgacgccagcgtgcagctcaatacccagacccgcatcaacctgtcgcgcagcggcccggcgcagcagatcgatctgctggccggcgaggtcgagctgctgacgtccggccaactggtcagtctgacggcgggcgcgggtcgcgtcagcgccacctcggggtgcgtcaacgtgcgctacaccgatggcctggtgcgcgtgacctgcctggagggcagcgcccgcgtcgcgctgcgcaaggactccattgaattgacggccgcgcagcaggtggtgctgggcgccggcggcgccagcgggccgcaaagggtggaccccgaccaggtcacggcgtggcgccgtggcgtgctggaattcaacaatgtgccgctggcgcaggtnnnnnnnnn

SEQ ID NO: 5631 - DNA, 882 bp, Zea mays
  misc_feature (1)..(3): n is a, c, g, or t
  misc_feature (773)..(773): n is a, c, g, or t
  misc_feature (783)..(783): n is a, c, g, or t
  misc_feature (785)..(785): n is a, c, g, or t
  misc_feature (789)..(791): n is a, c, g, or t
  misc_feature (800)..(803): n is a, c, g, or t
  misc_feature (807)..(809): n is a, c, g, or t
  misc_feature (811)..(812): n is a, c, g, or t
  misc_feature (826)..(833): n is a, c, g, or t
  misc_feature (838)..(838): n is a, c, g, or t
  misc_feature (856)..(856): n is a, c, g, or t
  misc_feature (858)..(858): n is a, c, g, or t
  misc_feature (860)..(882): n is a, c, g, or t
  Peptide Sequence Number=SeqID_11671
  Probeset Number=SeqID_20034
nnntgattctgttcacctcggcgggcgtgtccttgctgctggcgtgggcctcacgcggcttgttgcgccgctcccaggcctggcgccaaaccgcgcccggtcaataaatcatccataaaggaactgcaccatgttcaagcccctggcgttagccgctgctgtgctcactgcgttcagcctgaatgcctttgccgccaagaccgagttgaccgtgtacacggccctcgaagccgagcaattgaagacttacaaacaagccttcgaaaaggctaacccggacatcgatatcaaatgggtgcgcgactccaccggcatcatcaccgccaagctgctggccgaaaaagcccgcccgcaggctgacgtggtctggggcctggcggcttccagcctggcgatcctcgaccagcagggcatgctgcaaaactacgcacccaaggacctgggcaagatcggcgcgaactaccgcgacgccgccaacccaccggcctgggtcggcatggacgtgtgggctgcgaccatctgcttcaacaccgtcgaagccgaaaagcagggcctgagcaagccggtgagctggcaagacctgaccaagcctgagtacaaaggcaagatcgtgatgcccaatccggcctcgtccggcaccggcttcctggatgtcagcgcctggctgcagaccttcggcgagaagcagggctggcagtacatggacgatctgcaccagaacatcggccagtatgttcactccggctccaagccgtgcaagctggcggcgtcangtgagtttcngntcgnnntctcgtttnnnnaccnnncnngttcaactgaagcnnnnnnnngcacngctggacatcatcctgcngnannnnnnnnnnnnnnnnnnnnnnn

SEQ ID NO: 5632 - DNA, 964 bp, Zea mays
  misc_feature (1)..(2): n is a, c, g, or t
  misc_feature (5)..(18): n is a, c, g, or t
  misc_feature (22)..(31): n is a, c, g, or t
  misc_feature (37)..(44): n is a, c, g, or t
  misc_feature (46)..(46): n is a, c, g, or t
  misc_feature (50)..(52): n is a, c, g, or t
  misc_feature (54)..(55): n is a, c, g, or t
  misc_feature (61)..(65): n is a, c, g, or t
  misc_feature (67)..(71): n is a, c, g, or t
  misc_feature (73)..(80): n is a, c, g, or t
  misc_feature (82)..(82): n is a, c, g, or t
  misc_feature (90)..(95): n is a, c, g, or t
  misc_feature (97)..(99): n is a, c, g, or t
  misc_feature (107)..(107): n is a, c, g, or t
  misc_feature (112)..(113): n is a, c, g, or t
  misc_feature (126)..(129): n is a, c, g, or t
  misc_feature (151)..(151): n is a, c, g, or t
  misc_feature (173)..(174): n is a, c, g, or t
  misc_feature (962)..(964): n is a, c, g, or t
  Peptide Sequence Number=SeqID_11672
  Probeset Number=SeqID_20035
nnccnnnnnnnnnnnnnngcannnnnnnnnngaatgnnnnnnnntngagnnncnncagcgnnnnngnnnnntnnnnnnnnanacgctgannnnnnannntgacgtgngggcnnttgcgaagtgctnnnncgccggtcaaggcgttggtcanccatcggcgcaatgagaaactnnacgcctggatccaggccgacctggccaagcgcccggttgatcgggtggtgggcttcaacaaaatgccggggctggacctgtacttcgccgccgacggtgtgttcgaagacaaggcacaaaccctgcgcaacccgatgtaccgctggttcggtcggtacaagcactttgccgaatacgagcgcgcggtgttcgacaagcacgccaagacgcagatcatggtgctgtccgagcaccagcagcagctgttcacccagtattacgggacccaggccgagcgttttcacttgttgccgccgggtatcgcccgcgaccgccgcgcgccgcccaacgctgcggaggtccgcgctgaatttcgtcgcgaattcggcctggccgaagatgatttgctgctggtgcagatcggctcgggcttcaagaccaaaggcgtcgatcgcagcctcaaggccgtggccgcgttgccgtcgaacctgaagaaacgcacccggttatttgtaatcggccaggacgaccccaaagtattccaattgcagagtgctgcgctgggcctgggcgatcaggtgcagttcttcaaggggcgcagcgatatcccgcgctttctgctgggcgcggacctgttgatccaccccgcgtacaacgaggcggccggcatggtgctgatcgaagcggtggtcgccggcctcccggtactggtgagcaaggtctgcggttacgcgttctacatcgacaaggcccagaatggccgggtattggacgagccgttcgagcaggcccagctcaaccagtacctnnn

SEQ ID NO: 5633 - DNA, 298 bp, Zea mays
  misc_feature (1)..(1): n is a, c, g, or t
  Peptide Sequence Number=SeqID_11673
  Probeset Number=SeqID_20036
nagcttctacttcggctcggaatccgacgaccgcaccgtggcggcagcgttcaacgacaaggtcaatccgctcggcgtgaagatcaacgccatctggtcctcggacatcggccactgggacgtgcccgacctgaccgcgccgctggccgaaagctgggacctggtcgaacagggcgtgatcagcgcgcaggacttcaaggcgctggtgttcggcaacccctaccgcttctacaccgaggccaatccggcctttttccagggcaccgccatcgagcgcaagctcgccgcgccggcccgc

SEQ ID NO: 5634 - DNA, 364 bp, Zea mays
  Peptide Sequence Number=SeqID_11674
  Probeset Number=SeqID_20037
gctcttgagcgcctggaatcccgaggcgtatcgcttggataggccctgaactgaaatgaccggctgcactctggctcccagcgtggtggacaaccctggattttacccgtccgccggacccggcttgttcggcctggcggaacggtgtgtttgataaatgcgataaacggaccggcctgccgtacactgcccggacaggaaaaacagggcaagaatcgcccgacactggggaatcgggccggccaggcccgtcaaaaggctatgttcgcggatctgaaacacctgtcgcaccacgccgcctggcgccgccagctggaaatgctgctggaatcggccggcgagggcatctacggcatcgacctgc

SEQ ID NO: 5635 - DNA, 364 bp, Zea mays
  Probeset Number=SeqID_20038
gcaggtcgatgccgtagatgccctcgccggccgattccagcagcatttccagctggcggcgccaggcggcgtggtgcgacaggtgtttcagatccgcgaacatagccttttgacgggcctggccggcccgattccccagtgtcgggcgattcttgccctgtttttcctgtccgggcagtgtacggcaggccggtccgtttatcgcatttatcaaacacaccgttccgccaggccgaacaagccgggtccggcggacgggtaaaatccagggttgtccaccacgctgggagccagagtgcagccggtcatttcagttcagggcctatccaagcgatacgcctcgggattccaggcgctcaagagc

SEQ ID NO: 5636 - DNA, 818 bp, Zea mays
  misc_feature (1)..(3): n is a, c, g, or t
  misc_feature (691)..(694): n is a, c, g, or t
  misc_feature (732)..(735): n is a, c, g, or t
  misc_feature (737)..(740): n is a, c, g, or t
  misc_feature (743)..(744): n is a, c, g, or t
  misc_feature (761)..(764): n is a, c, g, or t
  misc_feature (768)..(769): n is a, c, g, or t
  misc_feature (782)..(783): n is a, c, g, or t
  misc_feature (787)..(789): n is a, c, g, or t
  misc_feature (792)..(795): n is a, c, g, or t
  misc_feature (797)..(797): n is a, c, g, or t
  misc_feature (801)..(813): n is a, c, g, or t
  misc_feature (815)..(818): n is a, c, g, or t
  Peptide Sequence Number=SeqID_11675
  Probeset Number=SeqID_20039
nnngccgacgccgccaccttgcaacgcgccaccgtcgaacgcgacacccgcgaacaacgcctgcaagccgccgccgcgcaacgccatgaaccggcgctgacccgcgatggccatgccgtagaagtgttcgccaatatcggcgaaagcgccggggttgccagcgcagtcgagcagggcgccgaaggtatcggcctgctgcgtactgagctgattttcatggcccacaagcaggcgccggatgaagccacccaggaagccgaataccgccgcgtgcttgacggcctcggcggtcggccactggtggtgcgcacccttgatgtaggtggtgacaaaccgctgccttactggccgatcgccaaggaagaaaaccccttcctcggcgtgcgtggtatccgcctgaccctgcaacgcccgcagatcatggaagcgcaattgcgtgcgctgttgcgctcggcggacaaccgtccgctgcgcatcatgttccccatggtcggcagcgtggatgagtggcgccaggcccgggacatgaccgagcgcctgcgcctggaaatcccggtggccgacctgcaattggggatcatgatcgaagtgccgtcggccgcgttgctggcgccggtactggccaaggaagtggacttcttcagcgtcggcaccaacgacctgacccagtacaccctggccatcgaccgtnnnnacccgacgctgtcggcccaggcggatggcctgcatccnnnngnnnngcnnctgatcgacatcaccgnnnngcgnngcccatgcccatnncaannnggnnnngncatnnnnnnnnnnnnngnnnn

SEQ ID NO: 5637 - DNA, 842 bp, Zea mays
  misc_feature (1)..(5): n is a, c, g, or t
  misc_feature (667)..(842): n is a, c, g, or t
  Peptide Sequence Number=SeqID_11676
  Probeset Number=SeqID_20040
nnnnngacctgcaattcagctatcgcggcctgtcgcccaagggccaggccaccggctggatcagtaactggccgtggaccaaacgcctgccttatgccgtacgcattgcagcacaggtcaacggaccggtgccgtgggtcacccaagtggttgccctgcggctgaacctctccggcggagaatcaggcgaatgaagcgtcagcgcggcgttgcactgctgctggtgctgtgggtgctggcattgctcagcctgctgctgggcggcctggccggttgggtacagctggaaagccgccaggccctgtggcatcgccagcatacccaggcgttgctggcggcggaggcgggtgtggcgttggccatgcaggccctggccgacccgctgcaacgcaagcaatggatcgccgacggccgcgaaatgccgctggtatttgatgacgcacagctccacgtaagcctgcacagcgagcgcggcaaactgtatttgaacagcgccgagacggccgactttgcccgcctggccctggcctgcggcgccacccaggcccaggccagccggctcgccagggacctggaagtgcggcgcaacgcaggcctggcgccgttccgcgtggtggaggaagtgcggcaattgcccggcatgacccaggcgctgtacagccggatnnnnnnnnnnnnnnnnnnnnnnnnnnnnnnnnnnnnnnnnnnnnnnnnnnnnnnnnnnnnnnnnnnnnnnnnnnnnnnnnnnnnnnnnnnnnnnnnnnnnnnnnnnnnnnnnnnnnnnnnnnnnnnnnnnnnnnnnnnnnnnnnnnnnnnnnnnnnnnnnnnnnnnnnnnnnnnnn

SEQ ID NO: 5638 - DNA, 673 bp, Zea mays
  misc_feature (672)..(673): n is a, c, g, or t
  Peptide Sequence Number=SeqID_11677
  Probeset Number=SeqID_20041
atccaggcccgccaggcctacgacattccgcccggcccgctgggcaaggccatcgctagcttcgcgctggcctcgggtctgtcgctggcgttcgagccggcctggaccgacggcctgcacagtcccggcgtgtcgggcgaattgagtcgggccgaggcggcgcgccgcctgctggcgggaagcgggctcgagatggtggcgcgcgccgatggcagctacacgctgcgcaagacggtgtccgacgcgacgacgctgccggccatcaccgtgacgggcgcgtcgggctatgccggcgccaatccctatctggtcggcggcgccaccaccgccaccaagaccgccacgcccttgatggagacgacgcagtcgatctcggtggtgacgcaggaacgcatggcggcgcagggcgcgcagacggtgacggacgccttgagctataccgccggggtgcacgccaatgtggcgggcgacaatccgaccgacaacaccctgatggtgcgcggcttccagcagctcaccaccaatgccttcaccgacggcctgcgcaacaacaacaccgggtatttcgcgcccgagccctacggcatggaccggatcgaggtgctcaaggggccgtcgtcggtgatgtatggccagggctcgcccggcggcatcatcaatatcgtgtccaann

SEQ ID NO: 5639 - DNA, 673 bp, Zea mays
  misc_feature (1)..(2): n is a, c, g, or t
  Peptide Sequence Number=SeqID_11678
  Probeset Number=SeqID_20042
nnttggacacgatattgatgatgccgccgggcgagccctggccatacatcaccgacgacggccccttgagcacctcgatccggtccatgccgtagggctcgggcgcgaaatacccggtgttgttgttgcgcaggccgtcggtgaaggcattggtggtgagctgctggaagccgcgcaccatcagggtgttgtcggtcggattgtcgcccgccacattggcgtgcaccccggcggtatagctcaaggcgtccgtcaccgtctgcgcgccctgcgccgccatgcgttcctgcgtcaccaccgagatcgactgcgtcgtctccatcaagggcgtggcggtcttggtggcggtggtggcgccgccgaccagatagggattggcgccggcatagcccgacgcgcccgtcacggtgatggccggcagcgtcgtcgcgtcggacaccgtcttgcgcagcgtgtagctgccatcggcgcgcgccaccatctcgagcccgcttcccgccagcaggcggcgcgccgcctcggcccgactcaattcgcccgacacgccgggactgtgcaggccgtcggtccaggccggctcgaacgccagcgacagacccgaggccagcgcgaagctagcgatggccttgcccagcgggccgggcggaatgtcgtaggcctggcgggcctggat

SEQ ID NO: 5640 - DNA, 558 bp, Zea mays
  misc_feature (1)..(2): n is a, c, g, or t
  misc_feature (8)..(10): n is a, c, g, or t
  misc_feature (19)..(37): n is a, c, g, or t
  misc_feature (41)..(46): n is a, c, g, or t
  misc_feature (52)..(52): n is a, c, g, or t
  misc_feature (54)..(187): n is a, c, g, or t
  misc_feature (554)..(558): n is a, c, g, or t
  Peptide Sequence Number=SeqID_11679
  Probeset Number=SeqID_20043
nnccgggnnnggggggagnnnnnnnnnnnnnnnnnnnaaannnnnnaagganannnnnnnnnnnnnnnnnnnnnnnnnnnnnnnnnnnnnnnnnnnnnnnnnnnnnnnnnnnnnnnnnnnnnnnnnnnnnnnnnnnnnnnnnnnnnnnnnnnnnnnnnnnnnnnnnnnnnnnnnnnnnnnnnnnnnntgaccatcgggtaaaacagcgtatcctgcaaatgaggcggaatgcccggcccgttatcttccgcttcccccaaaggagacaggcatggccaagcagaacgaaaccgcggtgcgcaaagtcgtcgccgcgtcgctgatcggcgccaccatcgagtggtacgacttcttcctgtacggcgtggtcgccggcatcgtgttcaacaagctgtacttccccactggcgacccgctggtctcgaccatgctggcctacaccaccttcgcggtgggcttcatcacccgcccgctgggcgggctggtgttcggccatttcggcgaccgcatcggccggaaaagcatgctggtgatgacgctgatgatcatgggcnnnnn

SEQ ID NO: 5641 - DNA, 153 bp, Zea mays
  misc_feature (1)..(3): n is a, c, g, or t
  Peptide Sequence Number=SeqID_11680
  Probeset Number=SeqID_20044
nnnttcgtagccgacgatggcgcgggtcttgggatcctggaagctgaacggctcggccgtgcccatggtgccgcagatgaacttgccgcgcgccttgatgtcctgcagcgtgtccgcgtgggcggcgggcgccagggttgcggccaggccgat

SEQ ID NO: 5642 - DNA, 153 bp, Zea mays
  misc_feature (151)..(153): n is a, c, g, or t
  Peptide Sequence Number=SeqID_11681
  Probeset Number=SeqID_20045
atcggcctggccgcaaccctggcgcccgccgcccacgcggacacgctgcaggacatcaaggcgcgcggcaagttcatctgcggcaccatgggcacggccgagccgttcagcttccaggatcccaagacccgcgccatcgtcggctacgaannn

SEQ ID NO: 5643 - DNA, 931 bp, Zea mays
  misc_feature (1)..(4): n is a, c, g, or t
  misc_feature (842)..(843): n is a, c, g, or t
  misc_feature (852)..(852): n is a, c, g, or t
  misc_feature (863)..(864): n is a, c, g, or t
  misc_feature (866)..(866): n is a, c, g, or t
  misc_feature (877)..(879): n is a, c, g, or t
  misc_feature (881)..(883): n is a, c, g, or t
  misc_feature (886)..(892): n is a, c, g, or t
  misc_feature (895)..(900): n is a, c, g, or t
  misc_feature (915)..(931): n is a, c, g, or t
  Peptide Sequence Number=SeqID_11682
  Probeset Number=SeqID_20046
nnnngataacatcgcggtctacaaggattggctccaggcccacatcggcgtggatgtacaggcctgagacggctcacaccatcggtacggcaatcagcaagatcgccgtgccatgggtggccgtcgccgccaccacgccgtaacgcatccgcaccagcccgcaggccacgccttcaatcagggtaaaagccaacactggccagcccagttgcgtcacgctcagggccaaaaatgaatggcacgcggcgaacgccagcccgctgagcaacgccgcacgcagcggcctaacgtgctgttcgagatagccctgcaagaagccgcgaaacaacacctcttccagcgcattggcgcagtaggcaagcaccagcatgcccatcagccaggtccagtaagccgggattgccgccggttcgatgccttgatacaggcgcaatggcaggccaatcaaactgccggccaccaaccccactgccaggcccacagcgcgattgcccttgaacagcaccgtcagttgccataactccggggccaggcgcgcgagcagtgcgatcagcccaagggataagccgcccagcgccgccagcacgaagggattggccgtgaactggatctgcacctcgcggctcagcgaccaaatgcccaacggcgtcatcgcatcgcgcatcagcacgaaggccaacagcagaataacgatgcgcacgcccggcaatgtttttggcgtgaggccgaaccacaggccgaacaggatcagccctggcagcagataaatcccatagtgaatcagcactgtaaaagcgtcggcaatcactcggtgtcagccctgtgctacagcgatcatgtcnntttccacgncggcgcccttnngncagtgcagcannncnnncgnnnnnnngcnnnnnnaaaccggcagccccnnnnnnnnnnnnnnnnn

SEQ ID NO: 5644 - DNA, 931 bp, Zea mays
  misc_feature (1)..(17): n is a, c, g, or t
  misc_feature (32)..(37): n is a, c, g, or t
  misc_feature (40)..(46): n is a, c, g, or t
  misc_feature (49)..(51): n is a, c, g, or t
  misc_feature (53)..(55): n is a, c, g, or t
  misc_feature (66)..(66): n is a, c, g, or t
  misc_feature (68)..(69): n is a, c, g, or t
  misc_feature (80)..(80): n is a, c, g, or t
  misc_feature (89)..(90): n is a, c, g, or t
  misc_feature (928)..(931): n is a, c, g, or t
  Peptide Sequence Number=SeqID_11683
  Probeset Number=SeqID_20047
nnnnnnnnnnnnnnnnnggggctgccggtttnnnnnngcnnnnnnncgnnngnnntgctgcactgncnnaagggcgccgncgtggaaanngacatgatcgctgtagcacagggctgacaccgagtgattgccgacgcttttacagtgctgattcactatgggatttatctgctgccagggctgatcctgttcggcctgtggttcggcctcacgccaaaaacattgccgggcgtgcgcatcgttattctgctgttggccttcgtgctgatgcgcgatgcgatgacgccgttgggcatttggtcgctgagccgcgaggtgcagatccagttcacggccaatcccttcgtgctggcggcgctgggcggcttatcccttgggctgatcgcactgctcgcgcgcctggccccggagttatggcaactgacggtgctgttcaagggcaatcgcgctgtgggcctggcagtggggttggtggccggcagtttgattggcctgccattgcgcctgtatcaaggcatcgaaccggcggcaatcccggcttactggacctggctgatgggcatgctggtgcttgcctactgcgccaatgcgctggaagaggtgttgtttcgcggcttcttgcagggctatctcgaacagcacgttaggccgctgcgtgcggcgttgctcagcgggctggcgttcgccgcgtgccattcatttttggccctgagcgtgacgcaactgggctggccagtgttggcttttaccctgattgaaggcgtggcctgcgggctggtgcggatgcgttacggcgtggtggcggcgacggccacccatggcacggcgatcttgctgattgccgtaccgatggtgtgagccgtctcaggcctgtacatccacgccgatgtgggcctggagccaatccttgtagaccgcgatgttatcnnnn

SEQ ID NO: 5645 - DNA, 1037 bp, Zea mays
  misc_feature (1)..(115): n is a, c, g, or t
  misc_feature (117)..(117): n is a, c, g, or t
  misc_feature (119)..(133): n is a, c, g, or t
  misc_feature (135)..(135): n is a, c, g, or t
  misc_feature (140)..(145): n is a, c, g, or t
  misc_feature (148)..(151): n is a, c, g, or t
  misc_feature (153)..(153): n is a, c, g, or t
  misc_feature (159)..(159): n is a, c, g, or t
  misc_feature (162)..(171): n is a, c, g, or t
  misc_feature (189)..(196): n is a, c, g, or t
  misc_feature (202)..(204): n is a, c, g, or t
  misc_feature (210)..(210): n is a, c, g, or t
  misc_feature (213)..(214): n is a, c, g, or t
  misc_feature (221)..(221): n is a, c, g, or t
  misc_feature (224)..(232): n is a, c, g, or t
  misc_feature (265)..(265): n is a, c, g, or t
  misc_feature (277)..(277): n is a, c, g, or t
  Peptide Sequence Number=SeqID_11684
  Probeset Number=SeqID_20048
nnnnnnnnnnnnnnnnnnnnnnnnnnnnnnnnnnnnnnnnnnnnnnnnnnnnnnnnnnnnnnnnnnnnnnnnnnnnnnnnnnnnnnnnnnnnnnnnnnnnnnnnnnnnnnnnnnnantnnnnnnnnnnnnnnngngctgnnnnnnaannnncnaaaacncgnnnnnnnnnnaaaacacatcaaggtgcnnnnnnnntcaagnnnctggtngcnncttattngcnnnnnnnnntagcattcgcgcccaaggtgcaacctcttacgnacggttcatcgnctgatggctttcctggggaaacgtcagtcataaatgcgcggcgtcaggcttcgtctatccactagccaagtgggtggccgtccggacagaccgccgctacataaaaacaaagccagggcgtaactcaatgagcgtaagtaatcctaccctgatcacatttgtgatctatatcgctgccatggtgctgatcggcttcatggcctatcgctccaccaacaacctttccgactacatcctcggcggtcgcagcctcggcagcgtggtcaccgcgctctcggccggcgcctcggacatgagcggctggttgctgatgggcctgcccggcgcgatctacatgtctggcctgtcggaaagctggatcgccatcggcctgatcgtcggcgcctacctgaactggctgtttgtagccggccgcctgcgggttcagaccgagcacaacggcgacgccctgaccctgccggattatttctccagccgtttcgaagataaaagcggcctgctgcggatcatctctgcggtggtgatcctggtgttcttcaccatttactgcgcttccggcatcgttgccggcgcccgcctgtttgaaagcaccttcggcatgtcctacgagaccgcgctgtgggccggtgctgcggcgactattgcctacacctttgtgggtggtttcctggcggtgagctggactgacaccgtacaagccacgctgatgatcttcgccctgttgctcacgccgatcatcgtgctgctggccaccggtggc

SEQ ID NO: 5646 - DNA, 551 bp, Zea mays
  misc_feature (548)..(551): n is a, c, g, or t
  Peptide Sequence Number=SeqID_11685
  Probeset Number=SeqID_20049
aaaccggagaagaccggtgtctacaaacacctgctcaccggcgtgtcgttcatgttgccgatggtggtggcgggcggtctgctgatcgccctgtcgttcgtattcggcattcatgcctttgaagaaaaaggcaccctggccgccgcgctgaaaaccgtcggcgaccaggccttcatgctgatggtgccgctgttggcgggttatatcgcctactcgattgccgaccgtccgggcctggctcccggcatgatcggcggtctgctggccagcaccttgggcgcggggtttatcggcgggatcttcgccggtttcctggccggctactgcgtcaaattcatcagtcgtgcgatccgtttgccccagagcctcgaagccctcaagccgatcctgatcatcccgttgctggcgagcctgttcacgggcctggcgatgatttacctggtggggccgccggtggcgaagatgcttaccggcctcacggatttcctcagcaccatgggcaccaccaacgccgtgctgcttggcatcttgttgggcggcatgatgtnnnn

SEQ ID NO: 5647 - DNA, 896 bp, Zea mays
  misc_feature (1)..(11): n is a, c, g, or t
  misc_feature (692)..(896): n is a, c, g, or t
  Peptide Sequence Number=SeqID_11686
  Probeset Number=SeqID_20050
nnnnnnnnnnnctgctcaaggtaaccgggcaagcgcgatatgccggggaatttcccgaagacggcctgctgcacggcagtgtggtgtcgagcaacatcgccaagggccgggtcatccgcattgacgcttccaaagccctggcgctgccgggcgtggtgatggtgctcgatcacctcaaccgcccgaaactggccagctacgacgacagctacgccgatgccgatgccgccgacggctcgccatttcgcccgctgtacaacgaccgcgtgctgtacagcggccagccgttggcattggtgattgccgataacctggagctggcgcgtcatgccggctctttggttgagatcgaatacacagccgaaccttccgagaccgacctgctggccttgcaggaccaggcgcacccttcgccacaaacaccgcccaagccgcgcggcaacttccaggccgaatggaccggcgccgccacgagcctggatctgcactacagcacgcccatcgaacaccacaacccgatggagccccacgccagcaccgtgctgtaccagccggacggcaccctgcatatccacgacaagacccagggcccgcagaactgccaggcctacgtgcagaaagtcttcggcttggataaaagccaggtgcgaatcttcgctgcatttgtcggtggtgcctttggttcaggcttnnnnnnnnnnnnnnnnnnnnnnnnnnnnnnnnnnnnnnnnnnnnnnnnnnnnnnnnnnnnnnnnnnnnnnnnnnnnnnnnnnnnnnnnnnnnnnnnnnnnnnnnnnnnnnnnnnnnnnnnnnnnnnnnnnnnnnnnnnnnnnnnnnnnnnnnnnnnnnnnnnnnnnnnnnnnnnnnnnnnnnnnnnnnnnnnnnnnnnnnnnnnn

SEQ ID NO: 5648 - DNA, 531 bp, Zea mays
  misc_feature (1)..(3): n is a, c, g, or t
  misc_feature (5)..(5): n is a, c, g, or t
  misc_feature (531)..(531): n is a, c, g, or t
  Peptide Sequence Number=SeqID_11687
  Probeset Number=SeqID_20051
nnngntggaagaggaagaggctcatcacctgatggatgggctggactttggtgacgcggtttcccaggacatcaagggcgccgtgcagtacttgcaggcggattcgaaaaaagtcggcgtgaccggttactgcatgggcggggcgttgacgttgctggcgttgaacgcgattccggaattggcggcgggcgtggtgtggtacggcttcccgccgctggaatacctggatgcttcgaagatcaaggcgccgctgatcgggcattggggcacacaggatgccttcttcaacatcgacaccgtggcggagctggagtcaaaactgcacgcggcgggtgtggacgcgacgttccatcgctacctggcgcgccatgcgtttgccaacgagactgcgattggtgatggccgaattgcggatacgcaatacgatgccgcctggtcgcaattggcgtgggatcggacgctgacgttcttcggcaagaccttgtggcaggcataaaacacgctttaccagcctgcacataacccttgtgn

SEQ ID NO: 5649 - DNA, 860 bp, Zea mays
  misc_feature (1)..(2): n is a, c, g, or t
  misc_feature (714)..(716): n is a, c, g, or t
  misc_feature (746)..(860): n is a, c, g, or t
  Peptide Sequence Number=SeqID_11688
  Probeset Number=SeqID_20052
nnatgaacggctccaatagatgagtactcaaccaatattgttgagggctcaagttataggcttggcgtttgtccttgtcaatggtttagtactcaatcattctagaggcatggaggagctgaaaatgcccattgagaagactgacaagcctgatgatcgcgccgaccttttgagtctgctcggcgatgtggcgtgcaccaacaacgcactgcgccgtgccgccaggcgactgggccaactgtatgacgaagcactggcaccgattggcctgaaggccacacaggtcggcttgctgggtgaaatcacccggctgtcggcggttgacgagcaggcggggccgacgttgcaggaggtggccggacgcctggcgatcctgatgtcggcgctgacccacgccatgaagccgctggtgcgcgacgggatcgtcgagctacgtccggacgccctggacaagcgcaccaaacgctgtgtgctcacgcccaagggcgaagcgctgttcaatgaggcgctggtgttctgggcgtctgccaacaaccgggtggaggaggtgctggggcatgattcggccgcgcagttgcgcggcatggcagaccatatcgcctccgacgcgtttttggcggactacaacagccagtccgcgcaggcataagccagatcctttcgttattagacagacgccgttcgcgcatccgatgctgagcccctctcgatcannngctttccatgaccactccacgccaactgannnnnnnnnnnnnnnnnnnnnnnnnnnnnnnnnnnnnnnnnnnnnnnnnnnnnnnnnnnnnnnnnnnnnnnnnnnnnnnnnnnnnnnnnnnnnnnnnnnnnnnnnnnnnnnnnnn

SEQ ID NO: 5650 - DNA, 860 bp, Zea mays
  misc_feature (1)..(115): n is a, c, g, or t
  misc_feature (145)..(147): n is a, c, g, or t
  misc_feature (859)..(860): n is a, c, g, or t
  Peptide Sequence Number=SeqID_11689
  Probeset Number=SeqID_20053
nnnnnnnnnnnnnnnnnnnnnnnnnnnnnnnnnnnnnnnnnnnnnnnnnnnnnnnnnnnnnnnnnnnnnnnnnnnnnnnnnnnnnnnnnnnnnnnnnnnnnnnnnnnnnnnnnnntcagttggcgtggagtggtcatggaaagcnnntgatcgagaggggctcagcatcggatgcgcgaacggcgtctgtctaataacgaaaggatctggcttatgcctgcgcggactggctgttgtagtccgccaaaaacgcgtcggaggcgatatggtctgccatgccgcgcaactgcgcggccgaatcatgccccagcacctcctccacccggttgttggcagacgcccagaacaccagcgcctcattgaacagcgcttcgcccttgggcgtgagcacacagcgtttggtgcgcttgtccagggcgtccggacgtagctcgacgatcccgtcgcgcaccagcggcttcatggcgtgggtcagcgccgacatcaggatcgccaggcgtccggccacctcctgcaacgtcggccccgcctgctcgtcaaccgccgacagccgggtgatttcacccagcaagccgacctgtgtggccttcaggccaatcggtgccagtgcttcgtcatacagttggcccagtcgcctggcggcacggcgcagtgcgttgttggtgcacgccacatcgccgagcagactcaaaaggtcggcgcgatcatcaggcttgtcagtcttctcaatgggcattttcagctcctccatgcctctagaatgattgagtactaaaccattgacaaggacaaacgccaagcctataacttgagccctcaacaatattggttgagtactcatctattggagccgttcatnn

SEQ ID NO: 5651 - DNA, 232 bp, Zea mays
  misc_feature (1)..(3): n is a, c, g, or t
  Peptide Sequence Number=SeqID_11690
  Probeset Number=SeqID_20054
nnnaccgcgcgccgcacggccgcgctgtacctgatgcagtttcatcacgtgatggaggatgacgccgcatgaacaaggaaccggaattcctggccaaggggcacgatcccgccgatccgagcccctggctggcgctgtacctggatcgcagcacgccgctgccggacaaggtcaagaaggcctggctgaccgattcgagctgcggctcgcgccagtacctgctgccgttcct

SEQ ID NO: 5652 - DNA, 232 bp, Zea mays
  misc_feature (230)..(232): n is a, c, g, or t
  Peptide Sequence Number=SeqID_11691
  Probeset Number=SeqID_20055
aggaacggcagcaggtactggcgcgagccgcagctcgaatcggtcagccaggccttcttgaccttgtccggcagcggcgtgctgcgatccaggtacagcgccagccaggggctcggatcggcgggatcgtgccccttggccaggaattccggttccttgttcatgcggcgtcatcctccatcacgtgatgaaactgcatcaggtacagcgcggccgtgcggcgcgcggtnnn

SEQ ID NO: 5653 - DNA, 1021 bp, Zea mays
  misc_feature (1)..(11): n is a, c, g, or t
  misc_feature (828)..(830): n is a, c, g, or t
  misc_feature (840)..(841): n is a, c, g, or t
  misc_feature (850)..(850): n is a, c, g, or t
  misc_feature (852)..(852): n is a, c, g, or t
  misc_feature (867)..(868): n is a, c, g, or t
  misc_feature (871)..(871): n is a, c, g, or t
  misc_feature (876)..(881): n is a, c, g, or t
  misc_feature (889)..(889): n is a, c, g, or t
  misc_feature (898)..(1021): n is a, c, g, or t
  Peptide Sequence Number=SeqID_11692
  Probeset Number=SeqID_20056
nnnnnnnnnnngggggcaacgccgtctcggtgacttacaccctcaacgactggttcggcgccggcgtgatggcgagcaagaccggggtgatcctcaacgacgaaatggacgacttcacctccaagatcggcgtgccgaacatgtacggcctggtccagggcgaagccaacgctatcgcgccgggcaagacgccgctgtcgtccatgagcccgaccatcgtcaccaaggacggcaaagcggtgatggttgtggggacgccgggtggcagccgcatcatcacggccaccttgctgaccatcctcaatgtcatcgactacaagatgaacattcaggaagccgtggacgccccgcgtttccaccagcaatggctgcctgaggcgaccaatatcgaacgctttgccctgagccccgacacccagaaaatcctcgaaggctggggccacaagtttgccggcccgcaggatgccaaccacctggcagccatcctggtgggcgcaccgtccctggacggcaagccggtgggcaataaccgtttctatggggccaacgacccacggcgcaataccgggttgtcgttgggctactgaggtcaatcgcgcctgaaaacggaacgaccgaacaccttccgggctctactccaagagccctggaaggacccttcccatgaaagcgctgaagatcgcgaccttcaacatcaatggcatccgcgcccgcctgcccaatctgctggaatggctggcgcgggaacagccggatattgtctgcctgcaagaactcaaggcgcccgacagcctgtttcccttcaacgactttgacgccgccggctannntgcgttgtgnntgggccagncntcatggaacggcgtnncgnttctnnnnnncgacgcgnaaccgctgnnnnnnnnnnnnnnnnnnnnnnnnnnnnnnnnnnnnnnnnnnnnnnnnnnnnnnnnnnnnnnnnnnnnnnnnnnnnnnnnnnnnnnnnnnnnnnnnnnnnnnnnnnnnnnnnnnnnnnnnnnnn

SEQ ID NO: 5654 - DNA, 316 bp, Zea mays
  misc_feature (1)..(6): n is a, c, g, or t
  Peptide Sequence Number=SeqID_11693
  Probeset Number=SeqID_20057
nnnnnntgcgagccaacgtttacttcgacaattcgattccggatggcaaaggcggctacgaagatcgtggcggtttttgggcgaatgtggagtggtggcacaaggacgccgagcattattcgcaactgttccagaaaggtatgcgagtgctggtttccggtcgcgccgttatggaccgttggaagaacgacgatggcgaattcgaagctttgaaaatccaggccagccgggtcggcatgctgccacaccgcgtgaccatggtgaatctggcgccttcgcaaaaccagaattcgcaacagtccaacagacccgaatc

SEQ ID NO: 5655 - DNA, 316 bp, Zea mays
  misc_feature (311)..(316): n is a, c, g, or t
  Peptide Sequence Number=SeqID_11694
  Probeset Number=SeqID_20058
gattcgggtctgttggactgttgcgaattctggttttgcgaaggcgccagattcaccatggtcacgcggtgtggcagcatgccgacccggctggcctggattttcaaagcttcgaattcgccatcgtcgttcttccaacggtccataacggcgcgaccggaaaccagcactcgcatacctttctggaacagttgcgaataatgctcggcgtccttgtgccaccactccacattcgcccaaaaaccgccacgatcttcgtagccgcctttgccatccggaatcgaattgtcgaagtaaacgttggctcgcannnnnn

SEQ ID NO: 5656 - DNA, 749 bp, Zea mays
  misc_feature (1)..(1): n is a, c, g, or t
  misc_feature (4)..(10): n is a, c, g, or t
  misc_feature (15)..(16): n is a, c, g, or t
  misc_feature (31)..(35): n is a, c, g, or t
  misc_feature (746)..(749): n is a, c, g, or t
  Peptide Sequence Number=SeqID_11695
  Probeset Number=SeqID_20059
nagnnnnnnnccgcnngtcatccagcgcctnnnnnaggcgaccgtcaaggccctggcttcaccggatatccggcagaagctggaaagcgtaggcttcgtggtggtgggcgacgaccccaaggcgttctcggccttcgtccaatccgaaatcaccaagtggggcgcggcggccaaggcctccggcgcccgcatggactagcgtccggtatcaactcccccccgcgcgccgggcggcgccgggggttcaatacgatgggaaacccgcagcgatgacttcacccttgcccaaccgctttcgccaacgcatcctggcgcgcgagcgcctgatcggtttctggatgtgcatgtccagccacatcaccgcggaagtcgcgggcctggccgacttcgactggctgctgctggacggcgagcattcgcccaacaccgtgccgatgttcctgcagcagctgcaggccctgcagggcagcgccagcgccgccatcggccggccgacctggaacgatccggtcgagatcaagcgcctgctcgatatcggcttctacaacctgctgatccccttcatcgaatccgaggacgacgcgcgccgcgccgtggccgccacgcgctatccgccgcagggcatccgcggcgtggccggcatgcagcgcagcaaccgctacggcaccgtgccggattacttgaagaccatcaacgacaacatctgcgtgctgctgcagatcgagagccgccccggcatcgaggcnnnn

SEQ ID NO: 5657 - DNA, 857 bp, Zea mays
  misc_feature (1)..(3): n is a, c, g, or t
  misc_feature (807)..(808): n is a, c, g, or t
  misc_feature (815)..(815): n is a, c, g, or t
  misc_feature (828)..(828): n is a, c, g, or t
  misc_feature (831)..(832): n is a, c, g, or t
  misc_feature (837)..(857): n is a, c, g, or t
  Peptide Sequence Number=SeqID_11696
  Probeset Number=SeqID_20060
nnnatggaccacctgcgtcacggcatccacctgcgtggctacgcccagaagaacccgaagcaggagtacaagcgcgagtcgttcacgctgttctccgagctgctggattcgatcaagcgcgattcgattcgtgtgctgtcccacgttcaggtgcgtcgcgaagacccgatcgaggaagaagcccgcctgcgtcaggaagccgaggcactggctgcgcggatgcagttccagcacgacgaagcgcctggcctagaggctccggaagtgttgggtgaagaggtcgatgtggccctggctcaagctccggtgcgcaatgagcagaagctgggtcgcaatgaactgtgctggtgcggttcgggcaagaagttcaaacactgccacggcgaaatcaactaagattttcgcctgacgctgcaacaccccgcgccgcgaccggcatcagccgtcgcggcgttttgccattttgtcaccgtcgagaatgacgggtcacacatccactatttttaggagcgcattcatggctgttggtcttggtcctttgcccacgttgcacccggttgccggttttgaactcggtattgcttcggccggcatcaaacgcccggggcgcaaggatgtggtggtgatgcgctgtgccgaaggctcgaccgtcgcgggtgtgttcaccctgaacgcgttttgcgcggctccggtgattttggccaagcagcgggttgaaggcccggtgcgttacctgctgaccaacactggcaatgccaacgccggcaccggcgagcctggcctggccgctgctgctcgcacctgcgnnaagctgncagagctgactgncgnngatgnnnnnnnnnnnnnnnnnnnnn

SEQ ID NO: 5658 - DNA, 987 bp, Zea mays
  misc_feature (1)..(6): n is a, c, g, or t
  misc_feature (786)..(788): n is a, c, g, or t
  misc_feature (805)..(807): n is a, c, g, or t
  misc_feature (818)..(819): n is a, c, g, or t
  misc_feature (821)..(821): n is a, c, g, or t
  misc_feature (834)..(834): n is a, c, g, or t
  misc_feature (860)..(860): n is a, c, g, or t
  misc_feature (862)..(862): n is a, c, g, or t
  misc_feature (866)..(871): n is a, c, g, or t
  misc_feature (892)..(895): n is a, c, g, or t
  misc_feature (898)..(903): n is a, c, g, or t
  misc_feature (908)..(918): n is a, c, g, or t
  misc_feature (922)..(932): n is a, c, g, or t
  misc_feature (939)..(947): n is a, c, g, or t
  misc_feature (955)..(973): n is a, c, g, or t
  misc_feature (975)..(987): n is a, c, g, or t
  Peptide Sequence Number=SeqID_11697
  Probeset Number=SeqID_20061
nnnnnngacatcccccgtgatgccctggtggtgttcaccggcgtgtcaggctccggcaagtcctcgctggcattctccaccgtctacgccgaagcccagcgccgctacttcgaatccgtcgcgccctatgcccgtcgcctgatcgaccaggttggtgtgcccgacgtcgactccatcgaaggcctgccacctgccgtggccctgcaacagcagcgcggcacacccagcacacggtcctcagtgggcagcgtcaccaccttgtccagcctgatccgcatgctctactcccgcgccggcagctacccggcggggcaaccgatgctgtacgccgaggacttttcccccaacctgccccaaggcgcgtgcccgcaatgccacggcctgggccgggtgtacgaagtgaccgaagccctgatggtgcccgatccttccctcaccatccgccagcgcgccgtagcgtcctggccgctggcgtggcaaggccagaaccagcgcgacatccttgtcaccttgggctacgacgtcgacatcccatggagagatctgccgaaaaagcagcgcgactggatcctcttcaccgaagaaacccccaccgtcccggtatatgccggcttcacgcccgcgcaaacccgcgacgccctcaaacgcaaactcgaacccagctaccaaggcaccttcaccggtgctcgacgctacatcctgcacaccttcacccattcccaaagcgccctgatgaaaaagcgcgtgtcgcaattcatgcaaggcagcccatgcccgctgtgcgannncaaacgcctgaacaagnnngcgctgtcggnnanatttgccggcgtngacattggcgagctgtcgcaaatgtncntgcnnnnnntcgccgagctcctgcgcccgnnnnctnnnnnncaggnnnnnnnnnnntctnnnnnnnnnnncgcctgnnnnnnnnncgcatcgnnnnnnnnnnnnnnnnnnncnnnnnnnnnnnnn

SEQ ID NO: 5659 - DNA, 706 bp, Zea mays
  misc_feature (1)..(7): n is a, c, g, or t
  misc_feature (34)..(38): n is a, c, g, or t
  misc_feature (60)..(61): n is a, c, g, or t
  misc_feature (455)..(456): n is a, c, g, or t
  misc_feature (458)..(462): n is a, c, g, or t
  misc_feature (464)..(467): n is a, c, g, or t
  misc_feature (663)..(666): n is a, c, g, or t
  misc_feature (698)..(706): n is a, c, g, or t
  Peptide Sequence Number=SeqID_11698
  Probeset Number=SeqID_20062
nnnnnnncgccggcggcgtgcagtggcgcatggnnnnncaggtggccgaagtggcccatnncgaggccggcttcgagctgcgcaccagccagggcgcgatccgcgcggccaagctggtggtggccaccggcggcatggcgatcccgcagctgggcgccaccgacttcggcctgaaactggcgcgccagttcggcctgaaggtggtcgagccgcggccggcgctggtgccgctgaccttcgacgccgcgcactggcagccgctggccgaactgtccggcgtggcgctggaggtcaacctggccacggggcagggcaaggcgcgtggcgagttcctcgaggacctgctgttcacccatcgcggcctgtcgggcccggccatcctgcagatctccagcttctggaagccgggcgagcccatcgtgatcgacctggcgccggggcgcgacctggccgcnnannnnntnnnngccaagtcgggcaaccggcagcagttgcacacggtgctggccggcctgtggcccaagcgcctggccgaccgctggctgcagctggcggagcagggcggcaagccgggcctggcggcgctgcgcctggccgacgcgccggacaagaccctgcgcgcgctggcgcaggacattcaccagtggacgctggtgcccagcnnnnccgccggctacaagaaggccgaggtcatgcgnnnnnnnnn

SEQ ID NO: 5660 - DNA, 915 bp, Zea mays
  misc_feature (1)..(5): n is a, c, g, or t
  misc_feature (802)..(805): n is a, c, g, or t
  misc_feature (830)..(831): n is a, c, g, or t
  misc_feature (842)..(848): n is a, c, g, or t
  misc_feature (855)..(856): n is a, c, g, or t
  misc_feature (861)..(865): n is a, c, g, or t
  misc_feature (868)..(899): n is a, c, g, or t
  misc_feature (901)..(907): n is a, c, g, or t
  misc_feature (910)..(913): n is a, c, g, or t
  Peptide Sequence Number=SeqID_11699
  Probeset Number=SeqID_20063
nnnnnggaaaaccgctacaaccagatcttcaagatccaggtagagctgccggcggacatctctgataaagaccgccagggcatcctgcgttccatcgaccgttgcaccgtgaagaaagtggtgcaggccgggccggagtttgtgatcgaggaagtggaaaacctggatgccgatgcccaggcattgctgatgccaagcgcggcgtcggatgcgggcacctacattgcgggcaaggacctcccactggaaacaaccatcgccaacatgtcggccatcctggcgggcctgggcatgaagattgaaatcgcgtcgtggcgcaatatcgtgcccaacgtgtggtcgctgcatatccgcgatgcgcactcgccaatgtgctttaccaacggcaagggcgcgaccaaggaaggcgcgctggcgtcggcgttgggcgagtttatcgaacgactgaactgcaacttcttctacaacgaccagttctggggcgaagacatcgccaacgcggcgtttgtgcattacccggatgagcgctggttcaagcccggccgcaaggacgaactgccgccggaaattctcgacgcccattgcctgcatatctacaaccgcgatggcgagctgcgtggctcgcacctgtacgacaccaactccggcaacgaggagcgcggtattgtttcgctgccattcgtgcgccagtccgacggcgaggtggtgtatttcccgtccaacctgatcgagaacctgtacctcagcaacggcatgagtgccggtaacaccctggctgaagcgcaggtgcagtgcctgtcgnnnncttcgagcgtgcggtaaaacgcganntcatcgaaggnnnnnnngcgctgnnggatnnnnngcnnnnnnnnnnnnnnnnnnnnnnnnnnnnnnnncnnnnnnncannnnct

SEQ ID NO: 5661 - DNA, 359 bp, Zea mays
  misc_feature (356)..(359): n is a, c, g, or t
  Peptide Sequence Number=SeqID_11700
  Probeset Number=SeqID_20064
ccaccggctggacctcggagatcgtcaacagccagaaactcaaggcttacggcctgaccgacaccttcgtcaacttccgcaccggctccggcgcggcgctggatgccgaggtcgcttcgtcgatccgacgcggcaaacctgtgctgttctactactggtcgccgacgccactgttggggcgcttcaagttgatcaaactggaagagccaccgttcaacgccgaagcctggaagaccctggccgacgccaacaacccgcaccccatcggcacccgctcgatgccagcgcacctggcgattggcgtgtcggcgtcgttcaaggcgcagtacccgcaactggtgacgttctttgaaaannnn

SEQ ID NO: 5662 - DNA, 566 bp, Zea mays
  misc_feature (1)..(3): n is a, c, g, or t
  Peptide Sequence Number=SeqID_11701
  Probeset Number=SeqID_20065
nnnaacaggccgcgcgcctgaccctcgcagccaacgtcgccaaggcctacagcgacctgggtcaggcccatatcgtgcgcgacctggccaatgatgacctcaagcgcacccggcaaatgctcgacctgggcaagcgtcgcctgaactccgggatcgacagccagtaccagtaccagcaaaccgagagcctggaagccagctcccagtcgcaactgatcgatgcggaaaaacaactgcagagcgccaagatcgccctcgccgtgttgctcggcaaaggtccggatcgcggcagcgaactggtacgccccaacgtgctcaagcccagcgcggttgccgtgccttccgtattgcctgccgagctggtgggccgtcgtccggacctgatcgccgcacgctggcgtgtcgaggctgcaagcaagaacatcgatgccagcaagacccgtttctaccccaacctcaacctgagcgcgagcgccggggccgagtcgttgctgggggatgcgatgtttggttcggccagccgcttcttcagcatagcgccgaccatctcgctgccgatcttcgac

SEQ ID NO: 5663 - DNA, 167 bp, Zea mays
  misc_feature (1)..(8): n is a, c, g, or t
  Peptide Sequence Number=SeqID_11702
  Probeset Number=SeqID_20066
nnnnnnnntcgggcaaacccggggtttgtgctgaagcagcggtcagcgacatcgcctgcggcttccacggcccgatgccgtcggcgtaggtcttgacctcggccaacccggccggtgtcagcatcgcaccaaaggagcgtggatcgcccgcgacggtccagctgtag

SEQ ID NO: 5664 - DNA, 167 bp, Zea mays
  misc_feature (160)..(167): n is a, c, g, or t
  Peptide Sequence Number=SeqID_11703
  Probeset Number=SeqID_20067
ctacagctggaccgtcgcgggcgatccacgctcctttggtgcgatgctgacaccggccgggttggccgaggtcaagacctacgccgacggcatcgggccgtggaagccgcaggcgatgtcgctgaccgctgcttcagcacaaaccccgggtttgcccgannnnnnnn

SEQ ID NO: 5665 - DNA, 1031 bp, Zea mays
  misc_feature (1)..(6): n is a, c, g, or t
  misc_feature (750)..(750): n is a, c, g, or t
  misc_feature (752)..(753): n is a, c, g, or t
  misc_feature (756)..(756): n is a, c, g, or t
  misc_feature (772)..(773): n is a, c, g, or t
  misc_feature (806)..(812): n is a, c, g, or t
  misc_feature (814)..(829): n is a, c, g, or t
  misc_feature (856)..(860): n is a, c, g, or t
  misc_feature (862)..(865): n is a, c, g, or t
  misc_feature (868)..(868): n is a, c, g, or t
  misc_feature (870)..(874): n is a, c, g, or t
  misc_feature (880)..(891): n is a, c, g, or t
  misc_feature (895)..(1031): n is a, c, g, or t
  Peptide Sequence Number=SeqID_11704
  Probeset Number=SeqID_20068
nnnnnnttcctctgtttcgagcagtggctggatcattgcggagtgctgcgatgagcacggtcgatacgctgatagacgactgcgccaacgaacccatccacattcccggatcgatccagccgcacggcttgttgttgacgctgagcgaaccggcgcttgaggtactgcaagccagcagcaacctgaccgtcgctttgggcctgggcgcggaaagtgcgtcgggccaggcgctggccagtgtgctgggtagcaaggccgcagcgcaggtgagccgtgccctggcggacctggacgccgatgaagaggaggtgcatcaactgacgcttgatgggtacgcctacgacatccttctgcatcgtcatcaggggctgctgtttctcgagctggagcggaccatggcccttgagcatcgcgccgtggggcaactcgcccgcacgctgcgccgcttgcagtcagccaagacgctggaaagtttgtaccagacctgcgtcaccgagattcgcagcctcaccgggtatgaccgggtcaccttgtaccgcttcgagcaggaaggccatggcaaggtcatcggtgaggccctcagcgagggcatgcagccgtacctgggattatgtttccctgcttcggacatcccgccccaggctcgtgagttgtaccggctgaactggatccgcgtgattcccgacgccgagtaccagccggtgccgatcctgccggccttgcgccccgacaacggccagcccctggacntnngcntcgccgtattgcgcanngtgtcgccggtgcactgtcactatctgaaaaannnnnnngnnnnnnnnnnnnnnnntgagcatttcgctgctcaaggacgacnnnnncnnnngcntnnnnncttgcnnnnnnnnnnnncgtnnnnnnnnnnnnnnnnnnnnnnnnnnnnnnnnnnnnnnnnnnnnnnnnnnnnnnnnnnnnnnnnnnnnnnnnnnnnnnnnnnnnnnnnnnnnnnnnnnnnnnnnnnnnnnnnnnnnnnnnnnnnnnnnnnnnnnnnn

SEQ ID NO: 5666 - DNA, 876 bp, Zea mays
  misc_feature (1)..(4): n is a, c, g, or t
  misc_feature (9)..(22): n is a, c, g, or t
  misc_feature (30)..(30): n is a, c, g, or t
  misc_feature (36)..(39): n is a, c, g, or t
  misc_feature (45)..(45): n is a, c, g, or t
  misc_feature (52)..(54): n is a, c, g, or t
  misc_feature (82)..(82): n is a, c, g, or t
  misc_feature (870)..(872): n is a, c, g, or t
  misc_feature (874)..(876): n is a, c, g, or t
  Peptide Sequence Number=SeqID_11705
  Probeset Number=SeqID_20069
nnnntgatnnnnnnnnnnnnnntgttcagnctctgnnnncgcaanggcgacnnnatgtacacgtccaagccgttcctgtacntggcgctgtggatgggcccgtccggtctgatcgcaattctcgccggctggttcaccaccgaaatcggccgacagccgtgggtggtctacgggctgatgcgcacggcggacgcctcgtccaaccacagctttgcgcagatgagcattacgttggtgttgtttgtggtggtgtatttcgcgctgttcggcgcgggcctgggctacatgatgcgcctggtgcgcaaagggcctgtgacccacgaaagcaccgagcctactcacggtggccctgggcagaaacgcacaccggcccgtccgttgtcggcggctgatgacagtgccgatgccgatcacggcgacaccttgaacaaggggaactgagccatgggtattgatcttccgctgatctgggccgtgatcatcatcttcggcatcatgatgtacgtggtcatggacggctttgacctggggatcggcattctcttcccgttcatcccgggcaagaccgaccgtgacgtgatgatgaacaccgtcgcccccgtgtgggacggcaacgaaacctggctggtactcggcggtgcggcgttgtttggcgcgttcccgctggcctattcggtggtgctctcggcgctgtacctgccactgatgctgatgctgatcgggctgatctttcgaggcgtggcgtttgaattccgcttcaaggccaaggacgacaagcgtcacttgtgggacaaggccttcatcggcggctcgctggcggcgacgttcttccagggcgtagcgctgggggcgttcatcgatggcatcccnnntnnn

SEQ ID NO: 5667 - DNA, 884 bp, Zea mays
  misc_feature (1)..(5): n is a, c, g, or t
  misc_feature (806)..(811): n is a, c, g, or t
  misc_feature (838)..(838): n is a, c, g, or t
  misc_feature (843)..(847): n is a, c, g, or t
  misc_feature (852)..(858): n is a, c, g, or t
  misc_feature (860)..(860): n is a, c, g, or t
  misc_feature (862)..(862): n is a, c, g, or t
  misc_feature (864)..(864): n is a, c, g, or t
  misc_feature (868)..(869): n is a, c, g, or t
  misc_feature (872)..(884): n is a, c, g, or t
  Peptide Sequence Number=SeqID_11706
  Probeset Number=SeqID_20070
nnnnntgctgattgccaatatggaatggaccgccgagcgcggcgaaattctcggcttcgtaccaacgccgttctacaggatcggcggcactgcagcggtactcaaggacagcaaaatcacccattgggaagacctcaagggccagcccgtgtgcacctcccagggtagcagctacgtcaagccgctgaccgagctgagcgcacagatcaaaggctttaagagctcctccgaatccctgctggccctgcgcggcaacaactgcgtcgcggcggtgcatgactccaccctgatcaacccgctgatcaacgacagcgccgaatggaaggactaccgcgccatcagccccgagctgaacccggcaccgtcggtgatctggactcgccgcggcgagaacgacacccaggccaaactcgacccgatcatcaaggagctgcaccgcagcggctggctgatcgacgcccagacccgcaatcacatcaccccggcgtccccggcgctggtggaattgcagaaacagttcaagggcgcctgacacatgacattgaaaaccctgactgccttgggcctggcactgtgcgcaagcctggcccacgccgacgccaccctcgacaagatccagcaacgccacgccatcagcgtcggcgtgatcctcagcggcccgccgtttggcaccctcgaccccaagaccggcgaacacctgggctacaacgtcgagctggccaagggcctcggccaggcgctgggtgtggagaccaagaccgtctcggtactggcgcccaaccgggtgcagttcctgcaacaaggcnnnnnncgatgtgctgatcgccaacatgcagtncaccnnnnngcgcnnnnnnntntngnctanntgnnnnnnnnnnnnn

SEQ ID NO: 5668 - DNA, 1014 bp, Zea mays
  misc_feature (1)..(3): n is a, c, g, or t
  misc_feature (790)..(791): n is a, c, g, or t
  misc_feature (793)..(793): n is a, c, g, or t
  misc_feature (822)..(822): n is a, c, g, or t
  misc_feature (827)..(829): n is a, c, g, or t
  misc_feature (831)..(834): n is a, c, g, or t
  misc_feature (840)..(840): n is a, c, g, or t
  misc_feature (847)..(847): n is a, c, g, or t
  misc_feature (855)..(855): n is a, c, g, or t
  misc_feature (857)..(858): n is a, c, g, or t
  misc_feature (867)..(867): n is a, c, g, or t
  misc_feature (869)..(869): n is a, c, g, or t
  misc_feature (878)..(878): n is a, c, g, or t
  misc_feature (880)..(880): n is a, c, g, or t
  misc_feature (885)..(885): n is a, c, g, or t
  misc_feature (895)..(897): n is a, c, g, or t
  misc_feature (905)..(911): n is a, c, g, or t
  misc_feature (918)..(923): n is a, c, g, or t
  misc_feature (926)..(934): n is a, c, g, or t
  misc_feature (937)..(939): n is a, c, g, or t
  misc_feature (941)..(942): n is a, c, g, or t
  misc_feature (957)..(964): n is a, c, g, or t
  misc_feature (966)..(975): n is a, c, g, or t
  misc_feature (977)..(983): n is a, c, g, or t
  misc_feature (985)..(992): n is a, c, g, or t
  misc_feature (999)..(1004): n is a, c, g, or t
  misc_feature (1007)..(1010): n is a, c, g, or t
  misc_feature (1012)..(1014): n is a, c, g, or t
  Peptide Sequence Number=SeqID_11707
  Probeset Number=SeqID_20071
nnnacctttacggtcagacccacgagggttctcgatggaaatatccagcccttgcagcttgatatgccctttgcggtagttgccagcgtccttttgagcctgggtcggctcaggcaggtcattgtcgggcgaggtcgctgcactatggtcggccagatccagtgcctctgccggcggcaggctcgcccggtcagctctcgatgagggcaaaaggtcgtttcgaccaggtacttcttctggcgatgccggaggtttagcttcaccggacggagcccctttagtttcaataagtcgagatcctccgccaggctggggacgcgcaactgattgaggggcatcctgatcctcatcgtcctggcgaacctgtaacctgggcgatgctgcatggtttaacagtgcgggcttaacctgtgggcccgccccacccaagctactggtcacagtccctggtgcagccagttgcgcaggcgctgaagatggtgcaccgggcagcacgtcccgagctttagccgcggcttcgggattgatcaggcgttcggcaagcgcatcgtccgagcgggcatggagccggtcacgggcgcctttataaccacctgccacccccttgcccgcaaaagcaagaaaacgccctgccagtagatcggccatggccgtgccgaccttttcaacagaaccgctttcatcatcggcttcggctgtgcgtcgcgcagtggagctgttgcccgtcgcacgctgacggagaccagatgaggccacttcctggtcaagaaagctattccactgggtcctnncngcatcgctgggcatcatggccccgatctnctctnnnannnnttttgnagttcanatcccgtncnncatccgcgnangaactggtntnatcanccattttgcnnntgaccgannnnnnngctcccnnnnnnccnnnnnnnnnaannncnncttttttaaaaaacnnnnnnnnannnnnnnnnngnnnnnnntnnnnnnnnttaaaannnnnnttnnnncnnn

SEQ ID NO: 5669 - DNA, 1014 bp, Zea mays
  misc_feature (1)..(3): n is a, c, g, or t
  misc_feature (5)..(8): n is a, c, g, or t
  misc_feature (11)..(16): n is a, c, g, or t
  misc_feature (23)..(30): n is a, c, g, or t
  misc_feature (32)..(38): n is a, c, g, or t
  misc_feature (40)..(49): n is a, c, g, or t
  misc_feature (51)..(58): n is a, c, g, or t
  misc_feature (73)..(74): n is a, c, g, or t
  misc_feature (76)..(78): n is a, c, g, or t
  misc_feature (81)..(89): n is a, c, g, or t
  misc_feature (92)..(97): n is a, c, g, or t
  misc_feature (104)..(110): n is a, c, g, or t
  misc_feature (118)..(120): n is a, c, g, or t
  misc_feature (130)..(130): n is a, c, g, or t
  misc_feature (135)..(135): n is a, c, g, or t
  misc_feature (137)..(137): n is a, c, g, or t
  misc_feature (146)..(146): n is a, c, g, or t
  misc_feature (148)..(148): n is a, c, g, or t
  misc_feature (157)..(158): n is a, c, g, or t
  misc_feature (160)..(160): n is a, c, g, or t
  misc_feature (168)..(168): n is a, c, g, or t
  misc_feature (175)..(175): n is a, c, g, or t
  misc_feature (181)..(184): n is a, c, g, or t
  misc_feature (186)..(188): n is a, c, g, or t
  misc_feature (193)..(193): n is a, c, g, or t
  misc_feature (222)..(222): n is a, c, g, or t
  misc_feature (224)..(225): n is a, c, g, or t
  misc_feature (1012)..(1014): n is a, c, g, or t
  Peptide Sequence Number=SeqID_11708
  Probeset Number=SeqID_20072
nnngnnnnaannnnnnttttaannnnnnnnannnnnnncnnnnnnnnnntnnnnnnnngttttttaaaaaagnngnnnttnnnnnnnnnggnnnnnngggagcnnnnnnntcggtcannngcaaaatggntgatnanaccagttcntncgcggatgnngnacgggatntgaactncaaaannnntnnnagagnagatcggggccatgatgcccagcgatgcngnnaggacccagtggaatagctttcttgaccaggaagtggcctcatctggtctccgtcagcgtgcgacgggcaacagctccactgcgcgacgcacagccgaagccgatgatgaaagcggttctgttgaaaaggtcggcacggccatggccgatctactggcagggcgttttcttgcttttgcgggcaagggggtggcaggtggttataaaggcgcccgtgaccggctccatgcccgctcggacgatgcgcttgccgaacgcctgatcaatcccgaagccgcggctaaagctcgggacgtgctgcccggtgcaccatcttcagcgcctgcgcaactggctgcaccagggactgtgaccagtagcttgggtggggcgggcccacaggttaagcccgcactgttaaaccatgcagcatcgcccaggttacaggttcgccaggacgatgaggatcaggatgcccctcaatcagttgcgcgtccccagcctggcggaggatctcgacttattgaaactaaaggggctccgtccggtgaagctaaacctccggcatcgccagaagaagtacctggtcgaaacgaccttttgccctcatcgagagctgaccgggcgagcctgccgccggcagaggcactggatctggccgaccatagtgcagcgacctcgcccgacaatgacctgcctgagccgacccaggctcaaaaggacgctggcaactaccgcaaagggcatatcaagctgcaagggctggatatttccatcgagaaccctcgtgggtctgaccgtaaaggtnnn

SEQ ID NO: 5670 - DNA, 945 bp, Zea mays
  misc_feature (1)..(4): n is a, c, g, or t
  misc_feature (8)..(16): n is a, c, g, or t
  misc_feature (20)..(29): n is a, c, g, or t
  misc_feature (35)..(36): n is a, c, g, or t
  misc_feature (38)..(38): n is a, c, g, or t
  misc_feature (42)..(49): n is a, c, g, or t
  misc_feature (54)..(55): n is a, c, g, or t
  misc_feature (910)..(945): n is a, c, g, or t
  Peptide Sequence Number=SeqID_11709
  Probeset Number=SeqID_20073
nnnncccnnnnnnnnncgtnnnnnnnnnncatgcnngnctgnnnnnnnncagannacatggagtacgagtgaatgcccgcgcaagcccgtttcatcgagcactaccgcaaagccgaccgcatcatgctcgccctgatctggctgatggccctgttttccctgggcctggcgttctggcacgacacgctgctgcaagcgctcatcatcgggggcggcaccagcgtggtgcttaccctggcctatcgcgtcataggcggcactcgcctgatgcgctgcgcgcttggcgttggcctgatgatcatggcggcattacacatcaaccaggctgagggcgtcatcgaatcgcacttcggtatctttgcactgctggcggtgctgaccttctaccgcgactggctgcccatcctggtggccgccgccaccatcgcggtgcaccacgtggtgttccatgccttgcaacaccagggtttcccggtgtttgtgatggagcatcacgggggctggagcatgattttcgtccacgcgttctacgtggtgatggagacggtcgccctgctctacctcgcggttcacagccagaaagaggcggtagaaagtcaggagatgctcgaaaagatgctcgccgtcaccacccagttcagcggtgaggccgccaagggcagcccggaaaaagctcatgtctcactggcgacgcgtttcgaccactttctgacccagatcaccggcctgatagacggcgtcgcccgcgactcccatggcctcggccaactcggccaggaactggcccacgccagcggcaccctggaaaaaggcgcgcgccatcaactggcggaaatcgcgcaaatgaccgactccatgcagcgcatggaagacgccatgggccacatcgccgtgcacgtcgaacaggccnnnnnnnnnnnnnnnnnnnnnnnnnnnnnnnnnnnn

SEQ ID NO: 5671 - DNA, 341 bp, Zea mays
  misc_feature (1)..(2): n is a, c, g, or t
  Peptide Sequence Number=SeqID_11710
  Probeset Number=SeqID_20074
nnatgcgcctgcggccctacggttcagccggggcgctagtgctcagcttcaacgcgctggagcagtactaccaggatcagggccgcgactgggaacgctacgccatgatcaaggcgcgggtggtggcgggtgaccaggtggctggcgcgcaactgctcgacatgctgcgaccgtttgtctaccggcgttacctggacttctccgccatcgaagcgctgcgcaccatgaagcagttgatccagcaggaagtgcggcgcaagggcatggccgagaacatcaagctgggctcgggcggcattcgtgaagtcgaatttatcgcccaggcgttccaactgatccac

SEQ ID NO: 5672 - DNA, 916 bp, Zea mays
  misc_feature (37)..(40): n is a, c, g, or t
  misc_feature (627)..(628): n is a, c, g, or t
  misc_feature (643)..(643): n is a, c, g, or t
  misc_feature (651)..(651): n is a, c, g, or t
  misc_feature (653)..(657): n is a, c, g, or t
  misc_feature (660)..(663): n is a, c, g, or t
  misc_feature (668)..(675): n is a, c, g, or t
  misc_feature (677)..(677): n is a, c, g, or t
  misc_feature (682)..(698): n is a, c, g, or t
  misc_feature (700)..(702): n is a, c, g, or t
  misc_feature (706)..(715): n is a, c, g, or t
  misc_feature (721)..(721): n is a, c, g, or t
  misc_feature (723)..(741): n is a, c, g, or t
  misc_feature (746)..(761): n is a, c, g, or t
  misc_feature (763)..(916): n is a, c, g, or t
  Peptide Sequence Number=SeqID_11711
  Probeset Number=SeqID_20075
gagcagccggtcagcgttttcgccctggttatgaatnnnnaaatacgccgcgacggttggcgcgttgggcggcagttcctgggaccagggttcgctgaccaccagttcgccgaccttgaagtcttcggcattggcagcagcacacaccggcagcagcaacgcagccagaagcagggaagatttgagcatggcagttctccagaacggttctaaacgcagttcacttgcgaagaaatcagaccgttggagaggcgcgggggttaaggctcggccattgctggcgcggggtgggggattgcaatgacggcggtggcaagtcttgcaccgcgtcgaaacgagcaaagaacaggcttggtgtgtgcccgggcagcgcgaccagaggcgccgagcccgagcaacaccagcaatgctgcatggtggagtgatcgtcctgctgcggcgccggaatctccagcttgcccagggcaatggctgtcagtttcgtgccattggaggagcagaaactgccccagagcagttggtcgagggcattgttcgaacgttgcatcgccccggccatcggcatggcaaacacattgaacagcactgcaaagcaggcgatccaggcaaatgtttttcgttgacggnngatggcggacaatcngtagggtnannnnntcnnnnttttnnnnnnnntnatcgnnnnnnnnnnnnnnnnntnnngcgnnnnnnnnnnggctcntnnnnnnnnnnnnnnnnnnnttttnnnnnnnnnnnnnnnncnnnnnnnnnnnnnnnnnnnnnnnnnnnnnnnnnnnnnnnnnnnnnnnnnnnnnnnnnnnnnnnnnnnnnnnnnnnnnnnnnnnnnnnnnnnnnnnnnnnnnnnnnnnnnnnnnnnnnnnnnnnnnnnnnnnnnnnnnnnnnnnnnnnnnnnnnn

SEQ ID NO: 5673 - DNA, 916 bp, Zea mays
  misc_feature (1)..(154): n is a, c, g, or t
  misc_feature (156)..(171): n is a, c, g, or t
  misc_feature (176)..(194): n is a, c, g, or t
  misc_feature (196)..(196): n is a, c, g, or t
  misc_feature (202)..(211): n is a, c, g, or t
  misc_feature (215)..(217): n is a, c, g, or t
  misc_feature (219)..(235): n is a, c, g, or t
  misc_feature (240)..(240): n is a, c, g, or t
  misc_feature (242)..(249): n is a, c, g, or t
  misc_feature (254)..(257): n is a, c, g, or t
  misc_feature (260)..(264): n is a, c, g, or t
  misc_feature (266)..(266): n is a, c, g, or t
  misc_feature (274)..(274): n is a, c, g, or t
  misc_feature (289)..(290): n is a, c, g, or t
  misc_feature (877)..(880): n is a, c, g, or t
  Peptide Sequence Number=SeqID_11712
  Probeset Number=SeqID_20076
nnnnnnnnnnnnnnnnnnnnnnnnnnnnnnnnnnnnnnnnnnnnnnnnnnnnnnnnnnnnnnnnnnnnnnnnnnnnnnnnnnnnnnnnnnnnnnnnnnnnnnnnnnnnnnnnnnnnnnnnnnnnnnnnnnnnnnnnnnnnnnnnnnnnnnnnnngnnnnnnnnnnnnnnnnaaaannnnnnnnnnnnnnnnnnnangagccnnnnnnnnnncgcnnnannnnnnnnnnnnnnnnncgatnannnnnnnnaaaannnngannnnntnaccctacngattgtccgccatcnnccgtcaacgaaaaacatttgcctggatcgcctgctttgcagtgctgttcaatgtgtttgccatgccgatggccggggcgatgcaacgttcgaacaatgccctcgaccaactgctctggggcagtttctgctcctccaatggcacgaaactgacagccattgccctgggcaagctggagattccggcgccgcagcaggacgatcactccaccatgcagcattgctggtgttgctcgggctcggcgcctctggtcgcgctgcccgggcacacaccaagcctgttctttgctcgtttcgacgcggtgcaagacttgccaccgccgtcattgcaatcccccaccccgcgccagcaatggccgagccttaacccccgcgcctctccaacggtctgatttcttcgcaagtgaactgcgtttagaaccgttctggagaactgccatgctcaaatcttccctgcttctggctgcgttgctgctgccggtgtgtgctgctgccaatgccgaagacttcaaggtcggcgaactggtggtcagcgaaccctggtcccaggaactgccgcccaacgcgccaaccgtcgcggcgtatttnnnnattcataaccagggcgaaaacgctgaccggctgctc

SEQ ID NO: 5674 - DNA, 1068 bp, Zea mays
  misc_feature (1)..(130): n is a, c, g, or t
  misc_feature (135)..(137): n is a, c, g, or t
  misc_feature (141)..(144): n is a, c, g, or t
  misc_feature (146)..(146): n is a, c, g, or t
  misc_feature (148)..(148): n is a, c, g, or t
  misc_feature (156)..(157): n is a, c, g, or t
  misc_feature (160)..(163): n is a, c, g, or t
  misc_feature (166)..(167): n is a, c, g, or t
  misc_feature (178)..(178): n is a, c, g, or t
  misc_feature (185)..(185): n is a, c, g, or t
  misc_feature (187)..(191): n is a, c, g, or t
  misc_feature (193)..(194): n is a, c, g, or t
  misc_feature (198)..(199): n is a, c, g, or t
  misc_feature (204)..(204): n is a, c, g, or t
  misc_feature (219)..(219): n is a, c, g, or t
  misc_feature (252)..(255): n is a, c, g, or t
  misc_feature (1061)..(1068): n is a, c, g, or t
  Peptide Sequence Number=SeqID_11713
  Probeset Number=SeqID_20077
nnnnnnnnnnnnnnnnnnnnnnnnnnnnnnnnnnnnnnnnnnnnnnnnnnnnnnnnnnnnnnnnnnnnnnnnnnnnnnnnnnnnnnnnnnnnnnnnnnnnnnnnnnnnnnnnnnnnnnnnnnnnnnnnnngcccnnngcannnncntngggcctgnncannnntgnncaacatgctcngcccgcntnnnnntnnggcnngtgtnaagcatcaggtggtnggcgtgttcagccaggcgctctgccgaccgttnnnngaagtcctgcagcgcctgggcagcaagcatgtgctggtggtgcactccaaggatggtttggacgagttcagcctggccgcaccgaccttcgtggcggagctgaaggatgaccaggtcaccgaatattgggtcgaacctgaagacctcggtatgaaaagccagagcctgcacggcctggcggtggaaagcccggcggcctcccttgaattgattcgcgatgccctggggcgtcgcaagaccgaaaacggccagaaagccgcagaaatgattgtgctcaatgccggtgcggcgctgtatgccgcggatcacgcctacagtcttaaagagggtgttgccctcgctcatgatgcattgcataccgggctggcgcgcgaaaagctcgaagaactgggtgcgtttactgcggtgttcaaagtggagaatgaaggatgagtgttccgaccgttctggagaaaatcctggcccgcaaggcagaagaagttgccgaacgccgtgcccgggtcagcctggctgaactggaaggcctggcgaaaaccgctgatgcaccgcgcgggtttgccaatgcgctgatcaagcaggccaaggaaaagcagccggccgttatcgctgaaatcaaaaaggcttcgccgagcaagggcgtgattcgcgagatcttcattcctgaagacattgccaagagctatgaaaagggcggtgcgacgtgcctctcggtgttgactgacatcgacttcttccagggttccgacctgtacctgcagcaagcgcgtgcggcgtgctcgctgccggtgatccgcaaggacttcatnnnnnnnn

SEQ ID NO: 5675 - DNA, 964 bp, Zea mays
  misc_feature (1)..(3): n is a, c, g, or t
  misc_feature (787)..(787): n is a, c, g, or t
  misc_feature (789)..(789): n is a, c, g, or t
  misc_feature (804)..(804): n is a, c, g, or t
  misc_feature (806)..(806): n is a, c, g, or t
  misc_feature (818)..(824): n is a, c, g, or t
  misc_feature (826)..(828): n is a, c, g, or t
  misc_feature (833)..(833): n is a, c, g, or t
  misc_feature (835)..(835): n is a, c, g, or t
  misc_feature (843)..(844): n is a, c, g, or t
  misc_feature (847)..(848): n is a, c, g, or t
  misc_feature (851)..(851): n is a, c, g, or t
  misc_feature (855)..(855): n is a, c, g, or t
  misc_feature (859)..(861): n is a, c, g, or t
  misc_feature (863)..(863): n is a, c, g, or t
  misc_feature (871)..(874): n is a, c, g, or t
  misc_feature (879)..(880): n is a, c, g, or t
  misc_feature (882)..(882): n is a, c, g, or t
  misc_feature (884)..(964): n is a, c, g, or t
  Peptide Sequence Number=SeqID_11714
  Probeset Number=SeqID_20078
nnnggccgatgccaacgtcggctcgatcttcggtattggctttgccgcctggagtggcggggcgctgcagttcatcaaccagtacggcctgaacgacttcatcgcccgtgcccgttacctggccgagcaatacggtgagcgcttcacgccaccggcgctgctgttggagaaagccgcacagggtgaagcgtttcggtgatcaaaatgtgggagcgggcttgccttggaagggtatttcaaggcaggctctggggtgttcattattcccatcgccgtgtcaggtattttttatgtcgttacgcgtgtgcatcctggaaaccgatatcctgcgtcctgggctgatcgatcagtaccaagggtacgggcagatgttcaagcgcctgttttccaaacagccgattgccgccgaattcgtcatctataacgtggtgcagggcgaatacccggcggatgaagaagtgttcgacgcgtacctcgtgacgggcagcaaagctgactctttcggcaccgatccctggatccagaccctcaagacctacctgctggaccgccatgcccgcggcgacaaactgatcggcatctgcttcggccaccagttgctggcgctgctgttgggcggcaagaccgagcgggcgaccaagggttggggcatgggcatccatgactacaaactgaacgccaaggcaccgtggatgagcccggtggtggaagaattgacgctgttgatcagccaccaggaccaggtcaccaccttgccggaaaacgccacagtgatcgcttccagcgnantctgcccgtttgcgncntaccacatcgannnnnnngnnnctgtncntccagggnnacnnggnattnatcnnngnctattccnnnngagcnncntnnnnnnnnnnnnnnnnnnnnnnnnnnnnnnnnnnnnnnnnnnnnnnnnnnnnnnnnnnnnnnnnnnnnnnnnnnnnnnnnn

SEQ ID NO: 5676 - DNA, 630 bp, Zea mays
  Peptide Sequence Number=SeqID_11715
  Probeset Number=SeqID_20079
gcgcctaccgctggagcaacgatcacccgcaggcgttcgccgccgccatggccaaaatcaccggcttgccgctggaggtgcacgtagccgtggccaacgccacccatatgcaaccggtggcgattgacgactcggtgatcagcggcctgcaaaccaccgccgacatctatcaggacgaaggcctgctgaccaaacacatcgacgtctcccaaggcttcgacaaaagcttcaacgccaagcgtgccccgcttacccaggcttcccgctaaaaggagaaagaacatgagcaaacgccaactgaaactcggtgccatggtgcacggcgtcggtcacggctggggcgaatggcgccacccgcaggcgcaacccaatgccagcgtcaacttcgggttctacaagcatcaaacgcaactggccgaaggtgcgaaattcgacttcgtgttcatcgccgacagcctgcatatccatgagaaatccagcccccattacctcaaccgttttgagcccctgaccatcctttcggccctcgccgccttgacctcgaatatcggcctggtggcgaccgtcaccgtgagctacaccgaaccgttccaggtagcacgccagctcgcctccctggaccacatcagc

SEQ ID NO: 5677 - DNA, 810 bp, Zea mays
  misc_feature (1)..(1): n is a, c, g, or t
  misc_feature (670)..(670): n is a, c, g, or t
  misc_feature (688)..(688): n is a, c, g, or t
  misc_feature (691)..(691): n is a, c, g, or t
  misc_feature (706)..(706): n is a, c, g, or t
  misc_feature (709)..(710): n is a, c, g, or t
  misc_feature (721)..(722): n is a, c, g, or t
  misc_feature (726)..(726): n is a, c, g, or t
  misc_feature (730)..(731): n is a, c, g, or t
  misc_feature (734)..(734): n is a, c, g, or t
  misc_feature (737)..(737): n is a, c, g, or t
  misc_feature (755)..(755): n is a, c, g, or t
  misc_feature (757)..(759): n is a, c, g, or t
  misc_feature (767)..(772): n is a, c, g, or t
  misc_feature (774)..(778): n is a, c, g, or t
  misc_feature (780)..(782): n is a, c, g, or t
  misc_feature (785)..(787): n is a, c, g, or t
  misc_feature (792)..(794): n is a, c, g, or t
  misc_feature (796)..(797): n is a, c, g, or t
  misc_feature (802)..(803): n is a, c, g, or t
  misc_feature (806)..(810): n is a, c, g, or t
  Peptide Sequence Number=SeqID_11716
  Probeset Number=SeqID_20080
nggcacccgccaatggcgccaccagcacccgcgggatcgccgaggccgccaccgccaggcctacggcgctgggtagaaaggagctgtcgcggaacagatcggtcaccagccagacgatgatcgtgctctccagcacgaactcgccgaaggacgagagcgcctggcccagccataaaagtgaaaaattgcggctgatgaaaaaaccggcaaaccggctttgcccttgattcgtcctgaacaccatcccttccctgtgcgaaacgctgtgaaattttccggccgctgcgaattgttgtgaagccggcgataaatggccaattgcccatgctaacgtcggcttcgatgtcatccaatccattgagggagcagcgccgatgtctactaccgtaacacccgccggtggcggaccgaccactcaaaaagcctcgacgtcggtattcgacgacaagttgaatatttccaagtcgagcaaggtgatcgccgattacatgcgccagtcgggcaaatcggcgattaccaagcaagagctttcgcaactggccagcaatgcctcgggcaaggtgcccgccgatgtgagcgctgctgcccagtacatggaacgccatcccgacgtgttcaccgccattgaaacccatgacgtggcgggtgccgataacctgtccggggtgtngaacttcgactgggcggncancggtggcctgaacgnacnncgaccgatgcnntcgncaanntgnagnacacctttgactttgcantnnncaagtcgnnnnnnannnnngnnntcnnnaccgnnnannaggcnnagnnnnn

SEQ ID NO: 5678 - DNA, 810 bp, Zea mays
  misc_feature (1)..(5): n is a, c, g, or t
  misc_feature (8)..(9): n is a, c, g, or t
  misc_feature (14)..(15): n is a, c, g, or t
  misc_feature (17)..(19): n is a, c, g, or t
  misc_feature (24)..(26): n is a, c, g, or t
  misc_feature (29)..(31): n is a, c, g, or t
  misc_feature (33)..(37): n is a, c, g, or t
  misc_feature (39)..(44): n is a, c, g, or t
  misc_feature (52)..(54): n is a, c, g, or t
  misc_feature (56)..(56): n is a, c, g, or t
  misc_feature (74)..(74): n is a, c, g, or t
  misc_feature (77)..(77): n is a, c, g, or t
  misc_feature (80)..(81): n is a, c, g, or t
  misc_feature (85)..(85): n is a, c, g, or t
  misc_feature (89)..(90): n is a, c, g, or t
  misc_feature (101)..(102): n is a, c, g, or t
  misc_feature (105)..(105): n is a, c, g, or t
  misc_feature (120)..(120): n is a, c, g, or t
  misc_feature (123)..(123): n is a, c, g, or t
  misc_feature (141)..(141): n is a, c, g, or t
  misc_feature (810)..(810): n is a, c, g, or t
  Peptide Sequence Number=SeqID_11717
  Probeset Number=SeqID_20081
nnnnnctnngcctnntnnncggtnnngannncnnnnntnnnnnncgacttgnnnantgcaaagtcaaaggtgtnctncannttgncganngcatcggtcgnngtncgttcaggccaccgntgnccgcccagtcgaagttcnacaccccggacaggttatcggcacccgccacgtcatgggtttcaatggcggtgaacacgtcgggatggcgttccatgtactgggcagcagcgctcacatcggcgggcaccttgcccgaggcattgctggccagttgcgaaagctcttgcttggtaatcgccgatttgcccgactggcgcatgtaatcggcgatcaccttgctcgacttggaaatattcaacttgtcgtcgaataccgacgtcgaggctttttgagtggtcggtccgccaccggcgggtgttacggtagtagacatcggcgctgctccctcaatggattggatgacatcgaagccgacgttagcatgggcaattggccatttatcgccggcttcacaacaattcgcagcggccggaaaatttcacagcgtttcgcacagggaagggatggtgttcaggacgaatcaagggcaaagccggtttgccggttttttcatcagccgcaatttttcacttttatggctgggccaggcgctctcgtccttcggcgagttcgtgctggagagcacgatcatcgtctggctggtgaccgatctgttccgcgacagctcctttctacccagcgccgtaggcctggcggtggcggcctcggcgatcccgcgggtgctggtggcgccattggcgggtgccn

SEQ ID NO: 5679 - DNA, 659 bp, Zea mays
  misc_feature (659)..(659): n is a, c, g, or t
  Peptide Sequence Number=SeqID_11718
  Probeset Number=SeqID_20082
tcagcggcctggcccaggcaccgtgggtgcaagtggtgacgccactgcatttcggcatgccgaagttcgagttggcgccgattctgtcgatgtgcctggtggtggtgattatcttcgtcgagtccaccgggatgttcctcgccctgggcaagatcaccggccaggaagtcacgccgaagatgctgcgtcgcggcctgttgtgtgatgccggcgcgtcgttttttgccggcttcttcaacacttttacccactcctcgttcgcgcaaaacatcggcctggtgcagatgaccggtgtgcgctgccgttcggtgacgatcatggccggggcgtttctgatcgtgctgagcctgctgcccaaggccgcgttcctggtagcgtcgattccacccgcagtgctggggggtgcggcgattgccatgttcggcatggtggcggccaccgggatcaagatcctccaggaagccgacatcgccgaccgccgtaaccagttgctggtggcggtgagtatcggcatgggtttgatcccggtcgtgcgtcccgagttctttgcgcagttgccactgtggatgagcccgatcactcacagcggcatcgccatggccaccctcagcgcgctgtcgctgaacctgttattcaacattctgggcggcgccgaacgn

SEQ ID NO: 5680 - DNA, 1067 bp, Zea mays
  misc_feature (808)..(812): n is a, c, g, or t
  misc_feature (819)..(821): n is a, c, g, or t
  misc_feature (837)..(847): n is a, c, g, or t
  misc_feature (857)..(857): n is a, c, g, or t
  misc_feature (861)..(862): n is a, c, g, or t
  misc_feature (864)..(865): n is a, c, g, or t
  misc_feature (870)..(871): n is a, c, g, or t
  misc_feature (873)..(883): n is a, c, g, or t
  misc_feature (896)..(899): n is a, c, g, or t
  misc_feature (901)..(906): n is a, c, g, or t
  misc_feature (909)..(941): n is a, c, g, or t
  misc_feature (949)..(971): n is a, c, g, or t
  misc_feature (976)..(991): n is a, c, g, or t
  misc_feature (993)..(1051): n is a, c, g, or t
  misc_feature (1054)..(1061): n is a, c, g, or t
  Peptide Sequence Number=SeqID_11719
  Probeset Number=SeqID_20083
gacggtccgataataaacgtgctggggctgataaactccatcttatcctacgtatcgttctgatttttcagaaaaagcccttctggagacacctcatgaaattcatccaccagcgcgaacacctcaatgaaggagacattgtcgtcattgaatgttcgcaaacgtgcaacatccgcctgatgagcgacgcgaactttcgcagcttcaagaacggtggccgccacacttaccacggcggcgcgttcgacaaattcccggcaaaaatcaccgcgccgagcaccggcttctggaacattaccctggacgtggttacccgccgcgccatcagtgtgaccaaaaagccgaccttgtcccacaagatccgcatcgtgcgccgcaccaattcgaaactcagctgacaggaatgcccgtgactaccaccaaatatgtgatcaagtacaaactcaacggtgagcgccgcttcgaattcgcccagctgcaagcgggcagcattgaggaagccaaggaagcactggcaaaaatgcacgatgccagcgatgaaatcaccgatatcaatgtgagcaaggccctgtaattcgagcgcaagcatcggagtgtcgtaacgctggcgacttcctagactggcagcccttatccgctgccacaggaactcgtcgatgccttctacctcacttaaagagcgcctggccaagctggactggcgcgcgatcgagcaagaccttgaccaacagggcaacgcaattattccagcgctgctggatcagcaagaatgtgcggagctctgcggccactatccgcagcacgaacnnnnncgctccnnngtgctgatggccaggnnnnnnnnnnntcggggcgantacnngnntttcnncnnnnnnnnnnnctttccccggggnnnngnnnnnnttnnnnnnnnnnnnnnnnnnnnnnnnnnnnnnnnngccccccnnnnnnnnnnnnnnnnnnnnnnnaacannnnnnnnnnnnnnnncnnnnnnnnnnnnnnnnnnnnnnnnnnnnnnnnnnnnnnnnnnnnnnnnnnnnnnnnnnnccnnnnnnnnccccac

SEQ ID NO: 5681 - DNA, 1091 bp, Zea mays
  misc_feature (811)..(811): n is a, c, g, or t
  misc_feature (813)..(816): n is a, c, g, or t
  misc_feature (824)..(826): n is a, c, g, or t
  misc_feature (831)..(831): n is a, c, g, or t
  misc_feature (833)..(836): n is a, c, g, or t
  misc_feature (838)..(844): n is a, c, g, or t
  misc_feature (846)..(846): n is a, c, g, or t
  misc_feature (848)..(872): n is a, c, g, or t
  misc_feature (876)..(880): n is a, c, g, or t
  misc_feature (890)..(895): n is a, c, g, or t
  misc_feature (897)..(920): n is a, c, g, or t
  misc_feature (922)..(928): n is a, c, g, or t
  misc_feature (930)..(934): n is a, c, g, or t
  misc_feature (936)..(936): n is a, c, g, or t
  misc_feature (938)..(956): n is a, c, g, or t
  misc_feature (959)..(962): n is a, c, g, or t
  misc_feature (965)..(965): n is a, c, g, or t
  misc_feature (969)..(973): n is a, c, g, or t
  misc_feature (983)..(994): n is a, c, g, or t
  misc_feature (996)..(1091): n is a, c, g, or t
  Peptide Sequence Number=SeqID_11720
  Probeset Number=SeqID_20084
gcggtacacgccgaaggcggcaagatcgtcccgcaactgtggcatgtgggcagcgtacgacgcatcggcaccgagccggatgccagcgtgccagcctatggtccgactgaaaaactcaaggacggcaacgtcgtcgtccacggcatgaccgtgcaagacatcaaggacgtgatcgctgcgttcgcccaagccgccaaggatgcacaaagcatcggcatggatggcgtggaaatccacggcgcccacggttacctggtggaccagttcttctgggaaggcaccaaccagcgcaccgacgaatacggcggcagcctggccaaccgttcgcgtttcgccatcgaattgatccaggccatccgcgccgccgtgggcccggacttcccgatcatcttgcgtttctcccagtggaagcagcaggattacaccgcgcgcctggtgcaaaccccggaagcgctgggtgagttcctcaagccgctgtctgacgccggcgtggatattttccactgttccacccgccgtttctgggagccggaattcgaaggctccgagctgaacctggccggctggacccgcaagctcaccggcaagccaaccatcaccgtgggcagcgtcggcctggacggcgaattcctgcagttcatggtcaacaccgacaaggtggcgcaaccggccagcctggaaaacctgctggagcgtctgaacaacgacgagtttgatctggtcgccgtgggccgcgcactgctggtggatccggattgggcgctgaaggtccgcgaaggacgtgaaggcgatatcctgccgttcagtcgtnannnnttgacgannntggtntnnnngnnnnnnngncnnnnnnnnnnnnnnnnnnnnnnnnnaccnnnnntaactgccgnnnnnncnnnnnnnnnnnnnnnnnnnnnnnncnnnnnnntnnnnngngnnnnnnnnnnnnnnnnnnnccnnnnccncccnnnnnaaatttttcnnnnnnnnnnnncnnnnnnnnnnnnnnnnnnnnnnnnnnnnnnnnnnnnnnnnnnnnnnnnnnnnnnnnnnnnnnnnnnnnnnnnnnnnnnnnnnnnnnnnnnnnnnnn

SEQ ID NO: 5682 - DNA, 345 bp, Zea mays
  Peptide Sequence Number=SeqID_11721
  Probeset Number=SeqID_20085
agtttgctttgcacgaaactgtattggcattggcaatcatcctgcagcgctacaaccttcaatcggatccgaagtacacgttggatattcgagagactttgtcactcaagcctttcgggttcgagctttctgtgcagcggcgttgacccccttggactccgtattggcctagccgacagatcaccgctcacttctgtcctgcagatgcgtgatccacacaggttgcgtcgcattttcgcgcgccgaggcgtcgagcttgcggcggcgagcgatatcggtcgcacggcgagcgacgaaacgagcagactgccgaccgatcgagtcctcggaagcagccgacgcgta

SEQ ID NO: 5683 - DNA, 345 bp, Zea mays
  Peptide Sequence Number=SeqID_11722
  Probeset Number=SeqID_20086
tacgcgtcggctgcttccgaggactcgatcggtcggcagtctgctcgtttcgtcgctcgccgtgcgaccgatatcgctcgccgccgcaagctcgacgcctcggcgcgcgaaaatgcgacgcaacctgtgtggatcacgcatctgcaggacagaagtgagcggtgatctgtcggctaggccaatacggagtccaagggggtcaacgccgctgcacagaaagctcgaacccgaaaggcttgagtgacaaagtctctcgaatatccaacgtgtacttcggatccgattgaaggttgtagcgctgcaggatgattgccaatgccaatacagtttcgtgcaaagcaaact

SEQ ID NO: 5684 - DNA, 484 bp, Zea mays
  misc_feature (1)..(4): n is a, c, g, or t
  misc_feature (398)..(400): n is a, c, g, or t
  misc_feature (410)..(412): n is a, c, g, or t
  misc_feature (419)..(423): n is a, c, g, or t
  misc_feature (426)..(432): n is a, c, g, or t
  misc_feature (434)..(434): n is a, c, g, or t
  misc_feature (436)..(440): n is a, c, g, or t
  misc_feature (442)..(447): n is a, c, g, or t
  misc_feature (452)..(453): n is a, c, g, or t
  misc_feature (457)..(465): n is a, c, g, or t
  misc_feature (468)..(471): n is a, c, g, or t
  misc_feature (476)..(478): n is a, c, g, or t
  misc_feature (480)..(484): n is a, c, g, or t
  Peptide Sequence Number=SeqID_11723
  Probeset Number=SeqID_20087
nnnnggccgaatggcggcggcagcggcagcgcggatgacggcactaggcagacgcggtccggccgcagctcggcgtcggccacatcggccaccacccgcagccgttcggccgcgcccagcggcgccaacgcgcgtgccatgacggcgggatcgcccaccgccacgcagcgctcggcgtaacccggcaacagcagcgtcttggcgacgatctccggcccgatgccggcggggtcgcccagggtgatggccaggggcaaggcgggcgcgggcaggtcggcgcccgcgcgggaaggattcatcggcacagcagtctccaggcggcgtcgcgcaaggcctcggggccgccgaagccgcccgccttcatggcgatcgccagttgccgacccgcgcacgcggcnnncccggcgggnnnggcgggnnnnngtnnnnnnncnannnnnannnnnncgatnngccnnnnnnnnngcnnnnccgcnnngnnnnn

SEQ ID NO: 5685 - DNA, 484 bp, Zea mays
  misc_feature (1)..(5): n is a, c, g, or t
  misc_feature (7)..(9): n is a, c, g, or t
  misc_feature (14)..(17): n is a, c, g, or t
  misc_feature (20)..(28): n is a, c, g, or t
  misc_feature (32)..(33): n is a, c, g, or t
  misc_feature (38)..(43): n is a, c, g, or t
  misc_feature (45)..(49): n is a, c, g, or t
  misc_feature (51)..(51): n is a, c, g, or t
  misc_feature (53)..(59): n is a, c, g, or t
  misc_feature (62)..(66): n is a, c, g, or t
  misc_feature (73)..(75): n is a, c, g, or t
  misc_feature (85)..(87): n is a, c, g, or t
  misc_feature (481)..(484): n is a, c, g, or t
  Peptide Sequence Number=SeqID_11724
  Probeset Number=SeqID_20088
nnnnncnnngcggnnnngcnnnnnnnnnggcnnatcgnnnnnntnnnnntngnnnnnnnacnnnnncccgccnnncccgccgggnnngccgcgtgcgcgggtcggcaactggcgatcgccatgaaggcgggcggcttcggcggccccgaggccttgcgcgacgccgcctggagactgctgtgccgatgaatccttcccgcgcgggcgccgacctgcccgcgcccgccttgcccctggccatcaccctgggcgaccccgccggcatcgggccggagatcgtcgccaagacgctgctgttgccgggttacgccgagcgctgcgtggcggtgggcgatcccgccgtcatggcacgcgcgttggcgccgctgggcgcggccgaacggctgcgggtggtggccgatgtggccgacgccgagctgcggccggaccgcgtctgcctagtgccgtcatccgcgctgccgctgccgccgccattcggccnnnn

SEQ ID NO: 5686 - DNA, 924 bp, Zea mays
  misc_feature (1)..(4): n is a, c, g, or t
  misc_feature (686)..(687): n is a, c, g, or t
  misc_feature (690)..(691): n is a, c, g, or t
  misc_feature (716)..(718): n is a, c, g, or t
  misc_feature (720)..(720): n is a, c, g, or t
  misc_feature (722)..(726): n is a, c, g, or t
  misc_feature (740)..(746): n is a, c, g, or t
  misc_feature (749)..(750): n is a, c, g, or t
  misc_feature (754)..(924): n is a, c, g, or t
  Peptide Sequence Number=SeqID_11725
  Probeset Number=SeqID_20089
nnnntgtggccggcgcgcggcgggctgccgaccacgctcgaggaagtggccgagcgccagaaggacatccagtactccagccggacccgcatggtcaccgaccagctgcggcgcgtgctcaagctgcgccatggcctgcagcagctgctggaacgcctgcccgacaaggagcgcgccgcgcctgaactggccgagatccgccgcctggccaagaccccggccaccaacatcatcaacctgatctacgagtccaagcaccgcgagcgcttttccaaggactacgagttcggcaccgaggccatgcgcgagcactgggagtcgggcctggccgacatccgccagacgctggccaagccgggcatcctggcgcgcccgacgcaggacagctgcttcgtggcccacgacatccatcgcaatggcaagcacacggcctgagccgccacgggccaggctgggatccgtctgattccaagggaaacccgccgcacaatggcgtcagcaacggtagtctttcggcaagacttgaaaccttgttccgggtccgggccgccgtcttccacgccgcgcccgcgcccgctggagacgccgacatgaccaccgcttttcccgaaacctccttccgtggcccgcagtccgcgccgtcggcccccgccggcgccgcgcccgccgccacggccgaaaccggnnganngctcctttccggtgcggctcgatgnnngntnnnnnctgctgtaccacgnnnnnnnacnngctnnnnnnnnnnnnnnnnnnnnnnnnnnnnnnnnnnnnnnnnnnnnnnnnnnnnnnnnnnnnnnnnnnnnnnnnnnnnnnnnnnnnnnnnnnnnnnnnnnnnnnnnnnnnnnnnnnnnnnnnnnnnnnnnnnnnnnnnnnnnnnnnnnnnnnnnnnnnnnnnnnnnnnnnnnn

SEQ ID NO: 5687 - DNA, 1116 bp, Zea mays
  misc_feature (1)..(225): n is a, c, g, or t
  misc_feature (233)..(236): n is a, c, g, or t
  misc_feature (238)..(243): n is a, c, g, or t
  misc_feature (248)..(248): n is a, c, g, or t
  misc_feature (250)..(255): n is a, c, g, or t
  misc_feature (260)..(264): n is a, c, g, or t
  misc_feature (267)..(268): n is a, c, g, or t
  misc_feature (272)..(274): n is a, c, g, or t
  misc_feature (286)..(286): n is a, c, g, or t
  misc_feature (289)..(289): n is a, c, g, or t
  misc_feature (291)..(294): n is a, c, g, or t
  misc_feature (305)..(307): n is a, c, g, or t
  misc_feature (309)..(309): n is a, c, g, or t
  misc_feature (311)..(311): n is a, c, g, or t
  misc_feature (346)..(347): n is a, c, g, or t
  misc_feature (352)..(352): n is a, c, g, or t
  misc_feature (1114)..(1116): n is a, c, g, or t
  Peptide Sequence Number=SeqID_11726
  Probeset Number=SeqID_20090
nnnnnnnnnnnnnnnnnnnnnnnnnnnnnnnnnnnnnnnnnnnnnnnnnnnnnnnnnnnnnnnnnnnnnnnnnnnnnnnnnnnnnnnnnnnnnnnnnnnnnnnnnnnnnnnnnnnnnnnnnnnnnnnnnnnnnnnnnnnnnnnnnnnnnnnnnnnnnnnnnnnnnnnnnnnnnnnnnnnnnnnnnnnnnnnnnnnnnnnnnnnnnnnnnnnnnnnnnnnnnnnnnggcggcgnnnnannnnnntgggngnnnnnngagannnnntgnngatnnnaagacggtcagntgntnnnngtggtggtggnnngngncgaacagatcctgtcgaaacacgtgatcctcgccnncggcnacagcgcccgtgacaccttccgcatgctgcatggccgtggcgtgtacatggaagccaagccgttctcggtgggtttccggatcgaacacccgcagtcactgatcgacgccgcgcgcctgggcaagtacgccgggcacccgaaactcggcgctgctgattacaaactggtgcaccatgccaagaacggccgttcggtgtacagcttctgcatgtgcccgggcggcaccgtggtcgcggcgacatcagagccgaatcgcgtagtgaccaacggcatgagccaatactcgcgcaacgaacgcaacgccaactccgggatcgtggtgggcatcaccccggaagtggattacccgggcggcccgctggccgggatcgagttgcaggagcgcctggaatcccacgcgttcatcctcggcggcagcaactacgaagcaccggcgcaactggtgggtgatttcattgcgggcaagccgtccaccgccatcggcaccgtggaaccgtcctataagcccggcgtggcctggggtgacctggccctggcgctgccggactttgccatcgaagccatccgcgaagcactgccggcgttcgagaagcagatcaagggttactcgctgcacgacgcggtgctgaccgggatcgagacccgcacttcatcgccgctgcggattacccgtaacgaatcgatgcagagcctgaacgtgaaaggcctgttcccggcgggcgaaggtgccggttatgccggtggtattttgtcggcgggtnnn

SEQ ID NO: 5688 - DNA, 1133 bp, Zea mays
  misc_feature (1)..(30): n is a, c, g, or t
  misc_feature (33)..(37): n is a, c, g, or t
  misc_feature (809)..(812): n is a, c, g, or t
  misc_feature (833)..(833): n is a, c, g, or t
  misc_feature (835)..(835): n is a, c, g, or t
  misc_feature (839)..(839): n is a, c, g, or t
  misc_feature (845)..(845): n is a, c, g, or t
  misc_feature (847)..(850): n is a, c, g, or t
  misc_feature (852)..(855): n is a, c, g, or t
  misc_feature (858)..(864): n is a, c, g, or t
  misc_feature (872)..(872): n is a, c, g, or t
  misc_feature (877)..(877): n is a, c, g, or t
  misc_feature (889)..(891): n is a, c, g, or t
  misc_feature (893)..(905): n is a, c, g, or t
  misc_feature (912)..(912): n is a, c, g, or t
  misc_feature (914)..(916): n is a, c, g, or t
  misc_feature (919)..(921): n is a, c, g, or t
  misc_feature (925)..(933): n is a, c, g, or t
  misc_feature (936)..(952): n is a, c, g, or t
  misc_feature (956)..(957): n is a, c, g, or t
  misc_feature (959)..(964): n is a, c, g, or t
  misc_feature (966)..(966): n is a, c, g, or t
  misc_feature (968)..(976): n is a, c, g, or t
  misc_feature (978)..(981): n is a, c, g, or t
  misc_feature (988)..(988): n is a, c, g, or t
  misc_feature (990)..(990): n is a, c, g, or t
  misc_feature (994)..(1004): n is a, c, g, or t
  misc_feature (1006)..(1022): n is a, c, g, or t
  misc_feature (1024)..(1133): n is a, c, g, or t
  Peptide Sequence Number=SeqID_11727
  Probeset Number=SeqID_20091
nnnnnnnnnnnnnnnnnnnnnnnnnnnnnnggnnnnngctgctgagcctgctgctacgtctttacgacgtgcagcaaggccaggtgctggtggacggcaaggacgtacgcgacgtcacccagcattcgctgcaccagcagatcggcctgattccccaggagccgggcttgttccaccgcagcattcgcgaaaacatccattacggccgcctggatgcctcgatggaagaggtcgccgaggcgatccaccgcgccggcgccagtgagtttatcgacagcatggaacacggctacgaatcgttggtgggcgagcgtggggtcaagttgtccggcggccagcgtcagcgcattgcgattgcccgggtgttgctgaagaacgcgccgatcctggtgatggacgaagccacttccagtctggactcgatcaccgagcgctttatccaggacaagctcgacgaaatcatggaggacaagaccgtgctggtggtggcgcatcggctgtccaccgtggcccatctggaccgcatcctggtgttcgacaatggccgggtgatcgaggacggcagccacgaacagttgctgcgccagggcgggcaatatgcgcggttgtggagtcgccagttcagtgatgcgctggatgaagtcgcgctgtgatcaggcggcgtaccgggtacgccgcgcagtgcaggtcagatcgacaggtgcagcactcgctcgtctttggcgccagccagcgggcggcgcttgttgaccttcagctcacccaggttgatcagcaaagtgcgggtcacgttgcggctcagtcccagnnnntcggcggtgtgcacctggttntnatgncacagncnnnnannnngcnnnnnnncaggctgncgttnccacctgttcgnnnannnnnnnnnnnnntgtttcncnnncannnctgnnnnnnnnnggnnnnnnnnnnnnnnnnnggcnngnnnnnntngnnnnnnnnncnnnnttcaaananccannnnnnnnnnngnnnnnnnnnnnnnnnnngnnnnnnnnnnnnnnnnnnnnnnnnnnnnnnnnnnnnnnnnnnnnnnnnnnnnnnnnnnnnnnnnnnnnnnnnnnnnnnnnnnnnnnnnnnnnnnnnnnnnnnnnnnnnnn

SEQ ID NO: 5689 - DNA, 863 bp, Zea mays
  misc_feature (819)..(826): n is a, c, g, or t
  misc_feature (828)..(832): n is a, c, g, or t
  misc_feature (836)..(837): n is a, c, g, or t
  misc_feature (839)..(840): n is a, c, g, or t
  misc_feature (851)..(856): n is a, c, g, or t
  misc_feature (858)..(861): n is a, c, g, or t
  Peptide Sequence Number=SeqID_11728
  Probeset Number=SeqID_20092
ttgcgcccgtcattcaaagggcttaaacctttttagcacgctttatggcgatcggcactgacctgcaacatcttgcgccgccccgcgccgtttggcgctatcattaccgccttgaaccagacaacgagattgatagatgtcagaaccaaaaggcgtgaacggctacctgatcaccaagcgagcagatggctggcacttgatcaacttccacggcgacagcgttgccggggcattcgcgaccgaagctcaagcctgtgccgtggccgaagtgtttgtggatgaagcgggccatgcgtcgagcaagcgccccaaaaccaagtaacacccgcagaaacgccaatcaagcctcgtttatcggggcttttttgtgtttgtctgtaccttgatggcggttcgctataatctcgcctgaaacgccccacgacagtgtcagcgcttccctccaacaccctaatgacgactcctacatgaacaagatcctggcactgattgcggtactggcgcttaccggtggctgcaccaccacttccgacaccgtgctgaaaaacggcgaacaagggctggccatcgattgttccggcgaagccaactcctgggccagctgctatgaaaaggctgatgcgtcctgcgcagggaccggttaccggattgtcggcaccgaaggcacaccggccctgaaagaaagcgacaagaccctgggcaaggatgtcggcaactacaagacccgcagcgtgaccgtggtctgcaaataattacatatgaatttcggcgaatttgatgcccaggccgcgaatggtctcgattaagtcgtccaggcgnnnnnnnnannnnncttnntnntggtcatccannnnnnannnnct

SEQ ID NO: 5690 - DNA, 905 bp, Zea mays
  misc_feature (1)..(11): n is a, c, g, or t
  misc_feature (818)..(818): n is a, c, g, or t
  misc_feature (820)..(821): n is a, c, g, or t
  misc_feature (826)..(827): n is a, c, g, or t
  misc_feature (833)..(837): n is a, c, g, or t
  misc_feature (859)..(864): n is a, c, g, or t
  misc_feature (867)..(871): n is a, c, g, or t
  misc_feature (876)..(882): n is a, c, g, or t
  misc_feature (884)..(886): n is a, c, g, or t
  misc_feature (889)..(889): n is a, c, g, or t
  misc_feature (891)..(892): n is a, c, g, or t
  misc_feature (894)..(894): n is a, c, g, or t
  misc_feature (899)..(900): n is a, c, g, or t
  misc_feature (902)..(905): n is a, c, g, or t
  Peptide Sequence Number=SeqID_11729
  Probeset Number=SeqID_20093
nnnnnnnnnnntggcccaggtggagttcgtgaagccgaagggtaagcagaaggaagaattcatcatctcgactcaagccggcagggcgctgatccaggcgctgcctgccgagatcgcgaaaccggacatgaccgcgttgtgggaaacggcgatgcgcgagatcgaggcgggcagaagcaccatcgatcgatttgaggcgatgcagcgctcgtggattaccaaggtgatcgcggagatccgctccaaacccctgaatatcccctacacggggccggcgaaagcgggggcaggcaaaggtggaagctcgggccctcgtgtcgcaccggagccggtcggcaaggcctgtccgcaatgcggcagccaattgatgaaacgaatgggaggcaatgggccgtttatcggctgcgagggcttccggtcgggttgcaagtacaccgaacaagtagccgcataaggggcagagatgatgatcggcgtgagagatctggtgattgacgagttgcgtgctgtcgcagccgtaccgaatgggctggaccgcaacgtgttggtgcggatccaagacagcatcgctgccgacgtgatttacctgtaccgggagcagctggaacagatgatgagacgccaggaagtcgcgggcctgcccgcagccattgcgaagcaagagcggcaggattttttcgccgagcgactgaatctggaataccgcaatcgggcggccaacggccaaggcttcagtttgccgctctatgtcgagtcggcgaagaacttctaccacctggagatccggcgccatttgcagcaggtgcaggactacctgntnnatggnncgggcnnnnnaacgagctgaacgccggcgccnnnnnnatnnnnnaactnnnnnnncnnnatncnngnctganngnnnn

SEQ ID NO: 5691 - DNA, 905 bp, Zea mays
  misc_feature (1)..(4): n is a, c, g, or t
  misc_feature (6)..(7): n is a, c, g, or t
  misc_feature (12)..(12): n is a, c, g, or t
  misc_feature (14)..(15): n is a, c, g, or t
  misc_feature (17)..(17): n is a, c, g, or t
  misc_feature (20)..(22): n is a, c, g, or t
  misc_feature (24)..(30): n is a, c, g, or t
  misc_feature (35)..(39): n is a, c, g, or t
  misc_feature (42)..(47): n is a, c, g, or t
  misc_feature (69)..(73): n is a, c, g, or t
  misc_feature (79)..(80): n is a, c, g, or t
  misc_feature (85)..(86): n is a, c, g, or t
  misc_feature (88)..(88): n is a, c, g, or t
  misc_feature (895)..(905): n is a, c, g, or t
  Peptide Sequence Number=SeqID_11730
  Probeset Number=SeqID_20094
nnnncnntcagncnngnatnnngnnnnnnnagttnnnnnatnnnnnnggcgccggcgttcagctcgttnnnnngcccgnnccatnnancaggtagtcctgcacctgctgcaaatggcgccggatctccaggtggtagaagttcttcgccgactcgacatagagcggcaaactgaagccttggccgttggccgcccgattgcggtattccagattcagtcgctcggcgaaaaaatcctgccgctcttgcttcgcaatggctgcgggcaggcccgcgacttcctggcgtctcatcatctgttccagctgctcccggtacaggtaaatcacgtcggcagcgatgctgtcttggatccgcaccaacacgttgcggtccagcccattcggtacggctgcgacagcacgcaactcgtcaatcaccagatctctcacgccgatcatcatctctgccccttatgcggctacttgttcggtgtacttgcaacccgaccggaagccctcgcagccgataaacggcccattgcctcccattcgtttcatcaattggctgccgcattgcggacaggccttgccgaccggctccggtgcgacacgagggcccgagcttccacctttgcctgcccccgctttcgccggccccgtgtaggggatattcaggggtttggagcggatctccgcgatcaccttggtaatccacgagcgctgcatcgcctcaaatcgatcgatggtgcttctgcccgcctcgatctcgcgcatcgccgtttcccacaacgcggtcatgtccggtttcgcgatctcggcaggcagcgcctggatcagcgccctgccggcttgagtcgagatgatgaattcttccttctgcttacccttcggcttcacgaactccacctgggccannnnnnnnnnn

SEQ ID NO: 5692 - DNA, 435 bp, Zea mays
  misc_feature (1)..(3): n is a, c, g, or t
  Peptide Sequence Number=SeqID_11731
  Probeset Number=SeqID_20095
nnntgcgggacggcggttttctcgcctggcccggcgttatcgcgctgatcctcggcgccctgatctacggctggcgccgcccgctgctgcgcaagcccctgagcgcaggcgtgatcaccggcctcgcgttctgggccctgaccagcctgtccctgaccctctacgaaaaaggcacgcacctgccggacatcaccctgcgcaacgccaatggcgaaaccgtgcaactagccgactacaagggcggcccgctggtgatcaatctgtgggccacctggtgcccgccgtgccggcgcgaaatgccggtactggaaagtgcccagcgccaacgcccggacgtgaccttcctgttcgtcaaccaggccgaaagcatgcaaagcgtcgccacctacctggcgacccagggcctgaacctggacaacgtgctgttcgacgcca

SEQ ID NO: 5693 - DNA, 187 bp, Zea mays
  misc_feature (1)..(3): n is a, c, g, or t
  Peptide Sequence Number=SeqID_11732
  Probeset Number=SeqID_20096
nnnaccgcgctggaggccggcctgaacctgggccgcgccgcgctcgactcgctgctggccgacctggacgcccgcgcccgctcgatggcggccgaactgaaccgcaattccgataccggcgtgacgctggccctgacccggctgcgcgaagccaacggcgtgcaggaagccatggtcttcaccggca

SEQ ID NO: 5694 - DNA, 187 bp, Zea mays
  misc_feature (185)..(187): n is a, c, g, or t
  Peptide Sequence Number=SeqID_11733
  Probeset Number=SeqID_20097
tgccggtgaagaccatggcttcctgcacgccgttggcttcgcgcagccgggtcagggccagcgtcacgccggtatcggaattgcggttcagttcggccgccatcgagcgggcgcgggcgtccaggtcggccagcagcgagtcgagcgcggcgcggcccaggttcaggccggcctccagcgcggtnnn

SEQ ID NO: 5695 - DNA, 324 bp, Zea mays
  misc_feature (1)..(6): n is a, c, g, or t
  Peptide Sequence Number=SeqID_11734
  Probeset Number=SeqID_20098
nnnnnnatcatcggcacctaccacagcgcagccgacgaagcccaagccgtggtcgcccaagtcgaagcgctgggcggcaaagcggcgatgctgcaactggacgtcagccaaagcgccaccttcgacgcattcaccgcccaggtcggctcggtattgaaggacgtgttcggccaggcgcacttcaacttcctgatcaacaacgccgggattggcgcccacgccagcttcgccgaaaccaccgaagcgcagtttgaccaactggtggcaatccacttcaagggtccgtttttcctgacccagaaactgttgccgctgatcagcgat

SEQ ID NO: 5696 - DNA, 324 bp, Zea mays
  misc_feature (319)..(324): n is a, c, g, or t
  Peptide Sequence Number=SeqID_11735
  Probeset Number=SeqID_20099
atcgctgatcagcggcaacagtttctgggtcaggaaaaacggacccttgaagtggattgccaccagttggtcaaactgcgcttcggtggtttcggcgaagctggcgtgggcgccaatcccggcgttgttgatcaggaagttgaagtgcgcctggccgaacacgtccttcaataccgagccgacctgggcggtgaatgcgtcgaaggtggcgctttggctgacgtccagttgcagcatcgccgctttgccgcccagcgcttcgacttgggcgaccacggcttgggcttcgtcggctgcgctgtggtaggtgccgatgatnnnnnn

SEQ ID NO: 5697 - DNA, 804 bp, Zea mays
  misc_feature (1)..(1): n is a, c, g, or t
  misc_feature (9)..(9): n is a, c, g, or t
  misc_feature (11)..(11): n is a, c, g, or t
  misc_feature (800)..(804): n is a, c, g, or t
  Peptide Sequence Number=SeqID_11736
  Probeset Number=SeqID_20100
ntgcatccncnaagctagccgcccatgccgatttcagctatttacccacagcccgttgctctcgctgagcgtccgtctccagattcaaccctggcgatgcgatctcgcgagggctccgggctgcgtgcgttatttaaggaagctttatgacccaagccctgcaaggctctttgatggtggacgtcgccggtacctggctgacggctgaagaccgccacttgttgcgccagcccgaggtgggcggcctgatcatttttgcgcgcaatattgagcatccgcgccaggtgcgtgagttgagcgccgcgattcgcgccgtgcgcccggacctgctgctcgcggtcgatcaggaaggcggccgggtgcagcgcttgcgccaagggttcgtccgcctgccggcgatgcgcgccttggccgacaacccgaatgccgagcaactggccgagcagtgcggttggatcatggcgacagaagtgctggcggtcggcctggacctgagcttcgcgccggtgctggacctcgattaccagcgcagcgcagtcgtgggcacgcgcgcattcgaaggcgaccccgagcgcgccgcggtgcttgccggtgcctttattcgcgggatgaacagcgctggcatggccgctaccggcaaacacttccccggccacggctgggccgaagccgattcccacgtcgcgattcccaatgatgagcgcagcctggaacagattcgcgccaatgacctggtgccttttgcacgcctgagcaagcagttggcggccgtcatgccggcccacgtgatttatccacannnnn

SEQ ID NO: 5698 - DNA, 1029 bp, Zea mays
  misc_feature (1)..(4): n is a, c, g, or t
  misc_feature (445)..(445): n is a, c, g, or t
  misc_feature (454)..(454): n is a, c, g, or t
  misc_feature (456)..(456): n is a, c, g, or t
  misc_feature (458)..(458): n is a, c, g, or t
  misc_feature (481)..(482): n is a, c, g, or t
  misc_feature (503)..(507): n is a, c, g, or t
  misc_feature (519)..(519): n is a, c, g, or t
  misc_feature (526)..(527): n is a, c, g, or t
  misc_feature (530)..(530): n is a, c, g, or t
  misc_feature (532)..(534): n is a, c, g, or t
  misc_feature (546)..(552): n is a, c, g, or t
  misc_feature (554)..(555): n is a, c, g, or t
  misc_feature (558)..(566): n is a, c, g, or t
  misc_feature (573)..(599): n is a, c, g, or t
  misc_feature (992)..(992): n is a, c, g, or t
  Peptide Sequence Number=SeqID_11737
  Probeset Number=SeqID_20101
nnnnttttcagtattacataacataaccattagtacacataaatattaatggttatgttgatgaatgtcagtttgactgaaggtgaaggggcgtcctgccaacagtagggaaggcgaacacctggattgaaagactgctctctcagttcagcattgggtcgtcaaggagaacaaaatgatggtaccttcagcgtgaggatcgatgactgtcaatggagctgtgcaaacacaatcgtggcaaagctggctgtggcactggcgcctatgccatttatgagggttttgcttgaccgttttgtggctgcaactagtggtgtgttcccagacaaccaagagctacaagacagaggtaagctctcgggttccgtcctggggcaatggggagctgttgatgatcctgagtccatgctgcaccacatccattgggcagtaatgaggtgattcnaatcgttangngncaagcataatgttgtgtgatagnnctatttgcggtgtttgacatnnnnnctggggaagttngaaaatnnacngnnntcgcacagctcnnnnnnncnngtnnnnnnnnnccatgcnnnnnnnnnnnnnnnnnnnnnnnnnnnatgtctgcattatactgatgcctggaatgagggtgtgtccaagaaggagctggactccacctggcgaggagtcgatctacggatacataatccatgtgattggtagcccggttggctatgtgcaagctcagcgggtgcattgactatagccgtgcccgtgattggtctcctgcgtaggatgcgatgagcctgctcacgcgcatgcagcatagttaattttttcagctcccgcttgcatgcgtggggatgctgggaggaggcgtctctgctgatccaggccggcgcgagcctagcgctcgtggtaagaggaaccaatcacgcggaatgggaatggcagatacatgtagtctgtagaatccatcaggatttccccttgataggtctcaggtttcnctctaatattgtgcattgtccctcaagatgttaatgc

SEQ ID NO: 5699 - DNA, 829 bp, Zea mays
  misc_feature (1)..(4): n is a, c, g, or t
  misc_feature (723)..(723): n is a, c, g, or t
  misc_feature (760)..(764): n is a, c, g, or t
  misc_feature (768)..(784): n is a, c, g, or t
  misc_feature (786)..(788): n is a, c, g, or t
  misc_feature (790)..(793): n is a, c, g, or t
  misc_feature (795)..(810): n is a, c, g, or t
  misc_feature (814)..(823): n is a, c, g, or t
  misc_feature (825)..(829): n is a, c, g, or t
  Probeset Number=SeqID_20102
nnnngtggtgagcctgcacagcgtgatcgagccgaacaagctcaagcagttcaatcagcagaacagcgcgaccttccagggcatcccggcgccgggggtcagcctgggtcaggcggtggcgtttttgcaggcgcacagccaacagctgccggccagcttcagccatgactggcaggccgattcgcgccagttcattcacgaaggcaatgcgttgatgctgacgttcctgtttgcgctgatcgtgatctatatggtgctggccgcgcagtatgaaagcctgaccgatccgctgatcatcctgatcacggtgccgctgtcgatctgcggcgcgttgatcccgctggccctgggtttggccacgatcaacatctacacgcagattggcttggtgacgttgatcggactgatcagcaaacacgggatcctgatggtcgagttcgccaacgagttacagctgctataccgctgcacaccggctcaggcgatcattcgcgcggcgcgaattcgtctacgcccgatcctgatgaccaccgccgcgatggtggttggcctggtgccgatgctgttctcgtccggcgccggcgccagcagtcgatttggcctggggcttgtgatcgttatcgggatgctggtgggcaccttgtttacgctgttcgtgttgccgtcggtctacaccctgctgtcacgagcgcataagccggtaattgattgggaggtgatagnaaaaaacagccgcaggcttcaagcctcaagcttaaannnnnacgnnnnnnnnnnnnnnnnnannncnnnntnnnnnnnnnnnnnnnntagnnnnnnnnnnannnnn

SEQ ID NO: 5700 - DNA, 771 bp, Zea mays
  misc_feature (732)..(732): n is a, c, g, or t
  misc_feature (734)..(734): n is a, c, g, or t
  misc_feature (758)..(759): n is a, c, g, or t
  misc_feature (761)..(762): n is a, c, g, or t
  misc_feature (771)..(771): n is a, c, g, or t
  Peptide Sequence Number=SeqID_11738
  Probeset Number=SeqID_20103
cacccacctgtccgaccagatcacgcgcttctggcgcggctggctggagaccaaccgcggcgccatgccgcgcgaccagctgatccgcagcgccgagcgcctgatctcgttctacgtcagccgcgcgcccgacgccggctggccgcagatcgacaccaacctggcgctggtcgagaagacccgcgccagcctgcgcgccgtgatgcagggcatgccggcgcgcgaacgcgcctacgccacgctcaaggcgcgcgccgccacgcgcttccagaccatgacggtggcgcgcatcgtcggcgagaacgacgccggcgtggtggccggcagctacgccatccccggcaccttcacccgcgaggcctgggagcagtacatccagccggccatcaacgaagccgccaagaaggaagtgcagaccagcgactgggtgctgggcgtgaacgcgcgcgatgacctgacgctggacggcagccccgagcagatccagaagagcctggcgaccatgtacaagatggaatacgcccaggaatggcagaagttcctgcgcggcgtgaccatcaagccgttcaccagtttcgagcagtcggtgggcgcgatgaaccgcctgggcgatccgcagacctcgcccatcgccaagctcatcaacaccgcctatgaacagacctcgtgggacaacccctcgctggtcaacgccggcctgcagcaggcgcagagcggcgtggttggctggtncnagcgcgtgatcctgcggcagacgnngnncggcgcccn

SEQ ID NO: 5701 - DNA, 801 bp, Zea mays
  misc_feature (1)..(5): n is a, c, g, or t
  misc_feature (651)..(656): n is a, c, g, or t
  misc_feature (690)..(691): n is a, c, g, or t
  misc_feature (709)..(713): n is a, c, g, or t
  misc_feature (718)..(718): n is a, c, g, or t
  misc_feature (732)..(734): n is a, c, g, or t
  misc_feature (737)..(740): n is a, c, g, or t
  misc_feature (742)..(746): n is a, c, g, or t
  misc_feature (764)..(772): n is a, c, g, or t
  misc_feature (783)..(796): n is a, c, g, or t
  misc_feature (798)..(801): n is a, c, g, or t
  Peptide Sequence Number=SeqID_11739
  Probeset Number=SeqID_20104
nnnnncctgtacgacgccgaccagcggctggtgcggctgcgcgccggcgagatcgcggtccatgcggtggccgagaccggcgcccatgcgcggcccttcgtggtgcgcacgaagcagggcgatatccaggcgcaggcggcgcgcttctgcgtgcgcgaagacggctctgcctgccgcgtcagcgtgcaggagggcggcgtgacgctgcgccgcggcgacgccagcctggcgctggccgccggcgagcaggcctggctgcgcgatgatgacgcgccgcgcatcgagccggccgacccgcatgccgccgactggacgcgcggcgtgctgcacgccagcgcctggcgcctggacgccttcgcggcggagctgggccgctaccggcccggcgtgctgcgctgtgatccggcagtcgccgggctgcgcatctccggcgccttccaattgcaggataccgacgcggtgctggcggccttgccgtccacgctgccggtgcaggtgcgctaccgcagcgcttactgggtgacgatcatgccgcgcgcgggacaggcctgatttgtcgttgttacaaaaaagccgggggcgagctgtccggttggcgttggccgagggtcatggtcagtagaggcaaacaaatgccgatacccgttggannnnnnggacgaccatggctcactcccccgccagccgcgnncgcggcacccccttgaannnnnaggcnccatgccgattgannngcnnnncnnnnncgctgcgcattgccaccnnnnnnnnngccccgggccnnnnnnnnnnnnnncnnnn

SEQ ID NO: 5702 - DNA, 867 bp, Zea mays
  misc_feature (1)..(11): n is a, c, g, or t
  misc_feature (616)..(616): n is a, c, g, or t
  misc_feature (639)..(639): n is a, c, g, or t
  misc_feature (641)..(641): n is a, c, g, or t
  misc_feature (666)..(667): n is a, c, g, or t
  misc_feature (669)..(669): n is a, c, g, or t
  misc_feature (685)..(688): n is a, c, g, or t
  misc_feature (693)..(695): n is a, c, g, or t
  misc_feature (697)..(698): n is a, c, g, or t
  misc_feature (708)..(716): n is a, c, g, or t
  misc_feature (726)..(731): n is a, c, g, or t
  misc_feature (734)..(735): n is a, c, g, or t
  misc_feature (740)..(744): n is a, c, g, or t
  misc_feature (747)..(784): n is a, c, g, or t
  misc_feature (788)..(794): n is a, c, g, or t
  misc_feature (796)..(796): n is a, c, g, or t
  misc_feature (798)..(803): n is a, c, g, or t
  misc_feature (806)..(810): n is a, c, g, or t
  misc_feature (812)..(820): n is a, c, g, or t
  misc_feature (825)..(827): n is a, c, g, or t
  misc_feature (830)..(834): n is a, c, g, or t
  misc_feature (836)..(836): n is a, c, g, or t
  misc_feature (842)..(842): n is a, c, g, or t
  misc_feature (844)..(862): n is a, c, g, or t
  misc_feature (866)..(866): n is a, c, g, or t
  Peptide Sequence Number=SeqID_11740
  Probeset Number=SeqID_20105
nnnnnnnnnnngttttgtaccgaacgacatgcaggtcggtcagaccggcaaaatcgttgcgccacagctgtacatcgccgtcggtatctccggcgcgatccagcatttggccggtatgaaagactccaaggtgatcgttgcgatcaacaaggacgaagaagcgccgatcttccaggtggctgattacggcctggtggcagacttgttcgaagccgtacccgagttggagaagctggtctaatccagccgcttcacttataaagagcccggtcttttgaccgggcttttttttgcccggtaatttttgaatgggagaaccctgccatggaattgcgtccctggactgtactgctggccctgtcgctgctgccgacggtgtcgctggcggctggcaaatgtgatcgcctggtgatcaccggcagcccggacgcaccgccttatctgtggcgtgatccccgggaccccacgcacttgatcggcgccaccgccgacatgttgcagcaagtggccaaggacctcggagtgaaaatcgacctgctgtacggcggcaagcgctccgtggctctggacgaagtgcgcagcggacgcatggacatccttgccgatgcgccgttgnccctcgacgctctggatgccctngnttacatccaccccggcattggtgcnnancgattacctggtctgnnnncgcannnanncggccctggnnnnnnnnnagcccagcgnnnnnnatnnccacnnnnncgnnnnnnnnnnnnnnnnnnnnnnnnnnnnnnnnnnnnnnaacnnnnnnncngnnnnnnacnnnnncnnnnnnnnntgccnnnctnnnnncnggggtntnnnnnnnnnnnnnnnnnnngggna

SEQ ID NO: 5703 - DNA, 842 bp, Zea mays
  misc_feature (1)..(7): n is a, c, g, or t
  misc_feature (709)..(842): n is a, c, g, or t
  Peptide Sequence Number=SeqID_11741
  Probeset Number=SeqID_20106
nnnnnnngccatgaccgacgcgaacgccgaggcccatcactacagcctgaaccaggtattcccgaagctgggggaaaccggcacggcgcaagacatcatcggtttgcttgaaacaaggggtgcgtgacgatgcaatggcatgagctggtgtcttacttcttcggcggcgtattgctcgccaacgcgctgccccattgcgtcagtggtttgatggggcagtctttccagacgccgtttgccaagccgcgcggcgaagggcggtcttcctcgacgctgaatgtgctctggggttttctcaacctggtgatcggctacgtgctggtctgccgggtcggggatttcgacctcaaaagcaccgctgatgtgctcgccctcgggcttggggccttggcgctgagtgttttcctggcgcagcatttcgggcgcttcaatggtggtaatccctcaaggccggtgtgagttcgatgggcattttccgctcgctgcgcagcgtcaactaccgcatctgggccgccggcgccctggtgtcgaatatcggcacctggatgcaacgcacggcccaagactggctggtgctgacccagctcaccccgcataacgcctcggccgtcggcatcgtcatggcgttgcagttcggtccgcaattgctgttgctgccttggaccggcttcgccgccgaccactacgacaagcgcaagctgctgatcgnnnnnnnnnnnnnnnnnnnnnnnnnnnnnnnnnnnnnnnnnnnnnnnnnnnnnnnnnnnnnnnnnnnnnnnnnnnnnnnnnnnnnnnnnnnnnnnnnnnnnnnnnnnnnnnnnnnnnnnnnnnnnnnnnnnnnn

SEQ ID NO: 5704 - DNA, 804 bp, Zea mays
  misc_feature (1)..(203): n is a, c, g, or t
  misc_feature (800)..(804): n is a, c, g, or t
  Peptide Sequence Number=SeqID_11742
  Probeset Number=SeqID_20107
nnnnnnnnnnnnnnnnnnnnnnnnnnnnnnnnnnnnnnnnnnnnnnnnnnnnnnnnnnnnnnnnnnnnnnnnnnnnnnnnnnnnnnnnnnnnnnnnnnnnnnnnnnnnnnnnnnnnnnnnnnnnnnnnnnnnnnnnnnnnnnnnnnnnnnnnnnnnnnnnnnnnnnnnnnnnnnnnnnnnnnnnnnnnnnnnnnnnnnnnnnncccgagttcccggcggaccaccgcttccccatggataaattccgcctgttgcgtgaccatctggtggagagcggcctgacccgggacagccaactgctgcgaccggaactctgccctgccgagattctggccctggcccatgaacctcggtatatcgaacgctacatgagcggcgagttgtcccgcgaagaccagcggcgcctcggcctgccctggagcgaagccctggcccggcgcaccgtgcgcgcggtgggcggctcgttgctggcggccgagcaggcccttgagcatggtctggcctgccacctggccggcggcacccaccacgcccactacgattacccggcgggtttctgcatcttcaatgacctggcggtgatcagccattacctgctggccagcggccgggtcaaccgggtgctgatcttcgattgcgacgtgcaccagggcgacggcaccgcgcgcatcttgcacgacaccccggacgcgatcaccgtgtccctgcactgcgaaaagaacttccccgcccgcaaggccgaaagcgactgggacatcccgctgccgatgggcatgggcgacgcggactacctcaaggtnnnnn

SEQ ID NO: 5705 - DNA, 854 bp, Zea mays
  misc_feature (780)..(780): n is a, c, g, or t
  misc_feature (783)..(785): n is a, c, g, or t
  misc_feature (797)..(799): n is a, c, g, or t
  misc_feature (809)..(816): n is a, c, g, or t
  misc_feature (818)..(854): n is a, c, g, or t
  Peptide Sequence Number=SeqID_11743
  Probeset Number=SeqID_20108
gagccattgggctttgtgcacaagaaggagttgctcaaggaatacctggccggtaacgagccgaacctggagcacttggcgcgccgagcggtcaacctgctggagagtttttcgattctcaatgccctggagcagatgcgtcaggaatctactcacattgcgttcgtgatcaacgaatttggtgactttatcggggtgttgagcatgaccgacatcctcgagtccatcgccggtgagttgccggatgcgagtgaagtcgaagggccagacatcgttgaggaagagggtggctttcgggttaatggtgccttgaaccttaacctgattcgccagcgcaccggcttcaaggcggtggcgacggaggattaccagaccctggccgggctggtgatgagcctgctggatcgcctccccgccgtcggcgatagcctggaacatgaagggtggcgcctgaccgtggcagcggtggaggagcggcgagttactcaggtgttgctggctcctctctaacgggtgaatttcattcgacgctgcgctggcctttggatagcatcggcgctcattgaaccgttaaggaagggttacccgaatgactttggacgtgcttaagatttctgcattttgtgacggtaaccagggcggtaacccggcaggcgtatggatcggtgacaacctgccggaagccgcagaaatgcagcgtatcgcccacgaagtcgggttttcggaaacggtattcgcctgcccgcaggatgacggctggcgtgtgcggtacttcgcgcnggnnnccgaagtcgcgnnntgcgggcacnnnnnnnncnnnnnnnnnnnnnnnnnnnnnnnnnnnnnnnnnnnnn

SEQ ID NO: 5706 - DNA, 479 bp, Zea mays
  misc_feature (1)..(2): n is a, c, g, or t
  misc_feature (6)..(19): n is a, c, g, or t
  misc_feature (21)..(33): n is a, c, g, or t
  misc_feature (35)..(39): n is a, c, g, or t
  misc_feature (56)..(59): n is a, c, g, or t
  misc_feature (72)..(73): n is a, c, g, or t
  misc_feature (76)..(82): n is a, c, g, or t
  misc_feature (87)..(89): n is a, c, g, or t
  misc_feature (91)..(91): n is a, c, g, or t
  misc_feature (127)..(129): n is a, c, g, or t
  misc_feature (150)..(150): n is a, c, g, or t
  misc_feature (479)..(479): n is a, c, g, or t
  Peptide Sequence Number=SeqID_11744
  Probeset Number=SeqID_20109
nngacnnnnnnnnnnnnnngnnnnnnnnnnnnntnnnnnccattcccgacggcttnnnnggcaagcagatgnnggnnnnnnnggctnnngncacccgcagcgacacgctcgaattcgtgcgcgacgnnnggtggcagcccggcaacttcnacgccgcgcagcggccggcggtgcgcgccgcgatcaagcagcggctggaggaaaagaaggacatcgacctgatcatcgccatgggcacctgggccggccaggacatggcgggcatgggcgcgccggtgcccaccatcgtcgcctcgaccagcgacgccgtcggcgcccgcatcacccgctcggcgcaggacagcggcctggacaacctgcacgcacgcgtccagcccgaacgctatcagcgccaggtgcgcctgttccacgaaatcgtgccgttcaagcggctcggcctggtctacgaagacagccccgagggccgcacctacagcgcn

SEQ ID NO: 5707 - DNA, 257 bp, Zea mays
  misc_feature (1)..(8): n is a, c, g, or t
  Peptide Sequence Number=SeqID_11745
  Probeset Number=SeqID_20110
nnnnnnnncccgaaccggacgggccgatcaccaccagtacttcacccttggccacttgggtggtcacgttgtccaccgcgcgcacgacgtggccacgggtgtcgaagacttttaccagatcgcggacttcaatcactttgcgcgagcctccgctcaagccggctggcgattttcgacagcggcaggttgatcagcaggtacaggcctgcgacgcagaacaggatttcaaacggcgagaacgaggtggtaatgacctc

SEQ ID NO: 5708 - DNA, 257 bp, Zea mays
  misc_feature (250)..(257): n is a, c, g, or t
  Peptide Sequence Number=SeqID_11746
  Probeset Number=SeqID_20111
gaggtcattaccacctcgttctcgccgtttgaaatcctgttctgcgtcgcaggcctgtacctgctgatcaacctgccgctgtcgaaaatcgccagccggcttgagcggaggctcgcgcaaagtgattgaagtccgcgatctggtaaaagtcttcgacacccgtggccacgtcgtgcgcgcggtggacaacgtgaccacccaagtggccaagggtgaagtactggtggtgatcggcccgtccggttcgggnnnnnnnn

SEQ ID NO: 5709 - DNA, 923 bp, Zea mays
  misc_feature (1)..(11): n is a, c, g, or t
  misc_feature (802)..(804): n is a, c, g, or t
  misc_feature (814)..(818): n is a, c, g, or t
  misc_feature (827)..(828): n is a, c, g, or t
  misc_feature (841)..(841): n is a, c, g, or t
  misc_feature (844)..(844): n is a, c, g, or t
  misc_feature (846)..(846): n is a, c, g, or t
  misc_feature (863)..(923): n is a, c, g, or t
  Peptide Sequence Number=SeqID_11747
  Probeset Number=SeqID_20112
nnnnnnnnnnngatgaagacgagcaactggtagacagcctgcgcagcgacctggaagagcgcgtggccatcaacggccatacgccggacctcggttccaccgccatgctgccgccggaaggcctggacttgaaagactacctcggtagcctcgaacaaggcctgatccaacaggccctcgacgacgccaacggcatcgtcgcccgtgccgccgaacgcctgcgcatccgccgcaccaccctggtggagaagatgcgcaagtacggcatgagccgcaaagaaggtgatgaacaggcggatgattgacgcctgtttttcaagccgctgattaatcagcggttttttttcggcacgggtattgctacagcactcgcaacgttccgtttaactgacggtcagccaagcgagagagcatgatgccccacgccgcccaactatcttcggtccctgacattcaggggcctgccccctccgtagagcagatcagccgccttgggcttgaacaggcattttccctgttcaaccagatgtcgagccagttgactgactcctacagcctgttggaagcgcgggtttccgagcttaaaggcgagttggcggtggtcagcgcccagcgcatggaagagctggccgagaaagagcgcctggccaaccgcctgcaaaacctcctcgacctgttgcccggtggcgtgatcgttatcgacgaccagggtcgcgtgcgcgaagccaacccggccgcctgtgacatgctgggcctgccgctggaaggcgagctgtggcgcgaggtcatcacccgctgcttnnngccgcgggannnnnacggccacnnaatctctctcagnacngncgccgcttgtccatcgnnnnnnnnnnnnnnnnnnnnnnnnnnnnnnnnnnnnnnnnnnnnnnnnnnnnnnnnnnnnn

SEQ ID NO: 5710 - DNA, 197 bp, Zea mays
  misc_feature (1)..(2): n is a, c, g, or t
  Peptide Sequence Number=SeqID_11748
  Probeset Number=SeqID_20113
nnatcgacctggcggcgctgcggcgcgcggtggggccggtgcgcgaattcacgctgcacctgccggtcaaggggctgcgcgccgactccaataccgcgcgcctgttggagtcggcctctgccgacaacttccggctgggctgcacgccggtgatcaacctgttcgagcagcgcgccgaccccatccgcgtgacgcac

SEQ ID NO: 5711 - DNA, 197 bp, Zea mays
  misc_feature (196)..(197): n is a, c, g, or t
  Peptide Sequence Number=SeqID_11749
  Probeset Number=SeqID_20114
gtgcgtcacgcggatggggtcggcgcgctgctcgaacaggttgatcaccggcgtgcagcccagccggaagttgtcggcagaggccgactccaacaggcgcgcggtattggagtcggcgcgcagccccttgaccggcaggtgcagcgtgaattcgcgcaccggccccaccgcgcgccgcagcgccgccaggtcgatnn

SEQ ID NO: 5712 - DNA, 927 bp, Zea mays
  misc_feature (1)..(10): n is a, c, g, or t
  misc_feature (729)..(729): n is a, c, g, or t
  misc_feature (797)..(797): n is a, c, g, or t
  misc_feature (802)..(802): n is a, c, g, or t
  misc_feature (820)..(822): n is a, c, g, or t
  misc_feature (825)..(825): n is a, c, g, or t
  misc_feature (832)..(836): n is a, c, g, or t
  misc_feature (839)..(839): n is a, c, g, or t
  misc_feature (842)..(844): n is a, c, g, or t
  misc_feature (846)..(863): n is a, c, g, or t
  misc_feature (868)..(872): n is a, c, g, or t
  misc_feature (877)..(927): n is a, c, g, or t
  Peptide Sequence Number=SeqID_11750
  Probeset Number=SeqID_20115
nnnnnnnnnngctgcacatgatcatcgccaagggccccggcctgaagccgctctacgcccattgcctgggtggcggcaccaagccgcgcatcactgtgaccacacaccccgccgccgatggcaattgggtgtggtacctgggcggcgatatcgccgaggccgaaggtgtggcccgcaccccggagcaacagatcgccaccgcacaaaaggagttggcgcagctgctgccctggatcgatatgagccagactcagtgggcgaccctgcgcgtggaccgcgccgagccgttgcagtcaggcctgacccgcccggacaacgccttcctcgccgagcaggatcgcctgttggtgggctggccgactaagctggcattggcgccggacttcgctgatcgggtgatcaacgcactggaacgtgacggcatcaagccaagtgtcacggaaacgctccccgacctgccaaaacccgccatcgcccaacctgcctgggagcaactgctgccatgaccctgccgaccctgcatgaccttcatcgcccattgggcagcaccggtttgatggtttcgccgctgggactgggaaccgtcaagctgggccgcgaccaaggggtgaaataccccagcggcttccagattcccgatgacgatgccgcgcggatgctgctgcgccaggcccggcaattgggcatcaacctgatcgacaccgcgccggcctatggccgcagcgaagnacgcctgggcccgctgttgcgtggtcagcgccaggaatgggtgatcgtcagcaaggtgggtgaggagntcgcngagggcgtgtcccatcannnttncagcgcnnnnncanccnnntnnnnnnnnnnnnnnnnnngaaannnnntgaannnnnnnnnnnnnnnnnnnnnnnnnnnnnnnnnnnnnnnnnnnnnnnnnnn

SEQ ID NO: 5713 - DNA, 869 bp, Zea mays
  misc_feature (1)..(2): n is a, c, g, or t
  misc_feature (5)..(5): n is a, c, g, or t
  misc_feature (11)..(22): n is a, c, g, or t
  misc_feature (28)..(30): n is a, c, g, or t
  misc_feature (33)..(47): n is a, c, g, or t
  misc_feature (53)..(61): n is a, c, g, or t
  misc_feature (63)..(72): n is a, c, g, or t
  misc_feature (75)..(85): n is a, c, g, or t
  misc_feature (87)..(95): n is a, c, g, or t
  misc_feature (97)..(97): n is a, c, g, or t
  misc_feature (102)..(106): n is a, c, g, or t
  misc_feature (108)..(123): n is a, c, g, or t
  misc_feature (129)..(135): n is a, c, g, or t
  misc_feature (137)..(138): n is a, c, g, or t
  misc_feature (140)..(143): n is a, c, g, or t
  misc_feature (160)..(162): n is a, c, g, or t
  misc_feature (165)..(167): n is a, c, g, or t
  misc_feature (171)..(173): n is a, c, g, or t
  misc_feature (195)..(199): n is a, c, g, or t
  misc_feature (206)..(207): n is a, c, g, or t
  misc_feature (867)..(869): n is a, c, g, or t
  Peptide Sequence Number=SeqID_11751
  Probeset Number=SeqID_20116
nnggnaagaannnnnnnnnnnntctctnnnggnnnnnnnnnnnnnnnggggannnnnnnnncnnnnnnnnnnggnnnnnnnnnnnannnnnnnnnanggaannnnngnnnnnnnnnnnnnnnnttcaannnnnnnanntnnnncagcgccagcgtgtggnnnaannnctgnnncatcgccaggaaggcgcgaatnnnnnccggggnngagaacctggtccaccggcaaaaccttgtcgagctgcaacgcaagctcgatgatctgcactctgccgacgttgcctacatcctcgaagccttgccgcttaatgaccgtctgacgctttggcaattggtcaaggctgatcgcgacggcgacatcctccttgaagtatccgactcggtccgtgaaaccctgatcgccgacatggacgatcacgagctcctggctgccgccaaggacatggatgccgacgaactcgctgacctggcttccgagctgccgcgtgacgtcgtccatgagctgatggaaaccctcgacgcccaacagcgtgagcgtgtgcgctcggcgttgtcctacgacgaggagcaggtcggtgcgttgatggacttcgagatggtcaccatccgcgaagacgtcagcctggaagtggttctgcgttacctgcgccgcctcaaggagctgccaggccacaccgacaaactgttcgtggtcgattacgaaggcattctcaagggcgtgctgccgatcaagcgcctgctggtcaatgacccggacaagaaagtcgcggacgtcatggccagcgacccggtgagtttccatccggacgaagacgcttacgacgctgcccaggcgttcgagcgttatgacttgatctcggccccggtnnn

SEQ ID NO: 5714 - DNA, 718 bp, Zea mays
  misc_feature (1)..(6): n is a, c, g, or t
  misc_feature (340)..(340): n is a, c, g, or t
  misc_feature (347)..(352): n is a, c, g, or t
  misc_feature (390)..(396): n is a, c, g, or t
  misc_feature (399)..(416): n is a, c, g, or t
  misc_feature (420)..(444): n is a, c, g, or t
  misc_feature (451)..(475): n is a, c, g, or t
  misc_feature (477)..(487): n is a, c, g, or t
  misc_feature (489)..(524): n is a, c, g, or t
  misc_feature (529)..(530): n is a, c, g, or t
  misc_feature (532)..(532): n is a, c, g, or t
  misc_feature (534)..(550): n is a, c, g, or t
  misc_feature (553)..(557): n is a, c, g, or t
  misc_feature (559)..(572): n is a, c, g, or t
  misc_feature (574)..(577): n is a, c, g, or t
  misc_feature (581)..(600): n is a, c, g, or t
  misc_feature (603)..(608): n is a, c, g, or t
  misc_feature (611)..(615): n is a, c, g, or t
  misc_feature (626)..(718): n is a, c, g, or t
  Peptide Sequence Number=SeqID_11752
  Probeset Number=SeqID_20117
nnnnnngccgggcagcatcaggtcgaggatcaacgcatcccagccgccttgttccagcagttgcacggcctcgttaccgtcggcgctgtgcaccacctcgaactgttcgtcccgcaggtgcaggcagatcaaatcggcaatgtgcgcatcgtcctcgacaaccaggacacgtttgggctgatccattggcaaaaccttttctcgtgattcgcgcattgtgcgggttttgcaacagtgtagttatcacgaattgtttaactctgcgtgaggattccgcgaccagaccgggcctaaccttgactcatcgcaatggcataagtacgcaaccccattgtggcgngtgagcnnnnnncatacttaactgggatgtgcatgtgcttttttttgccnnnnnnncgnnnnnnnnnnnnnnnnnnttcnnnnnnnnnnnnnnnnnnnnnnnnnttgtggnnnnnnnnnnnnnnnnnnnnnnnnnannnnnnnnnnnannnnnnnnnnnnnnnnnnnnnnnnnnnnnnnnnnnntggcnncntnnnnnnnnnnnnnnnnntcnnnnngnnnnnnnnnnnnnngnnnntaannnnnnnnnnnnnnnnnnnnatnnnnnnagnnnnntcggccaccgnnnnnnnnnnnnnnnnnnnnnnnnnnnnnnnnnnnnnnnnnnnnnnnnnnnnnnnnnnnnnnnnnnnnnnnnnnnnnnnnnnnnnnnnnnnnn

SEQ ID NO: 5715 - DNA, 718 bp, Zea mays
  misc_feature (1)..(93): n is a, c, g, or t
  misc_feature (104)..(108): n is a, c, g, or t
  misc_feature (111)..(116): n is a, c, g, or t
  misc_feature (119)..(138): n is a, c, g, or t
  misc_feature (142)..(145): n is a, c, g, or t
  misc_feature (147)..(160): n is a, c, g, or t
  misc_feature (162)..(166): n is a, c, g, or t
  misc_feature (169)..(185): n is a, c, g, or t
  misc_feature (187)..(187): n is a, c, g, or t
  misc_feature (189)..(190): n is a, c, g, or t
  misc_feature (195)..(230): n is a, c, g, or t
  misc_feature (232)..(242): n is a, c, g, or t
  misc_feature (244)..(268): n is a, c, g, or t
  misc_feature (275)..(299): n is a, c, g, or t
  misc_feature (303)..(320): n is a, c, g, or t
  misc_feature (323)..(329): n is a, c, g, or t
  misc_feature (367)..(372): n is a, c, g, or t
  misc_feature (379)..(379): n is a, c, g, or t
  misc_feature (713)..(718): n is a, c, g, or t
  Peptide Sequence Number=SeqID_11753
  Probeset Number=SeqID_20118
nnnnnnnnnnnnnnnnnnnnnnnnnnnnnnnnnnnnnnnnnnnnnnnnnnnnnnnnnnnnnnnnnnnnnnnnnnnnnnnnnnnnnnnnnnnnncggtggccgannnnnctnnnnnnatnnnnnnnnnnnnnnnnnnnnttannnncnnnnnnnnnnnnnncnnnnngannnnnnnnnnnnnnnnnangnngccannnnnnnnnnnnnnnnnnnnnnnnnnnnnnnnnnnntnnnnnnnnnnntnnnnnnnnnnnnnnnnnnnnnnnnnccacaannnnnnnnnnnnnnnnnnnnnnnnngaannnnnnnnnnnnnnnnnncgnnnnnnnggcaaaaaaaagcacatgcacatcccagttaagtatgnnnnnngctcacncgccacaatggggttgcgtacttatgccattgcgatgagtcaaggttaggcccggtctggtcgcggaatcctcacgcagagttaaacaattcgtgataactacactgttgcaaaacccgcacaatgcgcgaatcacgagaaaaggttttgccaatggatcagcccaaacgtgtcctggttgtcgaggacgatgcgcacattgccgatttgatctgcctgcacctgcgggacgaacagttcgaggtggtgcacagcgccgacggtaacgaggccgtgcaactgctggaacaaggcggctgggatgcgttgatcctcgacctgatgctgcccggcnnnnnn

SEQ ID NO: 5716 - DNA, 393 bp, Zea mays
  misc_feature (1)..(7): n is a, c, g, or t
  misc_feature (354)..(356): n is a, c, g, or t
  misc_feature (358)..(366): n is a, c, g, or t
  misc_feature (371)..(372): n is a, c, g, or t
  misc_feature (374)..(375): n is a, c, g, or t
  misc_feature (377)..(386): n is a, c, g, or t
  misc_feature (388)..(393): n is a, c, g, or t
  Peptide Sequence Number=SeqID_11754
  Probeset Number=SeqID_20119
nnnnnnnccatacagcgtcacgctgctggtctcggcggcctgcgccgggttcaggcagctcagggccagggcggcgcccagcgtgctgcgatggcggatgattcttttcatggtgtgatcccctcgattggtatggcgttggacaaaagaagcccctgccgccggcgcgccggcggcaaagggtgaagcaagcggaggtctggggcgggcgctagcgggtcatggcagcgcaccgtgcgcgggcagtggcgtcaggtcgctcggcgtggccacgcacagcgtgacgctggacgggtgcgcggccgacaggtgcagcgtgttcagcgcgatgcgcttctcgcgtgcgtcggcggnnntnnnnnnnnngttcnngnngnnnnnnnnnncnnnnnn

SEQ ID NO: 5717 - DNA, 393 bp, Zea mays
  misc_feature (1)..(6): n is a, c, g, or t
  misc_feature (8)..(17): n is a, c, g, or t
  misc_feature (19)..(20): n is a, c, g, or t
  misc_feature (22)..(23): n is a, c, g, or t
  misc_feature (28)..(36): n is a, c, g, or t
  misc_feature (38)..(40): n is a, c, g, or t
  misc_feature (387)..(393): n is a, c, g, or t
  Probeset Number=SeqID_20120
nnnnnngnnnnnnnnnncnncnngaacnnnnnnnnnannnccgccgacgcacgcgagaagcgcatcgcgctgaacacgctgcacctgtcggccgcgcacccgtccagcgtcacgctgtgcgtggccacgccgagcgacctgacgccactgcccgcgcacggtgcgctgccatgacccgctagcgcccgccccagacctccgcttgcttcaccctttgccgccggcgcgccggcggcaggggcttcttttgtccaacgccataccaatcgaggggatcacaccatgaaaagaatcatccgccatcgcagcacgctgggcgccgccctggccctgagctgcctgaacccggcgcaggccgccgagaccagcagcgtgacgctgtatggnnnnnnn

SEQ ID NO: 5718 - DNA, 743 bp, Zea mays
  misc_feature (1)..(1): n is a, c, g, or t
  misc_feature (742)..(743): n is a, c, g, or t
  Peptide Sequence Number=SeqID_11755
  Probeset Number=SeqID_20121
nacaaactgttaaactcgccgcctgccagacacctcaccgagctgaaaaaccctgtggaaatcttcaaagagtttaccttcgagtccgcccaccgcctgccccacgttccggaaggccacaaatgcgggcgcctgcatggccattcgttcaaggtggcgatccacctcagcggcgacctcgacccgcataccggctggatccgtgacttctcggagatcaaggcgattttcaagccgctctacgaacgcctcgatcacaactacctcaatgacattccgggccttgaaaaccccaccagcgaagtgctggccaagtggatctggaatgagttgaaaccgttgttgccggaactcagcgcgattcgcatccatgagacctgcaccagcggctgcatctatcgcggcgagtaagccggcgatgtaaaaaaccacccttgcggtggtttttttatgccggtaagtcccttacagtcagggcctcttgcacagaaggcgcacgctgcgatgccaccccttatccgccccgctaccgttgacgatatcgccgccatcgaggccatcgtctacgccgcctactccccttacatcgaacgaatcgggcgcaagccagggccgatgctggatgactatggccaccaagttgcagccggaggggtgcacgtgcttgagcgcgcgggccgggtgcatggctttgtcgtactgatccatcacgacgagtacctgctgctggataacctggccnn

SEQ ID NO: 5719 - DNA, 890 bp, Zea mays
  misc_feature (1)..(93): n is a, c, g, or t
  Peptide Sequence Number=SeqID_11756
  Probeset Number=SeqID_20122
nnnnnnnnnnnnnnnnnnnnnnnnnnnnnnnnnnnnnnnnnnnnnnnnnnnnnnnnnnnnnnnnnnnnnnnnnnnnnnnnnnnnnnnnnnnnnccctcggcaaattgatcgccagcgaagatgctggcgcggagcgttatgtgcatctgggcgctaccagtcaggatgtgatggacaccggcctggtgctgcaactgcgcagcgctgtcgagttgatcgaacacgatctggcgcggttgggtgacattcttgccgcccaggctcagcgctatgggacaactcttttggctggccggacgtggctgcaacatgcgacgccggtcaccctgggcatgaaaatcgccggctggctcggcgcagtcacccgaagtcggcagcgcctgagtgagctcaagccgcgtttgctggtgctgcaatttggcggtgcttccggaaccctggcagcccttggcgaacaggcgatgccggtggcgcaagccttggcggccgagttgcagctgggcctgccggagcaaccttggcacacccagcgcgatcgtctggtggagtttgcctcggtgcttggcctgatcgccggtagtctcggcaaactgggccgcgacatcagcctgctgatgcagaccgaagcggcggaagtgttcgaaccctcagcccccggcaagggcggctcttcgaccatgccccacaagcgcaacccggtgggcgctgccgtgctgatcagcgccgcgacccgcgtgccgggcctggtggcgacaatgttcagcgccatgccccaggagcacgaacgcagcctgggcttgtggcacgccgagtgggaaaccttgccggaaatttgccggctggtatccggtgcattgcatcaggcgctgctggtgagtgaagggctggaa

SEQ ID NO: 5720 - DNA, 200 bp, Zea mays
  misc_feature (4)..(4): n is a, c, g, or t
  Peptide Sequence Number=SeqID_11757
  Probeset Number=SeqID_20123
cgantaccagtacgtcggcaagcgcgccgccgatccgcagaaccacttcgacctgggcagctaccagttgctgaacgcgcgcctgggcgtggccaacggccgcgccgagtactacgtgtggggcagcaacctgctgaaccggcagtacgacctgtacggctacttcgcgccgccgtcggtggcctatggcgcgccggccc

SEQ ID NO: 5721 - DNA, 200 bp, Zea mays
  misc_feature (197)..(197): n is a, c, g, or t
  Peptide Sequence Number=SeqID_11758
  Probeset Number=SeqID_20124
gggccggcgcgccataggccaccgacggcggcgcgaagtagccgtacaggtcgtactgccggttcagcaggttgctgccccacacgtagtactcggcgcggccgttggccacgcccaggcgcgcgttcagcaactggtagctgcccaggtcgaagtggttctgcggatcggcggcgcgcttgccgacgtactggtantcg

SEQ ID NO: 5722 - DNA, 874 bp, Zea mays
  misc_feature (1)..(74): n is a, c, g, or t
  misc_feature (78)..(79): n is a, c, g, or t
  misc_feature (82)..(102): n is a, c, g, or t
  misc_feature (116)..(116): n is a, c, g, or t
  misc_feature (118)..(119): n is a, c, g, or t
  misc_feature (128)..(129): n is a, c, g, or t
  misc_feature (131)..(132): n is a, c, g, or t
  misc_feature (873)..(874): n is a, c, g, or t
  Peptide Sequence Number=SeqID_11759
  Probeset Number=SeqID_20125
nnnnnnnnnnnnnnnnnnnnnnnnnnnnnnnnnnnnnnnnnnnnnnnnnnnnnnnnnnnnnnnnnnnnnnnnnngggnnggnnnnnnnnnnnnnnnnnnnnnagtgctgatcggancnntcctgccgnncnnacgtgagcccgcgcaaaaataataacgaggcaataacgatgaccgatgtacgtacacctgctgccgaaaatcccgctgtagacctgacgcagaccaccgttacacaaggctggaacaaacacgacaccacctggatgctcggcctctacggcaccgccatcggtgccggcaccctgttcctgccgatcaacgccggcgtgggcggcttctggccgttgatcgtgctggcgctgctggccttcccgatgaccttcttcgctcaccgtgggctgacgcgctttgtgttgtcgggcaaatccggcgacatcaccgacgtggtggaagaacacttcggcatcggcgccggcaagctgatcaccttgctgtacttcttcgcgatcttcccgattttgctggtgtacagcgtggcgctgaccaacaccctgaccagctttatggaacaccaactgcacatggcgccgccgccccgggcgatcctgtcgctggtgctgatcctcggcctgatggccattgtgcgttgcggccagggcgtgatcgtcaaggccatgagcgtgctggtgtacccgttcgtcgccgccctgttgctgttggcggtgagcctgatccccaactggaacggcgccttcttcgcctccgccagcgaaggcatgccgctgccggcgttcttcaagaccttatggctggcaatcccggtgatggtgttttccttcaaccactcgccgatcatttccgcctttgccnn

SEQ ID NO: 5723 - DNA, 995 bp, Zea mays
  misc_feature (1)..(1): n is a, c, g, or t
  misc_feature (783)..(783): n is a, c, g, or t
  misc_feature (816)..(818): n is a, c, g, or t
  misc_feature (820)..(820): n is a, c, g, or t
  misc_feature (845)..(845): n is a, c, g, or t
  misc_feature (854)..(856): n is a, c, g, or t
  misc_feature (858)..(860): n is a, c, g, or t
  misc_feature (862)..(875): n is a, c, g, or t
  misc_feature (878)..(878): n is a, c, g, or t
  misc_feature (880)..(882): n is a, c, g, or t
  misc_feature (884)..(900): n is a, c, g, or t
  misc_feature (903)..(905): n is a, c, g, or t
  misc_feature (908)..(909): n is a, c, g, or t
  misc_feature (911)..(917): n is a, c, g, or t
  misc_feature (919)..(925): n is a, c, g, or t
  misc_feature (928)..(960): n is a, c, g, or t
  misc_feature (962)..(962): n is a, c, g, or t
  misc_feature (964)..(964): n is a, c, g, or t
  misc_feature (966)..(973): n is a, c, g, or t
  misc_feature (978)..(986): n is a, c, g, or t
  misc_feature (991)..(995): n is a, c, g, or t
  Peptide Sequence Number=SeqID_11760
  Probeset Number=SeqID_20126
ngtgccgctgctggaaacaatgcttcgcctggtacggctgctggagacgccgaaggacatcggcatgctggctccgctcgccctgcgagagctgtattaccgcctcctgcggggcgtgcacggacgccgcctgtatgagcttgccctcggtgattcgcaaacgcgtcgggtaacccgggcaatcgattggttgaataaccattacacccaacccttacgcatcgaagaactcgcccgggtagccaatttgggcagctctacattgcatcatcgctttaaggcggtgacagccatgagtccgttgcaatatcagaaacaactccgtctgcaagaagcccgccgtctgatgctcgtcgaaggcctggatgtggcgagtgcctgctatcgagtgggctacgaaagcccatcgcaattcagccgagagtacagtcgccagtttgggtgtccgccctccagagacaccaaccgagtttgccgccctgcgtgaaagtctgacgggctgcctgcggctgcgacgatacccgctcgcagccggctcattcgttagccgctggaaagatgcatccgcccccacgcaatagcgctttcacctcttcgttcacctgtgcggggctttggctcaactgctcaaagagcgttgagtccggacgcacgtacgattgcgaatcgtgcttcgcgctccacaagacgatgttcagcaggatcggaatgaggtctatgcctttctccgtcaacccataaaaatccttgcgccggtcatcggggttgggcgccttcgagagnatccctgctcctcaagaaaggcaaggcgagagnnnangacgttggttgcgattccctcttcngatttaagnnntnnngnnnnnnnnnnnnnnccngnnnannnnnnnnnnnnnnnnnatnnncanngnnnnnnnannnnnnnatnnnnnnnnnnnnnnnnnnnnnnnnnnnnnnnnncngnannnnnnnnttttnnnnnnnnnttccnnnnn

SEQ ID NO: 5724 - DNA, 838 bp, Zea mays
  misc_feature (699)..(701): n is a, c, g, or t
  misc_feature (742)..(745): n is a, c, g, or t
  misc_feature (761)..(764): n is a, c, g, or t
  misc_feature (774)..(778): n is a, c, g, or t
  misc_feature (781)..(793): n is a, c, g, or t
  misc_feature (795)..(818): n is a, c, g, or t
  misc_feature (820)..(820): n is a, c, g, or t
  misc_feature (827)..(833): n is a, c, g, or t
  misc_feature (837)..(838): n is a, c, g, or t
  Peptide Sequence Number=SeqID_11761
  Probeset Number=SeqID_20127
aagcactaccgcgacagcctgcgggaaaccgacctggctgacccgcaattgctgcttgagtgccggacggcactggatgaactgacgcaaatccttaaactgggctcggtttatcctttccagatcaattaacgccgcacggctgagaactatttatgaccaccgacaccctgaaactgatccttgaagacaccgacggcacccagctggaaacgtcctgcacccgcgtcgccgtggtgtggcagggcaaggagatctggatccagcacgacggccgtggccaactgttgatcggcgttgacgtggaagagggcgacgcggaatacgccaacctgctgatgcgcccattggccaccaacctgatgagcctgcaactggaaatggaaccggccgacgttgaaggtgatgatgacgatcacgtccacggtcctggctgcaaccactaaggaagctgcttatgctcgccctcggcaaactgcttgaactgaccctcgccggtcgcgaaccggcgcaaaaaattcaactgactgtcgatggcgtgcaactgcgctggctcagtgagggcgcgctggaagtgcggcctcctgaggcgcgggacaacggcagcgacgtgctgctgtcgtccggcatccatggcaacgaaaccgcgccgatcgaattggccgaccgcttgctgcaaggcattgcccgtggggagannnagccccgcacccgtattctgttcctgttcggtaaccccgannnnatgcgccgcggcgagnnnnaccttgaacnnnnngtnnnnnnnnnnnnncnnnnnnnnnnnnnnnnnnnnnnnntngcccccnnnnnnntgcnn

SEQ ID NO: 5725 - DNA, 816 bp, Zea mays
  misc_feature (1)..(2): n is a, c, g, or t
  misc_feature (654)..(654): n is a, c, g, or t
  misc_feature (656)..(658): n is a, c, g, or t
  misc_feature (687)..(687): n is a, c, g, or t
  misc_feature (692)..(695): n is a, c, g, or t
  misc_feature (700)..(705): n is a, c, g, or t
  misc_feature (711)..(728): n is a, c, g, or t
  misc_feature (733)..(738): n is a, c, g, or t
  misc_feature (740)..(752): n is a, c, g, or t
  misc_feature (754)..(756): n is a, c, g, or t
  misc_feature (758)..(771): n is a, c, g, or t
  misc_feature (773)..(780): n is a, c, g, or t
  misc_feature (782)..(783): n is a, c, g, or t
  misc_feature (785)..(789): n is a, c, g, or t
  misc_feature (791)..(793): n is a, c, g, or t
  misc_feature (800)..(807): n is a, c, g, or t
  misc_feature (810)..(815): n is a, c, g, or t
  Peptide Sequence Number=SeqID_11762
  Probeset Number=SeqID_20128
nnttactttgcggtgctggtgcgcgtgctgttggccgggctggtgtttatcccactgacccgctggcgctcggtagaaccggcgttcatgcgcggcatgctgttgatcggcgcgctgcagtttggcgtgacttacgtatgtctgtatttgagcttcagagtactgacggtgccggaggtgttgctgttcaccatcctcacgccgttgcacgtgaccctgatcgaagacgccctgaaccgccgcttcaatccgtgggcgctggtggccgcattggtagcggtgacgggagcggcggtgatccgctttgaccagatcaccccgaacttcttcgtgggcttcctgctgctgcaactggcgaacttcacctacgctgccgggcaggtgctttataagcacttggtggcccgccatccgagcgatctaccgcactatcggcgctttggttacttctacctcggcgcgttggcggtggcattgccggcgttcctgatgttcggcaaggccaatttcctgccggaagcaccgttgcaatggggcgttttggtgttcctcgggctggtcagtacggcactgggcatgtactggtggaacaagggcgcgtgcatggtcaatggcggcacattggcggtgatgaataacctgcatgtgccggtngnnntgttgctgaacttgctgatctggaatcancatgnnnngctcnnnnnnctgttnnnnnnnnnnnnnnnnnntcctnnnnnngnnnnnnnnnnnnncnnntnnnnnnnnnnnnnncnnnnnnnncnncnnnnntnnncaaaaannnnnnnnaannnnnng

SEQ ID NO: 5726 - DNA, 209 bp, Zea mays
  Peptide Sequence Number=SeqID_11763
  Probeset Number=SeqID_20129
gatcccgccgccccagtgctccaacagtctcgttgcaggattgatttagtgattgttgctctgcggctgctctgcggcgggggttgagatggaggacttgctgaacacggagattgggaagaacgactatgactggtaattgaatgattactctcgtcttgtggcgatttcctaatttgggcacggtgtagcgctgcatgcattggtta

SEQ ID NO: 5727 - DNA, 806 bp, Zea mays
  misc_feature (1)..(8): n is a, c, g, or t
  misc_feature (752)..(755): n is a, c, g, or t
  misc_feature (760)..(762): n is a, c, g, or t
  misc_feature (772)..(774): n is a, c, g, or t
  misc_feature (778)..(778): n is a, c, g, or t
  misc_feature (780)..(783): n is a, c, g, or t
  misc_feature (794)..(802): n is a, c, g, or t
  misc_feature (804)..(806): n is a, c, g, or t
  Probeset Number=SeqID_20130
nnnnnnnncaacgccaccatcgacgacatcaccggcgtcgtcgaaaccgacccggccctggccgcccaagtggtgagctgggctgcgtcgccctactacgcctcgccgggcaagatccgctcggtggaagacgccatcgtccgtgtgctgggctttgacctggtgatcaacctcgcgctgggcctggccctgggcaagaccttgagcctgcccaaggaccacccgcaacaggccacgccgtactggcaccagtcgatctacaccgccgccgtgatcgaaggcctgacccgcgccatgccccgcgcccagcgcccggaagccggcctgacctacctggccggcctgctgcacaacttcggctacctgttgctggcccacgtcttcccgccgcatttttcgctgatctgccggcacctggaggtcaacccgcacctgtgccacagctacatcgagcagcacctgctgggcatcagccgcgagcagattggtgcgtggttgatgcgttattgggacatgccggacgaactgtccaccgccctgcgcttccagcacgatccgacctacgacggccaatatgcggaatacccgaacctggtgtgcctggccgtgcgcttgttgcgcagccgtggcatcggctccgggccggatgaagccatcccggacgaactgctggagcgcctggggctggcccgggacaaggcagaggatgtggtgagcaaggtgctggatgcggagacgttgctgcgcgagtnnnncgtcnnngttcagtcannnatanannnngcgcctgtgannnnnnnnncnnn

SEQ ID NO: 5728 - DNA, 954 bp, Zea mays
  misc_feature (736)..(737): n is a, c, g, or t
  misc_feature (739)..(740): n is a, c, g, or t
  misc_feature (742)..(742): n is a, c, g, or t
  misc_feature (747)..(751): n is a, c, g, or t
  misc_feature (772)..(772): n is a, c, g, or t
  misc_feature (777)..(778): n is a, c, g, or t
  misc_feature (781)..(782): n is a, c, g, or t
  misc_feature (784)..(784): n is a, c, g, or t
  misc_feature (786)..(790): n is a, c, g, or t
  misc_feature (792)..(792): n is a, c, g, or t
  misc_feature (799)..(806): n is a, c, g, or t
  misc_feature (818)..(818): n is a, c, g, or t
  misc_feature (822)..(828): n is a, c, g, or t
  misc_feature (830)..(831): n is a, c, g, or t
  misc_feature (833)..(834): n is a, c, g, or t
  misc_feature (836)..(837): n is a, c, g, or t
  misc_feature (859)..(862): n is a, c, g, or t
  misc_feature (865)..(867): n is a, c, g, or t
  misc_feature (869)..(871): n is a, c, g, or t
  misc_feature (873)..(883): n is a, c, g, or t
  misc_feature (886)..(887): n is a, c, g, or t
  misc_feature (892)..(898): n is a, c, g, or t
  misc_feature (902)..(903): n is a, c, g, or t
  misc_feature (914)..(937): n is a, c, g, or t
  misc_feature (939)..(940): n is a, c, g, or t
  misc_feature (943)..(952): n is a, c, g, or t
  misc_feature (954)..(954): n is a, c, g, or t
  Peptide Sequence Number=SeqID_11764
  Probeset Number=SeqID_20131
gaagaatctggtaacggaaatgaagatgctccctgttaactcattaggccttgttcggttattccaattctatgtggatttgagtgtatttgaatagattcggatgtattttgacttgctatggatttaaactgactcaataccacccaatacacatgtactaacggtgaaacgaacaagcccttagagatcaccggatgttgccagcctttgacaataactgtaagactgactgggaaacaatctgatttgttcagtgattggcacctcgcttctgaaagcaccttggaataatgtatttaggtcactctaatttgttcagtgattttggccgacttttattcagctgacattgtactttcagcagtgttattacttttgctgccaggatgtaatgtaagcaaaatccttgggcatggtgttgtgttcgcccgtgagccggtgcggcggtgaccaacagatcccgaccgtgccacacgtggatcctgtttgcctcatgcgtggactttggcgcggacggacgcaactagagccgtgggcaaccgcgaggccgaacctggacgattggggtctccggaagcagttggactgagcaggaggcaaaataagctaccgcctctccctccctcgcccctcggtctcggtatatggcaatggcagctgccaactggagcagcggggcgggcgcgggcgattggacgaagccgtgggcatggcgccatgacccggcgtgganntnncnggcgnnnnnggctgggcgcctgggccgagncgtcnncgnngntnnnnncntgtgtannnnnnnnaacgattacaanactnnnnnnntnngnnannccaaatccgtacccgtgaaaannnntannncnnntnnnnnnnnnnntanncctannnnnnnttannaaaaaaaaaannnnnnnnnnnnnnnnnnnnnnnncnnagnnnnnnnnnncn

SEQ ID NO: 5729 - DNA, 954 bp, Zea mays
  misc_feature (1)..(1): n is a, c, g, or t
  misc_feature (3)..(12): n is a, c, g, or t
  misc_feature (15)..(16): n is a, c, g, or t
  misc_feature (18)..(41): n is a, c, g, or t
  misc_feature (52)..(53): n is a, c, g, or t
  misc_feature (57)..(63): n is a, c, g, or t
  misc_feature (68)..(69): n is a, c, g, or t
  misc_feature (72)..(82): n is a, c, g, or t
  misc_feature (84)..(86): n is a, c, g, or t
  misc_feature (88)..(90): n is a, c, g, or t
  misc_feature (93)..(96): n is a, c, g, or t
  misc_feature (118)..(119): n is a, c, g, or t
  misc_feature (121)..(122): n is a, c, g, or t
  misc_feature (124)..(125): n is a, c, g, or t
  misc_feature (127)..(133): n is a, c, g, or t
  misc_feature (137)..(137): n is a, c, g, or t
  misc_feature (149)..(156): n is a, c, g, or t
  misc_feature (163)..(163): n is a, c, g, or t
  misc_feature (165)..(169): n is a, c, g, or t
  misc_feature (171)..(171): n is a, c, g, or t
  misc_feature (173)..(174): n is a, c, g, or t
  misc_feature (177)..(178): n is a, c, g, or t
  misc_feature (183)..(183): n is a, c, g, or t
  misc_feature (204)..(208): n is a, c, g, or t
  misc_feature (213)..(213): n is a, c, g, or t
  misc_feature (215)..(216): n is a, c, g, or t
  misc_feature (218)..(219): n is a, c, g, or t
  Probeset Number=SeqID_20132
ngnnnnnnnnnnctnngnnnnnnnnnnnnnnnnnnnnnnnnttttttttttnntaannnnnnntaggnntannnnnnnnnnnannngnnntannnnttttcacgggtacggatttggnntnncnnannnnnnnagtnttgtaatcgttnnnnnnnntacacangnnnnnancnncgnngacgnctcggcccaggcgcccagccnnnnncgccngnnanntccacgccgggtcatggcgccatgcccacggcttcgtccaatcgcccgcgcccgccccgctgctccagttggcagctgccattgccatataccgagaccgaggggcgagggagggagaggcggtagcttattttgcctcctgctcagtccaactgcttccggagaccccaatcgtccaggttcggcctcgcggttgcccacggctctagttgcgtccgtccgcgccaaagtccacgcatgaggcaaacaggatccacgtgtggcacggtcgggatctgttggtcaccgccgcaccggctcacgggcgaacacaacaccatgcccaaggattttgcttacattacatcctggcagcaaaagtaataacactgctgaaagtacaatgtcagctgaataaaagtcggccaaaatcactgaacaaattagagtgacctaaatacattattccaaggtgctttcagaagcgaggtgccaatcactgaacaaatcagattgtttcccagtcagtcttacagttattgtcaaaggctggcaacatccggtgatctctaagggcttgttcgtttcaccgttagtacatgtgtattgggtggtattgagtcagtttaaatccatagcaagtcaaaatacatccgaatctattcaaatacactcaaatccacatagaattggaataaccgaacaaggcctaatgagttaacagggagcatcttcatttccgttaccagattcttc

SEQ ID NO: 5730 - DNA, 186 bp, Zea mays
  misc_feature (1)..(4): n is a, c, g, or t
  Peptide Sequence Number=SeqID_11765
  Probeset Number=SeqID_20133
nnnncgccaccgccttcgtctcgatcatggaaggctgtagcaagtactgcagcttctgtgtcgtgccgtacacgcgcggcgaggaagtctcgcggccgttcgacgacgtgctgatcgaagtggccgacctggccgaccagggcgtcaaggaagtcacgctgctgggccagaacgtcaacgcctacc

SEQ ID NO: 5731 - DNA, 186 bp, Zea mays
  misc_feature (183)..(186): n is a, c, g, or t
  Peptide Sequence Number=SeqID_11766
  Probeset Number=SeqID_20134
ggtaggcgttgacgttctggcccagcagcgtgacttccttgacgccctggtcggccaggtcggccacttcgatcagcacgtcgtcgaacggccgcgagacttcctcgccgcgcgtgtacggcacgacacagaagctgcagtacttgctacagccttccatgatcgagacgaaggcggtggcgnnnn

SEQ ID NO: 5732 - DNA, 1149 bp, Zea mays
  misc_feature (10)..(16): n is a, c, g, or t
  misc_feature (22)..(26): n is a, c, g, or t
  misc_feature (30)..(31): n is a, c, g, or t
  misc_feature (35)..(35): n is a, c, g, or t
  misc_feature (40)..(53): n is a, c, g, or t
  misc_feature (56)..(86): n is a, c, g, or t
  misc_feature (90)..(156): n is a, c, g, or t
  misc_feature (158)..(159): n is a, c, g, or t
  misc_feature (161)..(269): n is a, c, g, or t
  misc_feature (274)..(285): n is a, c, g, or t
  misc_feature (287)..(290): n is a, c, g, or t
  misc_feature (294)..(308): n is a, c, g, or t
  misc_feature (313)..(318): n is a, c, g, or t
  misc_feature (327)..(328): n is a, c, g, or t
  misc_feature (339)..(343): n is a, c, g, or t
  misc_feature (361)..(364): n is a, c, g, or t
  misc_feature (1149)..(1149): n is a, c, g, or t
  Peptide Sequence Number=SeqID_11767
  Probeset Number=SeqID_20135
cccccccccnnnnnnngggggnnnnncagnngggnggggnnnnnnnnnnnnnnggnnnnnnnnnnnnnnnnnnnnnnnnnnnnnnncccnnnnnnnnnnnnnnnnnnnnnnnnnnnnnnnnnnnnnnnnnnnnnnnnnnnnnnnnnnnnnnnnnnntnncnnnnnnnnnnnnnnnnnnnnnnnnnnnnnnnnnnnnnnnnnnnnnnnnnnnnnnnnnnnnnnnnnnnnnnnnnnnnnnnnnnnnnnnnnnnnnnnnnnnnnnnnnnnnncccannnnnnnnnnnntnnnngacnnnnnnnnnnnnnnnagatnnnnnncatgaatgnntacttgaatcnnnnncgcttcatcgatagtgannnncctgcggtggtgagttcgccgaaaaacatcgcggttcgagtgccgcgctcagtgaccaggcagtcagtctttactacgctgtgcgcgaggcggtgcgctacaacccttacaccttcagccgtgacccgcaaaccctcagcggcagcttcgccctggcggccggcgagagttattgcgtgcccaaggcgacgctattggcggcgtgcgcaaggcactgcgggattcctgcacgcatcggcctggccgacgtgcgcaaccacctctcgacgccccgtttgatcgagctgctcagaagtgacgtatttgccatgcacggctacaccgagctgtatctggacggccgttgggtcaaggccacgcccgcattcaaccagcaactgtgtgaactgttcgacgtgccacccctggagttcgacggcatccacgacagtgttttccacgccttcaaccgcaagggccagcgttctatggagtacgtggtggaccatgggcaattcgccgaggtgcccgaggaattcttcttcgcccacattcagaaatgttacccgcacctgtttggcgagcagatgccgatcctgttgggcgacgtgcagagtgatttaagccgggcgtgatccggcgtatgctgcctcggcattcatccaaccatctttttcaaaatcggggcggtcatgctgaaaatctggggtcgtaaaaattcgtcaaacgtcaggaaagcactgtggtgcgccgaggagctcggcctggactatgaggcaattgatgcgggcggggcttttggtgtn

SEQ ID NO: 5733 - DNA, 913 bp, Zea mays
  misc_feature (1)..(44): n is a, c, g, or t
  misc_feature (46)..(46): n is a, c, g, or t
  misc_feature (54)..(62): n is a, c, g, or t
  misc_feature (70)..(71): n is a, c, g, or t
  misc_feature (74)..(75): n is a, c, g, or t
  Peptide Sequence Number=SeqID_11768
  Probeset Number=SeqID_20136
nnnnnnnnnnnnnnnnnnnnnnnnnnnnnnnnnnnnnnnnnnnntncagcgcgnnnnnnnnncggcgtgnnganngagcgttccagcgcagttcggccgacaccagccaacgcatgctggagttcgcccaatcgcaatcggtgttgcgtgcgttcagtggcggcggtagctcggtgttcctgcagcgggcgattgaacagcaacacgcgacaggggcacgcctgatcctgctgtctgcaacctcggtactgctgaatatgtggttggtgcaggtggtgttcgccgccttgttgatcgccgccgcgttgtggcttgacgcctacctggggaatgccttgtacgtgggttcggtgatcgcggtgatggtctcgctgttgctggtcagccgcttcgttgacccgctgctggaggtggccggctatggcgagacgttgcgcggggccgggatgcaacttgaggcggtgcgcgagatccttgcggcattgccgatgaaggagccaagcgcgccgcagtgtccgcgggatgcctccgtggaattgtgcgacgtcagctttcgtcacccgggtagtcctcgggacgtgttgcgcggcgtgaacctgcgtattgagcctggcagcatgaccgcactcgtaggggaatccggctccggcaagaccacgctcttgcggttggtcgcgcgatttttcgaggtcagccagggccaggtgtgtatcggtggcgtggatgtgcgacagatgtccggcgagcaactcaacgcgcagatcagccagattttccaggacacctacctgttccagggcagcgtcgccgacaacattcgcctcggcaagcccgatgccagcgatgcgcaagtattgaaggccgcgcgacaggccggcgtgcaagaaatcatcgagcgcctgcccatgggcct

SEQ ID NO: 5734 - DNA, 845 bp, Zea mays
  misc_feature (1)..(4): n is a, c, g, or t
  misc_feature (622)..(623): n is a, c, g, or t
  misc_feature (659)..(845): n is a, c, g, or t
  Peptide Sequence Number=SeqID_11769
  Probeset Number=SeqID_20137
nnnntggcttcgacccgtggcacttacctgccgattggcacgccgaccgacaacaaccgtttgtacttgctggatggtgcgctggagttggtgccccaaggtgcggtcggcgagttgtgcgtggcggggaccggcgtgggccgtggttatgtcagcgattcggtgcgcaccgcccaggtgtttgtgccgaatccgtttggcgcggcgggggagcgcctgtatcgcaccggcgacctggcgcgtcggcgcagcgatggtgtgttggagtacgtcgggcgtatcgaccatcaggtgaagattcgcggttaccggattgagttgggtgaaatcgaagcgcgcctgcatgaacaaccggaggtgcgggatgcggcggttggcgtgcaggagggcgtcaacggcaagcatctggtgggttacctggtggcggcggatgcgcagttgaatccaggcgagcgccttgatcggatcaagcaacgcctgcgggccgagttgccggagtacatggtgccgctgcattggctgtggctcgaccgtttgccgctgaatgccaatggcaagctggatcgcaaggccttgccggcgctggagattggccagttgcacagccaggattatctggcgnngcgtaatgagctggagcagacattggccgggatttnnnnnnnnnnnnnnnnnnnnnnnnnnnnnnnnnnnnnnnnnnnnnnnnnnnnnnnnnnnnnnnnnnnnnnnnnnnnnnnnnnnnnnnnnnnnnnnnnnnnnnnnnnnnnnnnnnnnnnnnnnnnnnnnnnnnnnnnnnnnnnnnnnnnnnnnnnnnnnnnnnnnnnnnnnnnnnnnnnnnnnnnnnn

SEQ ID NO: 5735 - DNA, 308 bp, Zea mays
  Peptide Sequence Number=SeqID_11770
  Probeset Number=SeqID_20138
aggtcgcggcgatgcagcttgagcccttcgtccagctggcgcccgatggacatggacgggttgagcgaggtcatgggttcctggaacaccatgccgatgcgcgcgccgcgcagcttgcgcagcgcggccgggctggcctgggtgacttccacgccctcgaagcggatcgagccgccggccaccaccagcggcggcggcgtcaggcccatgatggcgcgcgccgcctgggtcttgccgctgccggactcgccgacgatgccgaccatttcgcccggcgccacctcgaaggacacgccgccgacgatttc

SEQ ID NO: 5736 - DNA, 308 bp, Zea mays
  Peptide Sequence Number=SeqID_11771
  Probeset Number=SeqID_20139
gaaatcgtcggcggcgtgtccttcgaggtggcgccgggcgaaatggtcggcatcgtcggcgagtccggcagcggcaagacccaggcggcgcgcgccatcatgggcctgacgccgccgccgctggtggtggccggcggctcgatccgcttcgagggcgtggaagtcacccaggccagcccggccgcgctgcgcaagctgcgcggcgcgcgcatcggcatggtgttccaggaacccatgacctcgctcaacccgtccatgtccatcgggcgccagctggacgaagggctcaagctgcatcgccgcgacct

SEQ ID NO: 5737 - DNA, 218 bp, Zea mays
  misc_feature (1)..(2): n is a, c, g, or t
  Peptide Sequence Number=SeqID_11772
  Probeset Number=SeqID_20140
nngagattgaaagcctgacgctggtagacaccaacaaagatccgaagacccgcctgcaggaattcctgcagtcccgtggttgcgacctgccgcgttacgaagtggtggatatccagggtgagccgcactgccgagttttcttcgtcgaatgcgaaatcaccttactgaatgaaaaaagccgaggtcagggtgtgagccgtcgtattgccgaacaggta

SEQ ID NO: 5738 - DNA, 960 bp, Zea mays
  misc_feature (1)..(133): n is a, c, g, or t
  misc_feature (136)..(138): n is a, c, g, or t
  misc_feature (143)..(143): n is a, c, g, or t
  misc_feature (149)..(151): n is a, c, g, or t
  misc_feature (160)..(162): n is a, c, g, or t
  misc_feature (171)..(171): n is a, c, g, or t
  misc_feature (179)..(180): n is a, c, g, or t
  misc_feature (186)..(187): n is a, c, g, or t
  misc_feature (205)..(205): n is a, c, g, or t
  misc_feature (958)..(960): n is a, c, g, or t
  Peptide Sequence Number=SeqID_11784
  Probeset Number=SeqID_20141
nnnnnnnnnnnnnnnnnnnnnnnnnnnnnnnnnnnnnnnnnnnnnnnnnnnnnnnnnnnnnnnnnnnnnnnnnnnnnnnnnnnnnnnnnnnnnnnnnnnnnnnnnnnnnnnnnnnnnnnnnnnnnnnnnnnnnccnnnaaagnctttannnccctgaacnnngcggccatnccggaaannctgatnnagagcgagctgttcggcnatcgcggtggcagtttcaccggcgcccgcaaggaaggcatgcgcggcaagctgcaacaagcggatggtggcacgttgtttctggatgaaatcggcgatatgcccctcgctttgcaaacgcgcctgttaagggttttggaagaccgacttgtcgtgcccatcggcggcgagccgcaggcggtgaacgtcagaatcatcagcgccacccaccgtaatttgctggagcgggtagaggacggcagttttcgcgaagacctgtactaccggctgaacggtctggaaatcgccctgccgccgttgcgtgagcgcagcgataagtcgcaactgctcgactttctattggctgaggagacgggcgaccagccggtgttgctcgacagccctgcgcgtcaggcactgttggcatttgcctggccgggcaatgtacggcagttgcgcacggtgctgcgcacgttggcggcattgtgtgacgacggacggattgggcttgaggacctgccggcggtcattcgccaggcgcgcccgcagcctgcagtagtggaggaccgttcggattcgcccttggacgatgcagagcgcctggcgctgctcaatgccttggagcaacagcgctggcacatgagccacacggcggagcaactgggggttagccgtaacaccttgtatagaaaactgcgcaaacacgggatcgcccgttagctaaagggtgcgatttttcccaccctacgctaacctgcctcgatgttttacgagnnn

SEQ ID NO: 5739 - DNA, 632 bp, Zea mays
  misc_feature (1)..(2): n is a, c, g, or t
  misc_feature (624)..(625): n is a, c, g, or t
  misc_feature (627)..(632): n is a, c, g, or t
  Peptide Sequence Number=SeqID_11785
  Probeset Number=SeqID_20142
nnagcaggatcctcttgcggctcgtttgcaactgttgactactaattgatttgaattgaggccggcgcggcggctgtatgcgctcaggacaggaccccaaaaatgctcgttggaacatataacccttcgctcgtcctcgtatccctaggggtcgccatcctggcgtcatacacggcgctgggtatggccaaccgcgtcagggcggcgaacggactgccggcggcgcgttactggctggccggcggcgcgctcgccatgggcatcggcatctggtccatgcacttcgtcggcatgctggcgttcaacctgcccatcccgatgggctacgacctgccgctgacgctgctgtcgctggccatcgccatcggctgctccgccttcgcgctgtggatcgtctgcaaggacgacctgccctggcgccggctgatcatgggcgccctgctgatgggcgcgggcatcgccgccatgcactatatcggcatggccgccatgcggatgatgccgggcatcatctatgacccgacctggttcgcgctgtccatcgccatcgcggtggcggcctcgggcgccgccctctggatcacctaccgcctgcgccacgacggcccgcgggtggcgctgtcnncnnnnnn

SEQ ID NO: 5740 - DNA, 618 bp, Zea mays
  misc_feature (1)..(6): n is a, c, g, or t
  misc_feature (618)..(618): n is a, c, g, or t
  Peptide Sequence Number=SeqID_11786
  Probeset Number=SeqID_20143
nnnnnnggcagccaacgccgcagcagcggcttacccggtttatcgcagcctgagcgcgcagcatcgtgcgtcgttcctggaggcgatagccgatgagctggacgtccttggtgatgactttatcgccttggtctgccgcgaaacggcgttgcccgccgggcgtatccagggcgaacgcggccgtaccagcggccagatgcggctgttcgccaaggtgctgcggcgcggtgatttctacggggcgcggatcgatctggcgctgccggatcgccagcctttgccacgcccggatttgcgccagtaccgcatcggtctcggcccggtcgccgtgtttggggcgagtaattttcccttggccttttccactgccggtggcgacaccgccgccgcgctggcggccggctgcccggtggtgttcaaggcccacagcggccatatggccactgccgagcgggtcgccgaagcgatcatgcgggcggcgcagagcaccggcatgcccgacggcgtgttcaatgtgatcttcggcggcggggtgggtgaagcactggtcaagcacccggcaatccgcgccgtgggtttcaccggctcgctcaagggtggccgggccctgtgtgatan

SEQ ID NO: 5741 - DNA, 298 bp, Zea mays
  misc_feature (1)..(3): n is a, c, g, or t
  Peptide Sequence Number=SeqID_11787
  Probeset Number=SeqID_20144
nnnaaccacgcgccggctgcccgaataggccgccaccgactcgatctggcgcgagaaatcgcggatcaggtagctgcccggaatccaggccggcagcgatagccgctggccttccggcgcgggcgtctggacggttagggttatccggtagcggtggccggcggggtcgtgcggcgcaaggcggtaaagtacggggaaagacacggggaaagcggcagttttttccatccgtatatcttatttcatcccatcctctggagacaggtaatgagcgagtcgtttgtgctggtcgaaaccc

SEQ ID NO: 5742 - DNA, 298 bp, Zea mays
  misc_feature (296)..(298): n is a, c, g, or t
  Peptide Sequence Number=SeqID_11788
  Probeset Number=SeqID_20145
gggtttcgaccagcacaaacgactcgctcattacctgtctccagaggatgggatgaaataagatatacggatggaaaaaactgccgctttccccgtgtctttccccgtactttaccgccttgcgccgcacgaccccgccggccaccgctaccggataaccctaaccgtccagacgcccgcgccggaaggccagcggctatcgctgccggcctggattccgggcagctacctgatccgcgatttctcgcgccagatcgagtcggtggcggcctattcgggcagccggcgcgtggttnnn

SEQ ID NO: 5743 - DNA, 521 bp, Zea mays
  misc_feature (1)..(5): n is a, c, g, or t
  misc_feature (333)..(333): n is a, c, g, or t
  misc_feature (335)..(361): n is a, c, g, or t
  misc_feature (369)..(379): n is a, c, g, or t
  misc_feature (381)..(390): n is a, c, g, or t
  misc_feature (392)..(402): n is a, c, g, or t
  misc_feature (404)..(407): n is a, c, g, or t
  misc_feature (409)..(427): n is a, c, g, or t
  misc_feature (429)..(435): n is a, c, g, or t
  misc_feature (438)..(454): n is a, c, g, or t
  misc_feature (459)..(484): n is a, c, g, or t
  misc_feature (486)..(486): n is a, c, g, or t
  misc_feature (488)..(521): n is a, c, g, or t
  Peptide Sequence Number=SeqID_11789
  Probeset Number=SeqID_20146
nnnnnttccggcatccccggccacgaccgcgcgacacggtccagcaggttccaggccgccttgggatcgccggccgacaggatttcgcgggcgccgcggatggcgcgcggtccgagcctgccgagctggcgctcggcctcgtcgcgggcgctctggtcggccgacgcgtgcgccaggaccatcttgtaggcgtcgatggcctcgccgaaccagccgccgttgaacgcgacgcgggcaaagtgcaattgcgtgctgaacggcgccgactcgttggcggcggcctgttccaggtggcgcatggcggtctgcttgtcgcccagcgcatcggccgcngnnnnnnnnnnnnnnnnnnnnnnnnnnncgaagtgnnnnnnnnnnntnnnnnnnnnncnnnnnnnnnnncnnnnannnnnnnnnnnnnnnnnnncnnnnnnnatnnnnnnnnnnnnnnnnnacctnnnnnnnnnnnnnnnnnnnnnnnnnncnannnnnnnnnnnnnnnnnnnnnnnnnnnnnnnnnn

SEQ ID NO: 5744 - DNA, 521 bp, Zea mays
  misc_feature (1)..(34): n is a, c, g, or t
  misc_feature (36)..(36): n is a, c, g, or t
  misc_feature (38)..(63): n is a, c, g, or t
  misc_feature (68)..(84): n is a, c, g, or t
  misc_feature (87)..(93): n is a, c, g, or t
  misc_feature (95)..(113): n is a, c, g, or t
  misc_feature (115)..(118): n is a, c, g, or t
  misc_feature (120)..(130): n is a, c, g, or t
  misc_feature (132)..(141): n is a, c, g, or t
  misc_feature (143)..(153): n is a, c, g, or t
  misc_feature (161)..(187): n is a, c, g, or t
  misc_feature (189)..(189): n is a, c, g, or t
  misc_feature (517)..(521): n is a, c, g, or t
  Peptide Sequence Number=SeqID_11790
  Probeset Number=SeqID_20147
nnnnnnnnnnnnnnnnnnnnnnnnnnnnnnnnnntngnnnnnnnnnnnnnnnnnnnnnnnnnnaggtnnnnnnnnnnnnnnnnnatnnnnnnngnnnnnnnnnnnnnnnnnnntnnnngnnnnnnnnnnngnnnnnnnnnnannnnnnnnnnncacttcgnnnnnnnnnnnnnnnnnnnnnnnnnnncngcggccgatgcgctgggcgacaagcagaccgccatgcgccacctggaacaggccgccgccaacgagtcggcgccgttcagcacgcaattgcactttgcccgcgtcgcgttcaacggcggctggttcggcgaggccatcgacgcctacaagatggtcctggcgcacgcgtcggccgaccagagcgcccgcgacgaggccgagcgccagctcggcaggctcggaccgcgcgccatccgcggcgcccgcgaaatcctgtcggccggcgatcccaaggcggcctggaacctgctggaccgtgtcgcgcggtcgtggccggggatgccggaannnnn

SEQ ID NO: 5745 - DNA, 169 bp, Zea mays
  Peptide Sequence Number=SeqID_11791
  Probeset Number=SeqID_20148
acaccatctacgacaccggctcgatcctgcgcctggccacccgcctgttcgacctgccgacgctcgacggcctgaaggcgcgcgacgacgccatgaccgcgcgcggccagaagccgatgggtgacctgaccaacgcgctgaccttcagcgcctgatcgccgccgccgac

SEQ ID NO: 5746 - DNA, 169 bp, Zea mays
  Peptide Sequence Number=SeqID_11792
  Probeset Number=SeqID_20149
gtcggcggcggcgatcaggcgctgaaggtcagcgcgttggtcaggtcacccatcggcttctggccgcgcgcggtcatggcgtcgtcgcgcgccttcaggccgtcgagcgtcggcaggtcgaacaggcgggtggccaggcgcaggatcgagccggtgtcgtagatggtgt

SEQ ID NO: 5747 - DNA, 374 bp, Zea mays
  misc_feature (373)..(374): n is a, c, g, or t
  Peptide Sequence Number=SeqID_11793
  Probeset Number=SeqID_20150
gacacctataccgttaccgcgccggacggcgtcaccctggcggtccaggaatcaggaaaccccgacggccccaccctgctcttcattcacggcttgctgggcagtcacttgaactgggaagcgcaggtaaacagcccgcaactacaacgttttcgcatgatcacctacgacctgcgcggccatggcctttcgagcaaacccgccgaagacgcggcctacatcgaaggccgtcgctgggcggatgatctcaatgcggtgataaccgcctcccatgccgacaaacccttactggtcggctggtcgctgggcggcgcagtgatttccaactacctggcccggtacggcgatagccagattgcgggcgcggtgtatnn

SEQ ID NO: 5748 - DNA, 158 bp, Zea mays
  misc_feature (1)..(3): n is a, c, g, or t
  Peptide Sequence Number=SeqID_11794
  Probeset Number=SeqID_20151
nnntgactctggactgcatgcgcgccttcggtgcccaggtggacatcgttgatgaaagcacctggcgcgtggccccgaccggctacaccgcccacgattacctgatcgaacctgacgcttccgccgccacctacttgtgggctgccgaagtgttgacc

SEQ ID NO: 5749 - DNA, 158 bp, Zea mays
  misc_feature (156)..(158): n is a, c, g, or t
  Peptide Sequence Number=SeqID_11795
  Probeset Number=SeqID_20152
ggtcaacacttcggcagcccacaagtaggtggcggcggaagcgtcaggttcgatcaggtaatcgtgggcggtgtagccggtcggggccacgcgccaggtgctttcatcaacgatgtccacctgggcaccgaaggcgcgcatgcagtccagagtcannn

SEQ ID NO: 5750 - DNA, 1076 bp, Zea mays
  misc_feature (1)..(180): n is a, c, g, or t
  misc_feature (187)..(187): n is a, c, g, or t
  misc_feature (189)..(205): n is a, c, g, or t
  misc_feature (207)..(207): n is a, c, g, or t
  misc_feature (209)..(210): n is a, c, g, or t
  misc_feature (215)..(218): n is a, c, g, or t
  misc_feature (223)..(223): n is a, c, g, or t
  misc_feature (233)..(233): n is a, c, g, or t
  misc_feature (235)..(236): n is a, c, g, or t
  misc_feature (240)..(242): n is a, c, g, or t
  misc_feature (244)..(267): n is a, c, g, or t
  misc_feature (274)..(278): n is a, c, g, or t
  misc_feature (342)..(347): n is a, c, g, or t
  misc_feature (363)..(365): n is a, c, g, or t
  misc_feature (1076)..(1076): n is a, c, g, or t
  Peptide Sequence Number=SeqID_11796
  Probeset Number=SeqID_20153
nnnnnnnnnnnnnnnnnnnnnnnnnnnnnnnnnnnnnnnnnnnnnnnnnnnnnnnnnnnnnnnnnnnnnnnnnnnnnnnnnnnnnnnnnnnnnnnnnnnnnnnnnnnnnnnnnnnnnnnnnnnnnnnnnnnnnnnnnnnnnnnnnnnnnnnnnnnnnnnnnnnnnnnnnnnnnnnnnnnnccaaaanannnnnnnnnnnnnnnnntnanngaatnnnnggcantaggtttgangnncgcnnncnnnnnnnnnnnnnnnnnnnnnnnngatgggnnnnntggcaggcgcggcgcacgccgacgataaagtgctgcacgtttataactggtccgactacatcgnnnnnnacaccatcgcgaactnnnaaaaagagtccgggatcaaggtggtctatgacgtgttcgactccaacgaaaccctggaagccaagttgctggcaggcaagtccggttacgacatcgtcgtaccgtcgaacaacttcctcgccaagcagatcaaggccggtgtttaccaggaactggacaagtccaagctgtcgaactacgacaacctgaacaaatccctgcttaaggccgtgtccatcagtgacccgggcaacaagcacgccttcccgtacatgtggggctcgatcggcatcggctacaacccggagaaggtcaaggctgcactgggcatcgacaagatcgactcgtgggacaccatcctcaagccggaaaacctcgccaagttgaaaggctgcggtgtgagcttcctcgattcgccaaccgaaatgctgccagtggcactgcattacctgggcctgccgaccgacacccagaagaaagaagacctcaagcaagccgaggccttgttcctcaaactgcgtccttcgattggctacttccactcgtccaagtacatctccgacctggccaacggcaacatctgcgtagccgtgggttattcgggtgacgtgcaacaggccaagtcccgcgcggctgaagccggtggcaaggtcaaggttgcctacgacattccgaaagaaggcgccggcagcttctatgacatggtcgccatccctaaagatgccgaaaacn

SEQ ID NO: 5751 - DNA, 789 bp, Zea mays
  misc_feature (1)..(1): n is a, c, g, or t
  misc_feature (11)..(16): n is a, c, g, or t
  Peptide Sequence Number=SeqID_11797
  Probeset Number=SeqID_20154
naacgcctgcnnnnnnacggcatcgcgccgccgcaaggcagtagcagcaaacgcagcctgctgggagaaagcccggtgattgcatgcccgcaatgcggcagctctcacaccgaagtgctcagcgaattcggctccaccgcctgcaaggcgctgcaccgctgccgcgactgcctcgaaccgttcgactatttcaagtgcatctgaggggccggcggcccgcttggttggagaacaacaatgagcaaattccatagcctgaccatcaaggatgtgcgcaacgagacccgtgatgcggtgtccatcgccttcgagattccgcagcatctgcaagacagtttccacttcacccagggccagcacctggtgatgcgcacccagctggacggcgaggaagtgcgtcgctcctattcgatctgcaccggggtcaatgacggtgaactgcgcatcgccatcaagcgcgtggccggtgggcggttctccgcgtttgccaatgagcagctcaaggccgggcacagcctggaagtgatgccacccgccgggcatttccatgtagaccttgatccggctcgccacggccattacctggcagtggcggccggcagcggaatcacaccgatcctgtcgatcatcaagaccaccctgcaaaccgagccccacagccgcgtgacgctgctgtacggcaaccgctccagctccggtgcactgtttcgcgaacagctggaagacctgaagaaccgctacctgcagcgcctgaacctgatcttcgtgttcagccgcgagcagcaggat

SEQ ID NO: 5752 - DNA, 321 bp, Zea mays
  misc_feature (1)..(4): n is a, c, g, or t
  misc_feature (320)..(321): n is a, c, g, or t
  Peptide Sequence Number=SeqID_11798
  Probeset Number=SeqID_20155
nnnntacggtttcgccgccaatctgaatgcacaacgcggcgccacgctcctgagggtcgtcgaacagcgcggcgaaggcttcacgcaccgcttcgaattgaagctcgtaatgaccctgaatctgcacctaagccccctcggaaaagtactacaaaaagtggccgacattgttccagccattgagtgatttgtgaacccgcactcgtcgatccggcaccatcaatgacccttgccggaatgcccaccggaatgccctgcgcccggcccggcagcattgccgtcacgccccggtttaccgccttcgccgatgtggaccgcann

SEQ ID NO: 5753 - DNA, 321 bp, Zea mays
  misc_feature (1)..(2): n is a, c, g, or t
  misc_feature (318)..(321): n is a, c, g, or t
  Peptide Sequence Number=SeqID_11799
  Probeset Number=SeqID_20156
nntgcggtccacatcggcgaaggcggtaaaccggggcgtgacggcaatgctgccgggccgggcgcagggcattccggtgggcattccggcaagggtcattgatggtgccggatcgacgagtgcgggttcacaaatcactcaatggctggaacaatgtcggccactttttgtagtacttttccgagggggcttaggtgcagattcagggtcattacgagcttcaattcgaagcggtgcgtgaagccttcgccgcgctgttcgacgaccctcaggagcgtggcgccgcgttgtgcattcagattggcggcgaaaccgtannnn

SEQ ID NO: 5754 - DNA, 856 bp, Zea mays
  misc_feature (1)..(4): n is a, c, g, or t
  misc_feature (644)..(644): n is a, c, g, or t
  misc_feature (697)..(709): n is a, c, g, or t
  misc_feature (745)..(748): n is a, c, g, or t
  misc_feature (759)..(856): n is a, c, g, or t
  Peptide Sequence Number=SeqID_11800
  Probeset Number=SeqID_20157
nnnnatcaacaccggcaagctgaacgctgtttccagcggcggcaaccacggtgatgattcggttctcgccgcacctgccggtccagcgccagtgccaaaagcctgcgcgatcgacgagccggattgcgaagcttgccaataagctgagccggtcccgggcttgaatgcccgggattgaaaagcccgataaaccccgactgcatagggtttatcgggcttttttcgtttatcgcccttaaataaaagcgtacgcaataccctgctttggcgagccgcctcgccgcccccacaactcgacttgcccaccaatcaccgccattgaatgacgatcataggcgacgacacccagcttgccgctcgccagctcactgcttgaagagttcctatagagccccttcagcccaaggcgatccagcgcctcgtggggcatttcgccgttgttcaggctctgcatcgcatgggcaaaacttctttgcgcctcacctggcctgtcgtccagaccatttccttcgatctgtgcacgcttggcactcgctgcgaacatgaaattggcatccgtcagcatcgccggatcatcgcctttaaattgtgcatatttggccgcatcctcgaggtccttcttagacagatcaagctcgaagccntcacgcattttcacgtgatagccgccccccgtctctttcacttccttgaaaannnnnnnnnnnnntctgaccgtaacgcatcatcgccccctttatcgcgnnnnacgggacgcannnnnnnnnnnnnnnnnnnnnnnnnnnnnnnnnnnnnnnnnnnnnnnnnnnnnnnnnnnnnnnnnnnnnnnnnnnnnnnnnnnnnnnnnnnnnnnnnn

SEQ ID NO: 5755 - DNA, 856 bp, Zea mays
  misc_feature (1)..(98): n is a, c, g, or t
  misc_feature (109)..(112): n is a, c, g, or t
  misc_feature (148)..(160): n is a, c, g, or t
  misc_feature (213)..(213): n is a, c, g, or t
  misc_feature (853)..(856): n is a, c, g, or t
  Peptide Sequence Number=SeqID_11801
  Probeset Number=SeqID_20158
nnnnnnnnnnnnnnnnnnnnnnnnnnnnnnnnnnnnnnnnnnnnnnnnnnnnnnnnnnnnnnnnnnnnnnnnnnnnnnnnnnnnnnnnnnnnnnnnnntgcgtcccgtnnnncgcgataaagggggcgatgatgcgttacggtcagannnnnnnnnnnnnttttcaaggaagtgaaagagacggggggcggctatcacgtgaaaatgcgtganggcttcgagcttgatctgtctaagaaggacctcgaggatgcggccaaatatgcacaatttaaaggcgatgatccggcgatgctgacggatgccaatttcatgttcgcagcgagtgccaagcgtgcacagatcgaaggaaatggtctggacgacaggccaggtgaggcgcaaagaagttttgcccatgcgatgcagagcctgaacaacggcgaaatgccccacgaggcgctggatcgccttgggctgaaggggctctataggaactcttcaagcagtgagctggcgagcggcaagctgggtgtcgtcgcctatgatcgtcattcaatggcggtgattggtgggcaagtcgagttgtgggggcggcgaggcggctcgccaaagcagggtattgcgtacgcttttatttaagggcgataaacgaaaaaagcccgataaaccctatgcagtcggggtttatcgggcttttcaatcccgggcattcaagcccgggaccggctcagcttattggcaagcttcgcaatccggctcgtcgatcgcgcaggcttttggcactggcgctggaccggcaggtgcggcgagaaccgaatcatcaccgtggttgccgccgctggaaacagcgttcagcttgccggtgttgatnnnn

SEQ ID NO: 5756 - DNA, 1259 bp, Zea mays
  misc_feature (1)..(5): n is a, c, g, or t
  misc_feature (40)..(47): n is a, c, g, or t
  misc_feature (696)..(703): n is a, c, g, or t
  misc_feature (707)..(707): n is a, c, g, or t
  misc_feature (709)..(710): n is a, c, g, or t
  misc_feature (717)..(719): n is a, c, g, or t
  misc_feature (721)..(733): n is a, c, g, or t
  misc_feature (735)..(741): n is a, c, g, or t
  misc_feature (744)..(750): n is a, c, g, or t
  misc_feature (752)..(757): n is a, c, g, or t
  misc_feature (759)..(759): n is a, c, g, or t
  misc_feature (761)..(761): n is a, c, g, or t
  misc_feature (764)..(785): n is a, c, g, or t
  misc_feature (787)..(802): n is a, c, g, or t
  misc_feature (804)..(811): n is a, c, g, or t
  misc_feature (814)..(833): n is a, c, g, or t
  misc_feature (835)..(850): n is a, c, g, or t
  misc_feature (852)..(865): n is a, c, g, or t
  misc_feature (867)..(869): n is a, c, g, or t
  misc_feature (871)..(899): n is a, c, g, or t
  misc_feature (905)..(907): n is a, c, g, or t
  misc_feature (911)..(965): n is a, c, g, or t
  misc_feature (969)..(977): n is a, c, g, or t
  misc_feature (979)..(1031): n is a, c, g, or t
  misc_feature (1035)..(1052): n is a, c, g, or t
  misc_feature (1056)..(1067): n is a, c, g, or t
  misc_feature (1072)..(1259): n is a, c, g, or t
  Peptide Sequence Number=SeqID_11802
  Probeset Number=SeqID_20159
nnnnnctgccagcgccaggcgatccgccaggcgctcgaannnnnnnngggcagctgggccggcgccgcgcgcgcgcttgaaatcgacgccagcaacctgcacaagctggcgcgccgtcttggcctgaagggctgagacggcgccatccgcgccggctcaggccttgacgtacacccaggcctgcgcgccggacttcaggcgcaccgagacccgcttgtagtcggacacttcgtagcggtcggcggcttcgagctcctggccggtgatctcgaacaccatgcccgccacctcgtcgcgcgggtcgtcgctggcgctgacgatgggatgccgcgccaggccgctggtcttgatcacctcggggtcggtgatctcgacccagcgctgcacgtagcccagcatggcgtcggcccggccgttgagttcgcggccgaagttggcgcgctgcacggccttgtcctgcaaggttccataggagaaaagcagcacgccggtttcgttcatttcaggcacctttgtgtccttcaggaaatatggtgttctccactttacaccagttatcaccgcacgcctgcgctcggacaggccccgggatccggcccgaccgctgtcagcgcccgcgcctgccacacgcacgtttgccggcaagattgtttgtttcaaatgaacgttaggggatatcaccgcagcggactaccnnnnnnnngtgncnnctcgccnnntnnnnnnnnnnnnnannnnnnntgnnnnnnncnnnnnncnancannnnnnnnnnnnnnnnnnnnnnannnnnnnnnnnnnnnnannnnnnnngannnnnnnnnnnnnnnnnnnnannnnnnnnnnnnnnnnannnnnnnnnnnnnngnnnannnnnnnnnnnnnnnnnnnnnnnnnnnnnacgcgnnntgannnnnnnnnnnnnnnnnnnnnnnnnnnnnnnnnnnnnnnnnnnnnnnnnnnnnnncccnnnnnnnnncnnnnnnnnnnnnnnnnnnnnnnnnnnnnnnnnnnnnnnnnnnnnnnnnnnnnnaaannnnnnnnnnnnnnnnnncccnnnnnnnnnnnnggggnnnnnnnnnnnnnnnnnnnnnnnnnnnnnnnnnnnnnnnnnnnnnnnnnnnnnnnnnnnnnnnnnnnnnnnnnnnnnnnnnnnnnnnnnnnnnnnnnnnnnnnnnnnnnnnnnnnnnnnnnnnnnnnnnnnnnnnnnnnnnnnnnnnnnnnnnnnnnnnnnnnnnnnnnnnnnnnnnnnnnnnnnnnn

SEQ ID NO: 5757 - DNA, 1259 bp, Zea mays
  misc_feature (1)..(188): n is a, c, g, or t
  misc_feature (193)..(204): n is a, c, g, or t
  misc_feature (208)..(225): n is a, c, g, or t
  misc_feature (229)..(281): n is a, c, g, or t
  misc_feature (283)..(291): n is a, c, g, or t
  misc_feature (295)..(349): n is a, c, g, or t
  misc_feature (353)..(355): n is a, c, g, or t
  misc_feature (361)..(389): n is a, c, g, or t
  misc_feature (391)..(393): n is a, c, g, or t
  misc_feature (395)..(408): n is a, c, g, or t
  misc_feature (410)..(425): n is a, c, g, or t
  misc_feature (427)..(446): n is a, c, g, or t
  misc_feature (449)..(456): n is a, c, g, or t
  misc_feature (458)..(473): n is a, c, g, or t
  misc_feature (475)..(496): n is a, c, g, or t
  misc_feature (499)..(499): n is a, c, g, or t
  misc_feature (501)..(501): n is a, c, g, or t
  misc_feature (503)..(508): n is a, c, g, or t
  misc_feature (510)..(516): n is a, c, g, or t
  misc_feature (519)..(525): n is a, c, g, or t
  misc_feature (527)..(539): n is a, c, g, or t
  misc_feature (541)..(543): n is a, c, g, or t
  misc_feature (550)..(551): n is a, c, g, or t
  misc_feature (553)..(553): n is a, c, g, or t
  misc_feature (557)..(564): n is a, c, g, or t
  misc_feature (1213)..(1220): n is a, c, g, or t
  misc_feature (1255)..(1259): n is a, c, g, or t
  Peptide Sequence Number=SeqID_11803
  Probeset Number=SeqID_20160
nnnnnnnnnnnnnnnnnnnnnnnnnnnnnnnnnnnnnnnnnnnnnnnnnnnnnnnnnnnnnnnnnnnnnnnnnnnnnnnnnnnnnnnnnnnnnnnnnnnnnnnnnnnnnnnnnnnnnnnnnnnnnnnnnnnnnnnnnnnnnnnnnnnnnnnnnnnnnnnnnnnnnnnnnnnnnnnnnnnnnnnnnnnnccccnnnnnnnnnnnngggnnnnnnnnnnnnnnnnnntttnnnnnnnnnnnnnnnnnnnnnnnnnnnnnnnnnnnnnnnnnnnnnnnnnnnnngnnnnnnnnngggnnnnnnnnnnnnnnnnnnnnnnnnnnnnnnnnnnnnnnnnnnnnnnnnnnnnnnntcannncgcgtnnnnnnnnnnnnnnnnnnnnnnnnnnnnntnnncnnnnnnnnnnnnnntnnnnnnnnnnnnnnnntnnnnnnnnnnnnnnnnnnnntcnnnnnnnntnnnnnnnnnnnnnnnntnnnnnnnnnnnnnnnnnnnnnntgntngnnnnnngnnnnnnncannnnnnntnnnnnnnnnnnnnannnggcgagnngncacnnnnnnnnggtagtccgctgcggtgatatcccctaacgttcatttgaaacaaacaatcttgccggcaaacgtgcgtgtggcaggcgcgggcgctgacagcggtcgggccggatcccggggcctgtccgagcgcaggcgtgcggtgataactggtgtaaagtggagaacaccatatttcctgaaggacacaaaggtgcctgaaatgaacgaaaccggcgtgctgcttttctcctatggaaccttgcaggacaaggccgtgcagcgcgccaacttcggccgcgaactcaacggccgggccgacgccatgctgggctacgtgcagcgctgggtcgagatcaccgaccccgaggtgatcaagaccagcggcctggcgcggcatcccatcgtcagcgccagcgacgacccgcgcgacgaggtggcgggcatggtgttcgagatcaccggccaggagctcgaagccgccgaccgctacgaagtgtccgactacaagcgggtctcggtgcgcctgaagtccggcgcgcaggcctgggtgtacgtcaaggcctgagccggcgcggatggcgccgtctcagcccttcaggccaagacggcgcgccagcttgtgcaggttgctggcgtcgatttcaagcgcgcgcgcggcgccggcccagctgcccnnnnnnnnttcgagcgcctggcggatcgcctggcgctggcagnnnnn

SEQ ID NO: 5758 - DNA, 745 bp, Zea mays
  misc_feature (1)..(1): n is a, c, g, or t
  misc_feature (7)..(8): n is a, c, g, or t
  misc_feature (745)..(745): n is a, c, g, or t
  Peptide Sequence Number=SeqID_11804
  Probeset Number=SeqID_20161
ngcgccnnaagtgttccagccggcgccgtcgaaactgcgggatggctgctatttggccatcgtcctgctgatctgcgcgatcctgttgctggtgttcggcatggcggtctactcgtcgctggtgaagttctggccctacaacctgtcgctgtccctggcccactaccagttcgaggacacggccggcggcggttggctggcctaccgcaacagcatcaccatggccctgtgcaccgcgttgatcggcagcgtgctgatctttaccggcgcctacctgatggaaaagaccaagggccagaagggcctgaacctggcgctgcgcatgctcagcttcgtgccgatggcggtgccagggttggtgctgggcctgggctacgtgttctttttcaacctcaacggcaacccgctgcatgtgctctacggcaccatgacgctgctggtggtgtgcaccattgctcactatttgaccaccgcacaaatgaccgccaccacggccctgcgtcagttggacgccgagttcgaagccgccgcattgtccctcaaggcgccgctgtaccggcattacctgcgggtcaccgtgccgatctgcctgccggcgctgctggacatcgtgcgctacctgttcgtctcggcgatgaccaccgtctccgccgcgatcttcctctacagccccgacaccatcctcgcggcagttgccgtgctgaacatggacgacgccggcaacgtcggcggcgcggcggcgatn

SEQ ID NO: 5759 - DNA, 583 bp, Zea mays
  misc_feature (1)..(3): n is a, c, g, or t
  misc_feature (509)..(512): n is a, c, g, or t
  misc_feature (516)..(524): n is a, c, g, or t
  misc_feature (531)..(539): n is a, c, g, or t
  misc_feature (544)..(576): n is a, c, g, or t
  misc_feature (581)..(583): n is a, c, g, or t
  Peptide Sequence Number=SeqID_11805
  Probeset Number=SeqID_20162
nnngccgccccgcacccatttgcgcgcgaaggcggcgccgtccggacagcggtacagcaccagccgggtctgccgcgcgccgtccctgacgacccagtgctcctcgcggtagcgctcggcgccgccgtgcgcggcataggcgtagcccaggtaatgttcgttggccgcctgggcgcccagcggtgccagcggcaggatcagggcaagcagcagagccagcggcaggtcggggcgcatggtcattctcctggagagggcgcgcaggggcgggccacgaaggcggcgatgtcgtccagcaccggcgcgcgccagcgcaggggccgcgccagcgcgccgaccagcagcttgtggccgaggccggggtactcgaccaggcgcgcgcaggcccccgcggcgcgcagggtgcgcgccagggcggcgctgttgcgttgcgggtccacctcggtgtcggcggcgccggtcaacagcaggcccggcggggccgcggcgctggcgtggcggatgggctnnnnatcnnnnnnnnngtcgggnnnnnnnnnatgcnnnnnnnnnnnnnnnnnnnnnnnnnnnnnnnnncgatnnn

SEQ ID NO: 5760 - DNA, 583 bp, Zea mays
  misc_feature (1)..(3): n is a, c, g, or t
  misc_feature (8)..(40): n is a, c, g, or t
  misc_feature (45)..(53): n is a, c, g, or t
  misc_feature (60)..(68): n is a, c, g, or t
  misc_feature (72)..(75): n is a, c, g, or t
  misc_feature (581)..(583): n is a, c, g, or t
  Probeset Number=SeqID_20163
nnnatcgnnnnnnnnnnnnnnnnnnnnnnnnnnnnnnnnngcatnnnnnnnnncccgacnnnnnnnnngatnnnnagcccatccgccacgccagcgccgcggccccgccgggcctgctgttgaccggcgccgccgacaccgaggtggacccgcaacgcaacagcgccgccctggcgcgcaccctgcgcgccgcgggggcctgcgcgcgcctggtcgagtaccccggcctcggccacaagctgctggtcggcgcgctggcgcggcccctgcgctggcgcgcgccggtgctggacgacatcgccgccttcgtggcccgcccctgcgcgccctctccaggagaatgaccatgcgccccgacctgccgctggctctgctgcttgccctgatcctgccgctggcaccgctgggcgcccaggcggccaacgaacattacctgggctacgcctatgccgcgcacggcggcgccgagcgctaccgcgaggagcactgggtcgtcagggacggcgcgcggcagacccggctggtgctgtaccgctgtccggacggcgccgccttcgcgcgcaaatgggtgcggggcggcnnn

SEQ ID NO: 5761 - DNA, 939 bp, Zea mays
  misc_feature (1)..(205): n is a, c, g, or t
  misc_feature (233)..(237): n is a, c, g, or t
  misc_feature (935)..(939): n is a, c, g, or t
  Peptide Sequence Number=SeqID_11806
  Probeset Number=SeqID_20164
nnnnnnnnnnnnnnnnnnnnnnnnnnnnnnnnnnnnnnnnnnnnnnnnnnnnnnnnnnnnnnnnnnnnnnnnnnnnnnnnnnnnnnnnnnnnnnnnnnnnnnnnnnnnnnnnnnnnnnnnnnnnnnnnnnnnnnnnnnnnnnnnnnnnnnnnnnnnnnnnnnnnnnnnnnnnnnnnnnnnnnnnnnnnnnnnnnnnnnnnnnnnntgcggtcaatgtgagggcgccgtttttnnnnntgcaggaagccttgaagctgatgatcagccagagggttgaaggtgcagtggtcaatatccagagtgtcaccggccacggcgggcaatcgttcttgagtgcctacgcggcgtccaagggcgctctcgcgattctgaccaaaaacgtggcgttcagcgccctgcgcaaccggattcgggtcaacggcttgaacatcggctggatggacacacctcacgaggatgaaatccagcggcactaccacggtgccggggatggctggttggaggccgccgaagccgcgcagcccttcggccgcctgctcaaacctgaagaggtggcccagagcgtggcatttctattgtcacgcgagtcgggaatgatgaccggcacggtgatcgacctggagcaaggcgtcatcggctgtggcgacggcggcaccccacgccccgatcaggccctgagcctggtggagggtgcgtgatgcctgcctttgtcagcgccgacgcagtgcaactggaagattttcactcgatctgtgcccagcaggcggctgccgaggactacccgcactgcgccgaagtgtgcagcaacatcccgatctatcaagcccaggcactgcgcaacggcgatcatcacgccgtgctggacgaactgcatcgcctgttcagccaggggccgggagtgatggtggtgcgccagggctacgccgacctggacnnnnn

SEQ ID NO: 5762 - DNA, 446 bp, Zea mays
  misc_feature (444)..(446): n is a, c, g, or t
  Peptide Sequence Number=SeqID_11807
  Probeset Number=SeqID_20165
gacctgctcgaccagaaataccatcgctacctgctggtgttttcaaccttgttggtggcgctgctgctgtacctggcgattcgcctgttgcgcagtttcgccgagatcaaccgggtcaaccgggctttgcatgtggtcaacgaaaaccttgagcaacgcgtcgaggagcgtacccgggaactcaaggatgcccagggtgaactcctagacagcgcccgccaggccggcatggcggaaattgccaccaacgtgctgcacaacgtcggcaacgtactcaacagcgtgaatatctccgccgagctggtgacgcgcaagctgcgcaccagcaaggcgctggggctgggcaaggccatgcagttgatcaacgagcaccgccgcgacctggggacctttctcaccgagaatgaaaaaggcaagttgttgcccgattacctgaaccagttnnn

SEQ ID NO: 5763 - DNA, 915 bp, Zea mays
  misc_feature (1)..(53): n is a, c, g, or t
  misc_feature (56)..(65): n is a, c, g, or t
  misc_feature (68)..(75): n is a, c, g, or t
  misc_feature (81)..(84): n is a, c, g, or t
  misc_feature (86)..(87): n is a, c, g, or t
  misc_feature (90)..(90): n is a, c, g, or t
  misc_feature (105)..(106): n is a, c, g, or t
  misc_feature (116)..(117): n is a, c, g, or t
  misc_feature (145)..(148): n is a, c, g, or t
  misc_feature (913)..(915): n is a, c, g, or t
  Peptide Sequence Number=SeqID_11808
  Probeset Number=SeqID_20166
nnnnnnnnnnnnnnnnnnnnnnnnnnnnnnnnnnnnnnnnnnnnnnnnnnnnntcnnnnnnnnnncgnnnnnnnnctgctnnnncnnatngagacccgtgcccgnngcccagggtnngaaaacgttgttcgtgctgacgacccgnnnngcccactggttccgcgagcgtgggtttgtgccgagtacggtggatcgcctgccgtcggcgcgggcgtcgctgtacaactatcagcgtaactcgaagattttcgaaaaggcgttgtaagcgtgactggacgagagggcaaacctctcgtctgtcagttctgcgtgtttttcaatcgcgactatgctgaccggtcttccagccggattgtcgatttgtcgatacgatcgacattaaagtgacatcatttctgccgatactctgaaacatgccgatacggtaaccgtcatgatcgcccgttagggtgaggtggttcggtgaaatgacaaaagaaagtttcatcgatacaaaaactgtaacaaattgacgagacgataggcatttggccatgatggcgtcgcgtttttgatcgcgcatgacgtatgacccgtctggggaatacaaaacgatctaaaaaagcgtggagaaatactcttcaggaataccccaatggagttttaccgcctcttcggcttgatagcccatggacagtcttattcctgaatcgtatgaaaaaggatgaaacaattctttttgggtgtatgaaaaactcattaccctgcaaggaccaaatcaactgcggttagacgaaggtagtagacacacaaggttacgattgacttgtcagtcactatctggcgctaatcgcgcatctgtggatcgagggcgtcagacccgagacctaagaaatacaaaaattagaaatgagaggagcggtacatgaagaannn

SEQ ID NO: 5764 - DNA, 332 bp, Zea mays
  misc_feature (1)..(4): n is a, c, g, or t
  Peptide Sequence Number=SeqID_11809
  Probeset Number=SeqID_20167
nnnngcggcagcggcgccaccggcaacagcggccaggccgcgatgccgaccagcaggatcgccagcgccagcagcgaggtgccgatcggccgcttgatgaaattcgctgagatgctcactggccgcctcccgccgccgcggccagctcacgcaccttgctgccgggcttgagtttgtattggccgtccaccaccacgcgctggccggcgtccagcccctgctggatcacggccaggccgtcctgcatgcgctccaccttgaccggccgcggctgcgccacgccggcgccatccaccacgtacacgaaggtatcggactggccgcgctgcacc

SEQ ID NO: 5765 - DNA, 332 bp, Zea mays
  misc_feature (329)..(332): n is a, c, g, or t
  Peptide Sequence Number=SeqID_11810
  Probeset Number=SeqID_20168
ggtgcagcgcggccagtccgataccttcgtgtacgtggtggatggcgccggcgtggcgcagccgcggccggtcaaggtggagcgcatgcaggacggcctggccgtgatccagcaggggctggacgccggccagcgcgtggtggtggacggccaatacaaactcaagcccggcagcaaggtgcgtgagctggccgcggcggcgggaggcggccagtgagcatctcagcgaatttcatcaagcggccgatcggcacctcgctgctggcgctggcgatcctgctggtcggcatcgcggcctggccgctgttgccggtggcgccgctgccgcnnnn

SEQ ID NO: 5766 - DNA, 629 bp, Zea mays
  misc_feature (1)..(4): n is a, c, g, or t
  misc_feature (440)..(452): n is a, c, g, or t
  misc_feature (454)..(474): n is a, c, g, or t
  misc_feature (478)..(526): n is a, c, g, or t
  misc_feature (529)..(589): n is a, c, g, or t
  misc_feature (591)..(591): n is a, c, g, or t
  misc_feature (593)..(593): n is a, c, g, or t
  misc_feature (595)..(629): n is a, c, g, or t
  Peptide Sequence Number=SeqID_11811
  Probeset Number=SeqID_20169
nnnnaaggcctggagtaggggtgagtcgcacctgcctgtggatacttgttccgtcatggaaatcaccttgctgcaaaagaggttgggggagggcgtccttgctgaggcctcctacacatcgggcaacaaattatgcttaatgataatgattgtcaaatgagaaggcgaactaatcttatgctttatcgagaggtgtgaacggcgtctcgctgactaattatttccaggggccatccgttctcatgggtgacaggccagttaacaaaccggccaaggatcagcgcctggaggaggacaaaatgggtttttatcgtgtgagcgggagtggtctgaaatgaacacgccggctcgattacgcctgttttgcctgccgtattccggcgccagcgccatggtctacagccgttggcggcgggcgttgcccgagtggttgcaggtgnnnnnnnnnnnnnannnnnnnnnnnnnnnnnnnnnctgnnnnnnnnnnnnnnnnnnnnnnnnnnnnnnnnnnnnnnnnnnnnnnnnnccnnnnnnnnnnnnnnnnnnnnnnnnnnnnnnnnnnnnnnnnnnnnnnnnnnnnnnnnnnnnnancncnnnnnnnnnnnnnnnnnnnnnnnnnnnnnnnnnnn

SEQ ID NO: 5767 - DNA, 629 bp, Zea mays
  misc_feature (1)..(35): n is a, c, g, or t
  misc_feature (37)..(37): n is a, c, g, or t
  misc_feature (39)..(39): n is a, c, g, or t
  misc_feature (41)..(101): n is a, c, g, or t
  misc_feature (104)..(152): n is a, c, g, or t
  misc_feature (156)..(176): n is a, c, g, or t
  misc_feature (178)..(190): n is a, c, g, or t
  misc_feature (626)..(629): n is a, c, g, or t
  Peptide Sequence Number=SeqID_11812
  Probeset Number=SeqID_20170
nnnnnnnnnnnnnnnnnnnnnnnnnnnnnnnnnnngngntnnnnnnnnnnnnnnnnnnnnnnnnnnnnnnnnnnnnnnnnnnnnnnnnnnnnnnnnnnnnnggnnnnnnnnnnnnnnnnnnnnnnnnnnnnnnnnnnnnnnnnnnnnnnnnncagnnnnnnnnnnnnnnnnnnnnntnnnnnnnnnnnnncacctgcaaccactcgggcaacgcccgccgccaacggctgtagaccatggcgctggcgccggaatacggcaggcaaaacaggcgtaatcgagccggcgtgttcatttcagaccactcccgctcacacgataaaaacccattttgtcctcctccaggcgctgatccttggccggtttgttaactggcctgtcacccatgagaacggatggcccctggaaataattagtcagcgagacgccgttcacacctctcgataaagcataagattagttcgccttctcatttgacaatcattatcattaagcataatttgttgcccgatgtgtaggaggcctcagcaaggacgccctcccccaacctcttttgcagcaaggtgatttccatgacggaacaagtatccacaggcaggtgcgactcacccctactccaggccttnnnn

SEQ ID NO: 5768 - DNA, 770 bp, Zea mays
  misc_feature (1)..(1): n is a, c, g, or t
  misc_feature (4)..(8): n is a, c, g, or t
  misc_feature (10)..(17): n is a, c, g, or t
  misc_feature (20)..(21): n is a, c, g, or t
  misc_feature (25)..(30): n is a, c, g, or t
  misc_feature (37)..(41): n is a, c, g, or t
  misc_feature (43)..(45): n is a, c, g, or t
  misc_feature (61)..(65): n is a, c, g, or t
  misc_feature (71)..(75): n is a, c, g, or t
  misc_feature (94)..(96): n is a, c, g, or t
  misc_feature (105)..(107): n is a, c, g, or t
  misc_feature (147)..(149): n is a, c, g, or t
  Peptide Sequence Number=SeqID_11813
  Probeset Number=SeqID_20171
ncannnnncnnnnnnnnctnngatnnnnnnctgcagnnnnncnnntccggcgccgatgacnnnnngctcannnnngtttgcgctgtcggaattnnncgcgcgtannnaagcggtgctgcgccgtgcccagggcggcggtcgccggannntgcaggtcggtgatctgaattatgacctcgacaccctggaagtcacccgcgaagggcgcttgctcaagctcaacccggttggcctgaagctgttggcggtgctgatgcaaaagagccctcacgtattgcgccgtgaaattctcgaagaagccctgtggggcgatgactgcccggacagcgacagcttgcgcagccatgtccatcaactgcgtcaggtaattgataaacccttcgccaaaccgttgctgcaaacggttcacggtgtgggttatcgcctggccgagggtcgtgatggagtttaagcaaagccttgcccagcggatcatcatcgccttcgccttgatgagcgcgttggtggcgggggccttcgccatgggcatcgtcgccacggtgcacctggtggaagaaaagctcatttcggcgggcctgggcggtgacttgcaacgcctgctgctgatggacagcgtcgaggactggagccaccgtcccgagcccgaccaattgttctacttcagcggcggccctggcgattttgagttgcccaaggacttgcgccatctcgacgccggtttccatgaggtattccgcgaacagctttcctaccacgcgatggtcgaaatc

SEQ ID NO: 5769 - DNA, 956 bp, Zea mays
  misc_feature (1)..(127): n is a, c, g, or t
  misc_feature (129)..(129): n is a, c, g, or t
  misc_feature (132)..(144): n is a, c, g, or t
  misc_feature (151)..(155): n is a, c, g, or t
  misc_feature (166)..(166): n is a, c, g, or t
  misc_feature (168)..(171): n is a, c, g, or t
  misc_feature (174)..(181): n is a, c, g, or t
  misc_feature (183)..(189): n is a, c, g, or t
  misc_feature (192)..(193): n is a, c, g, or t
  misc_feature (200)..(204): n is a, c, g, or t
  misc_feature (207)..(211): n is a, c, g, or t
  misc_feature (222)..(224): n is a, c, g, or t
  misc_feature (238)..(239): n is a, c, g, or t
  misc_feature (243)..(243): n is a, c, g, or t
  Peptide Sequence Number=SeqID_11814
  Probeset Number=SeqID_20172
nnnnnnnnnnnnnnnnnnnnnnnnnnnnnnnnnnnnnnnnnnnnnnnnnnnnnnnnnnnnnnnnnnnnnnnnnnnnnnnnnnnnnnnnnnnnnnnnnnnnnnnnnnnnnnnnnnnnnnnnnnnnnnncnaannnnnnnnnnnnngtggagnnnnngcccgccctgntnnnnttnnnnnnnnannnnnnntgnnttatatnnnnngcnnnnnaaaaatcatcnnngttgactgtgattnnttcnacgccgccatcgagatgcgcgacgacccgaccctggcgcaaaagcccctggcggttggcggttcggcagaccgtcgcggcgtgatcgctacctgcaactatgaagcacgggcctacggtgtgcgttcggccatgtcgtcccggcacgccttgaagctgtgcccggacctgaccatcgtcaagccgcgcatggatgcctataaagaagcctccaaggaaatccagacgatctttcgtgactacaccgacctgatcgagccgttgtccctggacgaagcctacctggacgtctctgacagcccgcatttcggcggcagtgccacgcgcattgcccaggacattcgccggcgggtctccaaccaattgcatatcaccgtttctgcgggcgtggcgccgaacaagtttctcgccaagatcgccagcgactggaaaaagcccaacggactgtttgtgatcacccccgatcaggtggaagactttgtctcggcgctgccggtgaaaaagctccatggcgtgggcaaggtaacggccgacaagctgacgcggctggggatcgaagactgcctgcaactgcgagagtggaacaagctggctctggtgcgtgaatttggaagcttcggcgagcggctttggagcctggcccgtgggattgatgaccgtgtggtgcagaacgacagccgccggcaatccatcagcgttgaaaacacctacgaa

SEQ ID NO: 5770 - DNA, 919 bp, Zea mays
  misc_feature (1)..(4): n is a, c, g, or t
  misc_feature (9)..(12): n is a, c, g, or t
  misc_feature (15)..(21): n is a, c, g, or t
  misc_feature (25)..(32): n is a, c, g, or t
  misc_feature (34)..(46): n is a, c, g, or t
  misc_feature (48)..(48): n is a, c, g, or t
  misc_feature (51)..(55): n is a, c, g, or t
  misc_feature (57)..(73): n is a, c, g, or t
  misc_feature (75)..(77): n is a, c, g, or t
  misc_feature (80)..(81): n is a, c, g, or t
  misc_feature (86)..(89): n is a, c, g, or t
  misc_feature (96)..(100): n is a, c, g, or t
  misc_feature (104)..(117): n is a, c, g, or t
  misc_feature (122)..(133): n is a, c, g, or t
  misc_feature (140)..(143): n is a, c, g, or t
  misc_feature (151)..(152): n is a, c, g, or t
  misc_feature (155)..(156): n is a, c, g, or t
  misc_feature (161)..(164): n is a, c, g, or t
  misc_feature (171)..(171): n is a, c, g, or t
  misc_feature (919)..(919): n is a, c, g, or t
  Peptide Sequence Number=SeqID_11815
  Probeset Number=SeqID_20173
nnnncagannnnttnnnnnnnagannnnnnnnannnnnnnnnnnnnanggnnnnngnnnnnnnnnnnnnnnnngnnnacnnggtgnnnngcgccgnnnnnggcnnnnnnnnnnnnnngctgnnnnnnnnnnnngtgacgnnnnccaacctnntgnntattnnnntggaccntgaacacgtgaccacccagtgcgccctgatcgaaggcgccctggaggccaagcctctgcttgccatcgtggccttgggcgatggcatggacaaccagcttgtgctgaacgcgatgcgtgccggtgcgcgggatttcgtcgcctacggctcgcgcgccagtgaggttgccggcctggttcggcgcctgagcaaacgcttgccggccgttaccccgaatgcccacttgggcgggctgaccgtactctacggcacccaaggcaatgccgacggtgcgctgatcgccagccacctggcgttggtggtgcaaaaaagcgggcagcaaacgttgttgctcgacctgggcctgcctctcgctgacagcctggcgctgctggggctcgaaagctctttccatttcggcgacgccctgcgccacttgcgacgcctggactccaccctgatcaacagcgccttcacctcggccgaagccggcctgcgcattctcgcctatcacaataacgatgagccgctggaccgcaccagtgcagccgagctgtacatgttgctcagtgccctgcgccagcacttccagcacatcgtggtgaacctgaccggccaacccgacagcgaagccttgcgcacctttgtcagccattgcgacaaactattgtggtgtaccgaccaaagcgtaccggactgccgccgtaacctggcggtactcaacctgtggcgagaaaaaggcatgaagctggaccatgcccggctgctn

SEQ ID NO: 5771 - DNA, 914 bp, Zea mays
  misc_feature (1)..(4): n is a, c, g, or t
  misc_feature (744)..(745): n is a, c, g, or t
  misc_feature (748)..(749): n is a, c, g, or t
  misc_feature (797)..(800): n is a, c, g, or t
  misc_feature (802)..(813): n is a, c, g, or t
  misc_feature (820)..(821): n is a, c, g, or t
  misc_feature (823)..(827): n is a, c, g, or t
  misc_feature (833)..(834): n is a, c, g, or t
  misc_feature (837)..(838): n is a, c, g, or t
  misc_feature (846)..(848): n is a, c, g, or t
  misc_feature (850)..(857): n is a, c, g, or t
  misc_feature (866)..(867): n is a, c, g, or t
  misc_feature (876)..(914): n is a, c, g, or t
  Peptide Sequence Number=SeqID_11816
  Probeset Number=SeqID_20174
nnnnatagcacgaggcgatgacccacgcgcggtcgtccagggtgggttcgctggcttcaatcgcggcggcaaacacctggttctgacgggcgtcgaaatcttcatacagcgccgccagcagccccgcgcgatcgccaaaatggtcatacaccaccggctttgtaacgccggccaactcagccaggtgccccagggtcagggcatcggtgccttcttctcgcaccagttgccaggccacgtcgagcaactggcgcaaccggtcatcccgggacaggcggcggcgaggggcaggggattgatcgcttgacatgcttatataccaaaagtaacttaccaacggtaacttagctcaagcctactcaatttgccttctcatcgctaccccgacggagtcaccgccatgcacgcgctgatcgttgttgctcaccacgactcacactccctgacccacagcctcgccaaacaggccgccgccggcataactgccgccggccacacctttgaaatcgccgacctcgccgctgaaggtttcgacccgcgttacaacgccgccgaccataaagtgcatcgcacccgcgccacgccgccggccgacgtactggccgaacaggcccgactcgaccgcgccgacgccttggtgctggtgttcccgatcttctggtggtcgatgccggccttgctcaagggctggatcgaccgggtattcgtcaacggttgggcgatcgactacagccttgagacganngtnntgaaaaagctcggccacttgcaggtgcacttgctgggcgtcggcgggnnnnannnnnnnnnnnntgaacgnnannnnnatgccnncgnnatgcgtannnannnnnnnnacgggatcnntgattactnnnnnnnnnnnnnnnnnnnnnnnnnnnnnnnnnnnnnnn

SEQ ID NO: 5772 - DNA, 955 bp, Zea mays
  misc_feature (1)..(11): n is a, c, g, or t
  misc_feature (14)..(15): n is a, c, g, or t
  misc_feature (17)..(17): n is a, c, g, or t
  misc_feature (23)..(36): n is a, c, g, or t
  misc_feature (38)..(47): n is a, c, g, or t
  misc_feature (49)..(61): n is a, c, g, or t
  misc_feature (68)..(72): n is a, c, g, or t
  misc_feature (74)..(78): n is a, c, g, or t
  misc_feature (81)..(90): n is a, c, g, or t
  misc_feature (92)..(94): n is a, c, g, or t
  misc_feature (97)..(97): n is a, c, g, or t
  misc_feature (100)..(100): n is a, c, g, or t
  misc_feature (104)..(110): n is a, c, g, or t
  misc_feature (112)..(117): n is a, c, g, or t
  misc_feature (123)..(124): n is a, c, g, or t
  misc_feature (127)..(128): n is a, c, g, or t
  misc_feature (135)..(137): n is a, c, g, or t
  misc_feature (141)..(141): n is a, c, g, or t
  misc_feature (143)..(143): n is a, c, g, or t
  misc_feature (145)..(149): n is a, c, g, or t
  misc_feature (954)..(955): n is a, c, g, or t
  Peptide Sequence Number=SeqID_11817
  Probeset Number=SeqID_20175
nnnnnnnnnnnaanncncaaaannnnnnnnnnnnnncnnnnnnnnnnannnnnnnnnnnnnaggggtnnnnngnnnnnaannnnnnnnnnannnggngcngatnnnnnnncnnnnnngagttnnccnncgggttnnnactnantnnnnnacagcggttttcagtagcctttttcctttgcctatccaaaggaatgcccccatgcaggatgcccccgctgttactcccgcctcatctttagacgacaacaatgagttcattcgccaggctattccagactggttggtgcaagcgccggcccaccggatagtcgcgctgaaacaggccaggctcgaacaggcgcagtggacagacagcttatcgccgctgcagcgaagaacgttgaaggcgttcaatgaaaccagtttcaaatctcagcacgctgtggataaacacttggcaaatatccaggcactcatgccgttcgccacaggcctgctcaacagcgcgctgaaagaacaattcaacatcagcgtggatgtcgaaggcacctatcttcgtttgtatgagccactgaagctcggcaagctgggggtcaaggccggcgaatacaaagtactcgaggtttcactgatacaggccaccctgcataactttgaagccagcgaaggtgaagacggcgcatttgatcccgcctccgggtttacccaacacccggactgggagggtgcgtctcccacgatcagccagacgctgagcgtgcccgcctttatcaggttgtgccgcacactggacgtgggtgcccgctaccaggctcacctcaaggaagtattactgcccaccgacgaagctgtggccgctcggttgcgcgacgccgtgatcaccagccagaaagacgccctcagggccgcggcgtacctggcgttgctcaagcaggatattcgcccggatgatttcgtcatggtgcttaaggttnn

SEQ ID NO: 5773 - DNA, 587 bp, Zea mays
  misc_feature (1)..(5): n is a, c, g, or t
  Peptide Sequence Number=SeqID_11818
  Probeset Number=SeqID_20176
nnnnnctattggaaaggtattgccgcgtacaacgctgccgactacgacctggccctggcgacctttgcccaactcgacaccgcacaggccgcgttctaccgcggcaatatccacgtgcgtcgcttcaagttcgacgatgccattgccgcctaccagcaggcgttgcaacaacagccgcagtttcccgaagccagcgccaacctggccctggctctggcgctgaagaaagacactgaaaacgcctcggacaatgcccccgaggtgaagcccgacgcggtcaagttcgacaaggcggccggcaagggcaagagcaaggcaatccagacagaacaggcaagcaacgatgccttgtggttgcagaacctgacgacgtcccccgcgaacttcttgcgccgcaagttcagccttcaagaccagggagcccagccatgaatcggctctgctggctgttgctgctgatcgccggcccgttgtgggcggccgaaccgcaactgcgagtgcaggcgcaactggtgcccggtaataacgtagtggtgggcgagcaagtgcaattgcaggtcgatgtgttgaccgacacctggttcacc

SEQ ID NO: 5774 - DNA, 587 bp, Zea mays
  misc_feature (583)..(587): n is a, c, g, or t
  Peptide Sequence Number=SeqID_11819
  Probeset Number=SeqID_20177
ggtgaaccaggtgtcggtcaacacatcgacctgcaattgcacttgctcgcccaccactacgttattaccgggcaccagttgcgcctgcactcgcagttgcggttcggccgcccacaacgggccggcgatcagcagcaacagccagcagagccgattcatggctgggctccctggtcttgaaggctgaacttgcggcgcaagaagttcgcgggggacgtcgtcaggttctgcaaccacaaggcatcgttgcttgcctgttctgtctggattgccttgctcttgcccttgccggccgccttgtcgaacttgaccgcgtcgggcttcacctcgggggcattgtccgaggcgttttcagtgtctttcttcagcgccagagccagggccaggttggcgctggcttcgggaaactgcggctgttgttgcaacgcctgctggtaggcggcaatggcatcgtcgaacttgaagcgacgcacgtggatattgccgcggtagaacgcggcctgtgcggtgtcgagttgggcaaaggtcgccagggccaggtcgtagtcggcagcgttgtacgcggcaatacctttccaatagnnnnn

SEQ ID NO: 5775 - DNA, 341 bp, Zea mays
  Peptide Sequence Number=SeqID_11820
  Probeset Number=SeqID_20178
gacctgacggtcgagggcgaagtctcgacccacagctacggccacggcgtcaaacccggcctgcgcctgtccgccgcctacgacatcgacgaccactggcaggtgggcggctcgggcgaactgctgtcgcgcgagaccccgctgcgggccttgaccaacgacatcaccgccaaccgcctcaccggcttcgtgcgctggcgcgccaacgagcggcgcgaatggaccctgtcgctgtcgccgtcgcgcttttccgacggcaaccagcgctgggaactggggctggacgggcgcgagcgcgtctacaccgcgccgcacctgaaggccgacctgacgctggacct

SEQ ID NO: 5776 - DNA, 856 bp, Zea mays
  misc_feature (1)..(2): n is a, c, g, or t
  misc_feature (740)..(741): n is a, c, g, or t
  misc_feature (759)..(760): n is a, c, g, or t
  misc_feature (777)..(778): n is a, c, g, or t
  misc_feature (783)..(791): n is a, c, g, or t
  misc_feature (796)..(799): n is a, c, g, or t
  misc_feature (818)..(818): n is a, c, g, or t
  misc_feature (822)..(828): n is a, c, g, or t
  misc_feature (832)..(856): n is a, c, g, or t
  Peptide Sequence Number=SeqID_11821
  Probeset Number=SeqID_20179
nngcctgggtgatctgggacccgttccaggccgcggccgagaagcagttgggcgcgcgggtgctggccgacggcgccggcgtggtcaagaactaccagttcttcctggcggcgcgtccctacgaaaaagcgcatcccgacgtgatccagatcgtgctggaggaaatccgcaagggcgacctgtgggcccgcgaccatcgcgccgaggccgtggcgctgctgcagccggtgctggggctggacaaggcggtggtcgaactggccgccgagcggctggcctacggcgtgcagccgatcacgcgggaagtgctgcaggaacagcagcaggtggccgatgcgttccacgcgctcaagctgatccccaaacccctcaacgtgttcgacgccgcgccgtcgggcctgaaatagacaagggcaggcattccatggacgtcttctggttcattcccacccacggcgattcgcgctatctcggcaccagccgcggcgcgcgcgcggccggctacgactatttccgccaggtggcggtggccgccgacacgctgggctacgacggcgtgctgctgcccaccggacgctcctgcgaggatgcgtgggtggtggcgtccagcctgatcggcgccacgcgccgcttgaagttcctggtggcgatccgccccggcgtcagctcgccgcagttctcggcgcgcatggccgccaccttcgaccgcctgtccagaagggcggctgctggtcaatgtnntgaccggcggcgaccccnncgagctggagggcgacnncgtcnnnnnnnnncatgnnnngcgctacgccatcaccgcngacnnnnnnngcannnnnnnnnnnnnnnnnnnnnnnnn

SEQ ID NO: 5777 - DNA, 611 bp, Zea mays
  misc_feature (1)..(3): n is a, c, g, or t
  Peptide Sequence Number=SeqID_11822
  Probeset Number=SeqID_20180
nnnaggccggcaacaagctgatggacagcccgtacgaggtcaacccggcgggctacaccatccacagcgcggtacacgaagttcgccacgacgtggtctgcgtgctgcacacccacaccgcttccggtatcgctgtctccgcacagaagcaaggcgtgttgcccatcagccagcaatccttgtttgtgctgtccagcctggcctaccacgcctacgaaggggtggcgctgaaccacgaggaaaaggcccgcttgcaggctgaccttggcgaaaacaatttcctgatgctgcacaaccacggcctgctgacctgtggccccagcatcgccgatacgttcctgatgatgttcatcttccagcgcacctgcgatatccaggtgatggcgcagaacggtggcgcagaattgatcacgattgcaccacagatattggccggtgcccgggcgatgatcgccggggtcaccaaaagcgctcagggtatgggcggcgcactggcctggccggcgttgctgcgcaaactggacgcactcgaccccgggtataaaagctgatgccactcgccgagatcccgctgcgcatctggcgccagcgcgcccagagctttgagtttc

SEQ ID NO: 5778 - DNA, 233 bp, Zea mays
  Peptide Sequence Number=SeqID_11823
  Probeset Number=SeqID_20181
atggccttccgcgtcggcggtcccgatggcggcgcgcgcgtgatttcctatgtggtgtccggcgtcggcttcctgggcgccggcgccatcatgcgcgaaggcggcagcatccgcggcctgaacaccgcggccacgctgtggggctcggccgccatcggcgcctgcgccggcgcctcgctgatcctcgaggcgatcgcggccaccgtgttcgtgctggccgccaatacgttgct

SEQ ID NO: 5779 - DNA, 233 bp, Zea mays
  Peptide Sequence Number=SeqID_11824
  Probeset Number=SeqID_20182
agcaacgtattggcggccagcacgaacacggtggccgcgatcgcctcgaggatcagcgaggcgccggcgcaggcgccgatggcggccgagccccacagcgtggccgcggtgttcaggccgcggatgctgccgccttcgcgcatgatggcgccggcgcccaggaagccgacgccggacaccacataggaaatcacgcgcgcgccgccatcgggaccgccgacgcggaaggccat

SEQ ID NO: 5780 - DNA, 588 bp, Zea mays
  misc_feature (1)..(8): n is a, c, g, or t
  Peptide Sequence Number=SeqID_11825
  Probeset Number=SeqID_20183
nnnnnnnntatcgccctcggtgccctggaacaagcaaaaatccatgcacgccaggcccggccctggatcgacagccagcaggatcacggctggcaagacccgttcaccatcgccgccatcggcgacctggaatggcgggtccacggcaccgaagcgatcctcgccaaggccggcgttgccgtagaccaggccctggccaaccccaacgaagacaccgtggccaatgcctcgctggtggtcgcccaggccaaggtgctgtcagccgaaaccgcgttgctcgccagcagcaaactcttcgaactggccggcacccgctcggtgtccggcaagcacaacctcgatcgtttctggcgcaacgcgcgcacccataccctgcatgacccggcccgctggaaataccacttgatcggcaactttgtgctcaacggcgtcaagcccgcacgccacgcctggaactgaggagcttcatccatgaccgcactgaatcaggcgcgccaactgctggaaagtacccggcgctttgtcgagaaaagtgatgacccctacgtgatcagccgcttcggcgatttgcagattcgcgtggaggtc

SEQ ID NO: 5781 - DNA, 248 bp, Zea mays
  misc_feature (1)..(3): n is a, c, g, or t
  Peptide Sequence Number=SeqID_11826
  Probeset Number=SeqID_20184
nnngcagcccgctgggcgccaccgcgctgttctcgtcgctgatggcggtcggcctggcgttcgtcgcgccggtgatgcagtcgcacggcctgctggccgtggcgctgacgatctggggcatcgcccaggcggcgctattcatcgtctgccacgtgcgcctgatgaaatcggcgcccgaggcccccgccttcgccgcttcgctcaacatttcgggcgccaacatcggcatcggcctgggcgcggtggtc

SEQ ID NO: 5782 - DNA, 248 bp, Zea mays
  misc_feature (246)..(248): n is a, c, g, or t
  Peptide Sequence Number=SeqID_11827
  Probeset Number=SeqID_20185
gaccaccgcgcccaggccgatgccgatgttggcgcccgaaatgttgagcgaagcggcgaaggcgggggcctcgggcgccgatttcatcaggcgcacgtggcagacgatgaatagcgccgcctgggcgatgccccagatcgtcagcgccacggccagcaggccgtgcgactgcatcaccggcgcgacgaacgccaggccgaccgccatcagcgacgagaacagcgcggtggcgcccagcgggctgcnnn

SEQ ID NO: 5783 - DNA, 642 bp, Zea mays
  Peptide Sequence Number=SeqID_11828
  Probeset Number=SeqID_20186
acatgccatcgcggccggagaaaaacacaggagactttcatgacccgatccccggaacgcagccgcatgcgccggttcgccgcgtgctgcgccctggccctggccgccaccggcgccgcgcaggccgacgatgcctaccccagcaagcccatcaccatcgtggtgccgttctcgcccggcagcgccaccgacaccagcgcccgcatcctgaccgaaaagctcggcccgcgcctgggcgtgccgatcgtgatcgagaacaagcccggcgcgtccggcaccatcggctcgtccaccgccgcgcgcgccgcgcccgacggctacaccctgatcctgaccagcagctcgacgcactcggccacgcccgccctgttccgcaagctgccttacgatcccaccggcgatttcatccacgtcatccgcatcgccaccattcccatgatgctggtggtgcgcgccgattcgccctacggctcggtgtcccagctggtgcaggccacccgcgccaagccgctcaactacgcctacggctcgcccaccagccagatcgccggggccaccttcaacagcgttgccggcgccgccgccaacgccgtgccctacaaaagccagccgcccgccgtcaccgacctgctgggcggccac

SEQ ID NO: 5784 - DNA, 231 bp, Zea mays
  misc_feature (1)..(2): n is a, c, g, or t
  Peptide Sequence Number=SeqID_11829
  Probeset Number=SeqID_20187
nncgacgacccgaaaaagggcatcagttattactactggatcacctgggtatccgcctcgggtgtcgagggtccgcccaacagtccggccggtacgcacgttgaatcgatgctcagcattgattacctgctggacctgatcaccaaggagatgaatcagagcgagctggcaaaggctttggcgaaagccatcgacctggatggcctcaatcagcagattgcgatgctggat

SEQ ID NO: 5785 - DNA, 231 bp, Zea mays
  misc_feature (230)..(231): n is a, c, g, or t
  Probeset Number=SeqID_20188
atccagcatcgcaatctgctgattgaggccatccaggtcgatggctttcgccaaagcctttgccagctcgctctgattcatctccttggtgatcaggtccagcaggtaatcaatgctgagcatcgattcaacgtgcgtaccggccggactgttgggcggaccctcgacacccgaggcggatacccaggtgatccagtagtaataactgatgccctttttcgggtcgtcgnn

SEQ ID NO: 5786 - DNA, 425 bp, Zea mays
  misc_feature (1)..(3): n is a, c, g, or t
  Peptide Sequence Number=SeqID_11830
  Probeset Number=SeqID_20189
nnnttcagcgccacgctcaagggcaggcccttgggatcgacttcgatttcattgctggcgaacggtgtcagattggagacgaccgcgcggccccagggatcgatgcgcaacccgctgccgctggccacccgcgcgccggcggcatgccgggcttcgaccacgacggcggtatcgcccagcgcgggcgtgaatacgacgccaccgccatatgccaccacgcctcccgacaccgtggcgccatactgcgagaacccgcgtccgcccgatgcatttgccgccatggtggcgtagggcgatgcgtaagccgcgctgccccccgccacggaggacgctgccgccccccccaggctgcgactcgcattcacgccataggtcagggcgccgtcctcgcccgtcgccccggtgaccgactgttgaacatcggt

SEQ ID NO: 5787 - DNA, 425 bp, Zea mays
  misc_feature (423)..(425): n is a, c, g, or t
  Peptide Sequence Number=SeqID_11831
  Probeset Number=SeqID_20190
accgatgttcaacagtcggtcaccggggcgacgggcgaggacggcgccctgacctatggcgtgaatgcgagtcgcagcctggggggggcggcagcgtcctccgtggcggggggcagcgcggcttacgcatcgccctacgccaccatggcggcaaatgcatcgggcggacgcgggttctcgcagtatggcgccacggtgtcgggaggcgtggtggcatatggcggtggcgtcgtattcacgcccgcgctgggcgataccgccgtcgtggtcgaagcccggcatgccgccggcgcgcgggtggccagcggcagcgggttgcgcatcgatccctggggccgcgcggtcgtctccaatctgacaccgttcgccagcaatgaaatcgaagtcgatcccaagggcctgcccttgagcgtggcgctgaannn

SEQ ID NO: 5788 - DNA, 524 bp, Zea mays
  misc_feature (1)..(67): n is a, c, g, or t
  misc_feature (69)..(93): n is a, c, g, or t
  misc_feature (95)..(95): n is a, c, g, or t
  Peptide Sequence Number=SeqID_11832
  Probeset Number=SeqID_20191
nnnnnnnnnnnnnnnnnnnnnnnnnnnnnnnnnnnnnnnnnnnnnnnnnnnnnnnnnnnnnnnnnnngnnnnnnnnnnnnnnnnnnnnnnnnntngcttgagggtagagttgcggatcattctccaaatccttgcaagacgagttccagcatttcgctggcgcgcgcggccggcagatgcggccacatagttttctgggcgtgcgcggtgcgcaggaagacgacggcgtcatcgtggaactgctccatgtcggcctgctccagcttcgcgtagctgatcgagcgcggcacgggaatcacgccgcccttcgggcccgggtaccagtcaacgaaaccgctgccggtcttaagccaagcgcggaaggcttcaaactcttcgaaccgctcctgagcttcgaacagggccgactccagcgccatgtgcttgcggtggtaccagcccatacgctctttgtgggtggtgatcgacagcatctcgcccggctcaagccgaaccagttgattccacagccggcgccattgctt

SEQ ID NO: 5789 - DNA, 524 bp, Zea mays
  misc_feature (430)..(430): n is a, c, g, or t
  misc_feature (432)..(456): n is a, c, g, or t
  misc_feature (458)..(524): n is a, c, g, or t
  Peptide Sequence Number=SeqID_11833
  Probeset Number=SeqID_20192
aagcaatggcgccggctgtggaatcaactggttcggcttgagccgggcgagatgctgtcgatcaccacccacaaagagcgtatgggctggtaccaccgcaagcacatggcgctggagtcggccctgttcgaagctcaggagcggttcgaagagtttgaagccttccgcgcttggcttaagaccggcagcggtttcgttgactggtacccgggcccgaagggcggcgtgattcccgtgccgcgctcgatcagctacgcgaagctggagcaggccgacatggagcagttccacgatgacgccgtcgtcttcctgcgcaccgcgcacgcccagaaaactatgtggccgcatctgccggccgcgcgcgccagcgaaatgctggaactcgtcttgcaaggatttggagaatgatccgcaactctaccctcaagcnannnnnnnnnnnnnnnnnnnnnnnnncnnnnnnnnnnnnnnnnnnnnnnnnnnnnnnnnnnnnnnnnnnnnnnnnnnnnnnnnnnnnnnnnnnn

SEQ ID NO: 5790 - DNA, 690 bp, Zea mays
  misc_feature (1)..(66): n is a, c, g, or t
  misc_feature (690)..(690): n is a, c, g, or t
  Peptide Sequence Number=SeqID_11834
  Probeset Number=SeqID_20193
nnnnnnnnnnnnnnnnnnnnnnnnnnnnnnnnnnnnnnnnnnnnnnnnnnnnnnnnnnnnnnnnnntggccctgcatcgcgccctggtggccgatccgggcgtgctggcgggcgactatcacaccaactacctggaaagctggatgcagcagcgggaggggacccaatgacggtgcgctacacccatggcggcgatgaattcatcttcgccgagatcagcgaatcgatgtcgctggccgcgttcttcaagggcatggccatcacgcgcgcgctgcgcgagcgcgccgtgcccggcgtgagcgagatctgcccggccaacgcctcgtaccagatccgctacgaccccgaccaggtcgcgcccgaggccatgctggccatcctgcgcgagatcgaggccaccatcgacctggacaacctgcggctcgacacccgcgtgatccaggtgccggtgctctacaacgatccctggacccacgagacgctgatgcgctttcgcgagcgccaccaggacccggcctcgaccgacctggagtacgccgcgcgcatcaatggctttgccgataccgatgcattcatcgcggcgcattccagcgcgccctggttcgtgtcgatggttggtttcgtggccggcctgccgttcatgttccagatggtcgagcgcgagcgccagctcgaagtgcccaagtaccn

SEQ ID NO: 5791 - DNA, 948 bp, Zea mays
  misc_feature (1)..(188): n is a, c, g, or t
  misc_feature (948)..(948): n is a, c, g, or t
  Peptide Sequence Number=SeqID_11835
  Probeset Number=SeqID_20194
nnnnnnnnnnnnnnnnnnnnnnnnnnnnnnnnnnnnnnnnnnnnnnnnnnnnnnnnnnnnnnnnnnnnnnnnnnnnnnnnnnnnnnnnnnnnnnnnnnnnnnnnnnnnnnnnnnnnnnnnnnnnnnnnnnnnnnnnnnnnnnnnnnnnnnnnnnnnnnnnnnnnnnnnnnnnnnnnnnnnnnnnnnnntccgtcgcccatcggcgccaggcactcgcgcaataacgctgcccacgctggctcatcggccagtagcagcaaacgcaagggttcgacaggcgtagacaagctagctccctagactctgcaaaatttcgttggcggcgggcattatgacgtgcgacctgataatgaccaatgatatgggttatcaaatacacactgtgcggcgctagaccgaacaatagtcctaaatgccctgcacatcctgcggcaaagtaacaaaaccggcaaatttagatcgagtggtacgtcacactgtcgttcagaggcagcagaatcttgccagcctgttaaaatgcccgcccttttgatcaatgactccctgaattctgtatgtcccgactcaatccccggcagcaagaagccgtgaactacgtcggcggccctctattggtgctcgccggtgccggttccggcaagaccagcgtgatcacccgcaagatcgcgcacctgatccagagctgcggcatccgcgcccagtacatcgtcgccatgacctttaccaacaaggcggcgcgggaaatgaaagagcgcgtcggcaccctgctcaagggtggcgaaggccgtggcctcaccgtgtgtaccttccacaacctggggctgaacatcatccgcaaggagcatgtgcggttgggctacaagccgggcttctcgatctttgacgagactgacgtcaaggcgctgatgaccgacatcatgcaaaaggaatacgcgggcgacgacggcn

SEQ ID NO: 5792 - DNA, 907 bp, Zea mays
  misc_feature (1)..(6): n is a, c, g, or t
  misc_feature (713)..(713): n is a, c, g, or t
  misc_feature (715)..(715): n is a, c, g, or t
  misc_feature (749)..(749): n is a, c, g, or t
  misc_feature (766)..(770): n is a, c, g, or t
  misc_feature (791)..(794): n is a, c, g, or t
  misc_feature (806)..(809): n is a, c, g, or t
  misc_feature (819)..(826): n is a, c, g, or t
  misc_feature (828)..(832): n is a, c, g, or t
  misc_feature (834)..(845): n is a, c, g, or t
  misc_feature (847)..(859): n is a, c, g, or t
  misc_feature (862)..(863): n is a, c, g, or t
  misc_feature (866)..(866): n is a, c, g, or t
  misc_feature (872)..(883): n is a, c, g, or t
  misc_feature (885)..(887): n is a, c, g, or t
  misc_feature (893)..(905): n is a, c, g, or t
  Peptide Sequence Number=SeqID_11836
  Probeset Number=SeqID_20195
nnnnnngcacagccgatcacaccgcaattcgccctgctgggggcgatgttcctggccctggaatgggtcgccatcagcgcctacgcctatatgggtttgcatatgcgccgctggttcgcgcagcctcggggcaagcggattttcaaccggtgctgtgcggggttgttgtcggccgccgcgacggtattgctgatggcgcgcaaggcctgagcactgcgaaaaactggccaaaacgcttacaatcgccgtctcaccgcaactcaggcaggccagttcgcccatggcgctcgaccccatcaccatactggtcctcaccatcgccctcgcaggcgccgccgcgctgtacctggcggtcgagtggcgcaacgttcgcgaaccatcactgctgtactggaccgccggtttcgccatcatcagcgtgggcagcaccctggcgctgctgcgggccagcggcctgctgttgatcggcatctggttcgccaacgggctgctgatcaccgcgcattggttgttcttgctgggcgttgcgcgttttactcaggtgcgcctgtctcgcgcctggtacctgatcttcgtggcctggtttgccatgctcctactaccggaaggacagtcgtggtccaaagccatgctgctggccaactcgctgctggttgctctgccaaccctgcgtgccagtttcctgctgcggccccatggccggtcactcagcntnggggcggtgcagctgcgttatgtgctgctggccnacgggctgttttatctnnnnnagtcgctggtggcgatcgtgnnnngtacgctgatcnnnntgacggcgtnnnnnnnngnnnnnannnnnnnnnnnntnnnnnnnnnnnnnatnncgntcatgnnnnnnnnnnnntnnntgaccnnnnnnnnnnnnnac

SEQ ID NO: 5793 - DNA, 281 bp, Zea mays
  misc_feature (1)..(3): n is a, c, g, or t
  Peptide Sequence Number=SeqID_11837
  Probeset Number=SeqID_20196
nnngaccatcctggcgcgcggctgcccgggcttctcgggcgccgacctggccaacctggtcaacgaagccgccctgttcgccgcgcgccgcaatggccgcacggtggatatgtccgactttgaaaaggccaaggacaagatcatcatgggcgccgagcgccgctcgatcgtcatgcccgaagaggaacgcaagaacaccgcgtaccacgaatccggccatgccatcgttgcccgcctgctgcccaagaccgacccggtccacaaggtcaccatcatcccgc

SEQ ID NO: 5794 - DNA, 829 bp, Zea mays
  misc_feature (6)..(23): n is a, c, g, or t
  misc_feature (25)..(27): n is a, c, g, or t
  misc_feature (31)..(46): n is a, c, g, or t
  misc_feature (53)..(68): n is a, c, g, or t
  misc_feature (71)..(78): n is a, c, g, or t
  misc_feature (80)..(80): n is a, c, g, or t
  misc_feature (82)..(82): n is a, c, g, or t
  misc_feature (85)..(97): n is a, c, g, or t
  misc_feature (99)..(122): n is a, c, g, or t
  misc_feature (124)..(137): n is a, c, g, or t
  misc_feature (142)..(145): n is a, c, g, or t
  misc_feature (147)..(147): n is a, c, g, or t
  Peptide Sequence Number=SeqID_11838
  Probeset Number=SeqID_20197
accctnnnnnnnnnnnnnnnnnntnnncggnnnnnnnnnnnnnnnnaaaaaannnnnnnnnnnnnnnngcnnnnnnnntntngcnnnnnnnnnnnnntnnnnnnnnnnnnnnnnnnnnnnnngnnnnnnnnnnnnnnaaaannnncnaagaatgcgcggcccaggcggccaaagtcggggccacgccgggctcctcgcaaagcgcccacaaggccaagggcgacccgacccaaacccagttcgcctggctgaaccgcatcaacaaagcctcgatcgtgatgctcaccgaagaaggcatcgtcaagccggacatgggccacaagatcgccggcggcgtgcgctttgccatcgaccaggccgaccagcccgatggcaagcgcccggaagacgtgctgcaactggaaaaaatcatgaccgacaagatcggtccggaagcctccctgatccactccggccgcagccgccaggacatgctcgccacctaccgcctggccaacctgcgctcccaggtgctggcctacagcgacgcactgaacgccacccgccaacgtatcctgaacatcgccgacaagaacatcgacaccctggtgcccgcctacaccaacggcgtgcaggccatgcccatcagctatgcgcactacctgctggcgttcgaagccgcatttgatcgcgacggccagcgcattcgtgaactctatacccgcctcaacctgagcccgatgggcaccgcggtactggcgaactccgcttacccgctgaaccgcgaacgcttggccgaactgctgggctttgatggcgtgcgggaaaactccctggattcgagtcaggt

SEQ ID NO: 5795 - DNA, 758 bp, Zea mays
  misc_feature (2)..(29): n is a, c, g, or t
  misc_feature (33)..(38): n is a, c, g, or t
  misc_feature (40)..(52): n is a, c, g, or t
  misc_feature (54)..(58): n is a, c, g, or t
  misc_feature (757)..(758): n is a, c, g, or t
  Peptide Sequence Number=SeqID_11839
  Probeset Number=SeqID_20198
annnnnnnnnnnnnnnnnnnnnnnnnnnnaggnnnnnngnnnnnnnnnnnnncnnnnncgcgtcatcaatgacggcaacaccaccgacggcgaaaaaatcgtctacgacacggtgaagcagattgcccaggccggtcgcgccaccggttcgaaaatcagcacgccgaagccgcgtatcgacatggttatccagccgaagcagaaaccgggcgcagcccagccggcgccgaaacccgacgcgaagaaggcgaattaatggcaaccctgaaagcccagcatctggccaaggcctataaaagccgtcaggtcgtgcgcgacgtcagcctgtcgatcgacagcgggcagatcgtcggcttgctcggccccaacggtgccggcaagaccacctgcttctacatgatcgtcggcctggtacaggccgatcaaggccgcgtgctgatcgacgacctggacgtgagccaccagcctatgcacggtcgtgcgcaggcgggtatcggctatcttccccaggaagcatcgatcttccgcaaactgtcggtttccgacaacatcatggccatcctcgagacccgcaaggaactcgaccgcgccgggcgcaagaaagagctggaaagcctgctgcaggaattccatatcaaccacattcgcgacaacctcggcatgagcctttccggcggcgagcggcgtcgtgtggaaatcgcccgagccctggccactgcgccgaagttcatcctgctggacgaacccttcgccggtnn

SEQ ID NO: 5796 - DNA, 462 bp, Zea mays
  misc_feature (1)..(4): n is a, c, g, or t
  Peptide Sequence Number=SeqID_11840
  Probeset Number=SeqID_20199
nnnnggaaccaactggaaaacgcactgctcaacctggcgatcaacgcccgggatgctatgaaaggcgagggcgtgattcggatcaccggcgaaaacatcatcctcaatcccccggattgcgccggcaaaagcatcaaccccggtgaatatgtgcgcctggccgtcgccgacagcggcgccggcatgtcaccgacgatcctggcacgggccttcgaaccgtttttcaccaccaagccgaatgggcacggtaccggcctgggcctgagcatggtgttcgggttcgtgcgccaaagtggcgggcatgtggaggtcgaaagcgtggagggcagcggcaccatggtgcagatgtatttcccgcgcaacctcggagagccggaaagccacgatacgcccgtccagctcacacaacacagcggcggccaggagaccatcctggtggtggaggacaacgaaggcgtacgc

SEQ ID NO: 5797 - DNA, 838 bp, Zea mays
  misc_feature (2)..(8): n is a, c, g, or t
  misc_feature (11)..(22): n is a, c, g, or t
  misc_feature (35)..(35): n is a, c, g, or t
  misc_feature (47)..(48): n is a, c, g, or t
  misc_feature (68)..(70): n is a, c, g, or t
  misc_feature (835)..(838): n is a, c, g, or t
  Peptide Sequence Number=SeqID_11841
  Probeset Number=SeqID_20200
annnnnnngannnnnnnnnnnntgctgcctgtgtngccggcatacgnngccaggtcggcatggtgttnnnacagttcaacctgttcccgcacatgacggtgctggaaaacctgatggtggggccgcgcctggtgagcaagctcagcgagccccaggcgcgtgaactggcccatgaatacctggaccgggtgcgcatcggggaccaggccgacaaataccccagccaactctcgggcggccagcagcagcgcgtcgccatcgcccgcgccctgtgcatgcgcccgcgcatcatgctgttcgacgagcccacgtccgcccttgacccggagatggtcaaggaggtgctggacgtgatgggcgaactggcccaggacggcatcaccatggtctgcgtcacccacgagatggggtttgcccggcgagttgccgaccggatcatcttcatggaccagggttgcatcatcgagcaagccaaacccaccgagttttttgacaacccgcagcacgagcgtgcccgggagtttctgtcgcagattctcagccactgagaagcatcgtcggacatcgaccaaaacaacaaaaatccgcattcacgatatctggaggcttacccatgatctcgctcactcgcttcgtcgcagcagccgctgtcgccaccgctctcacaggcaccgcctgggcgggttcaaccctcgaccgcatccatgaaaccaaggtgctcaaggtagccacctcggccaactggccaccgcaatcgttcctgggcccggacaatcagctgcaaggctttgatatcgatgtcgccagcgaaatcggcaagcgcctgggcagcaannnn

SEQ ID NO: 5798 - DNA, 563 bp, Zea mays
  Peptide Sequence Number=SeqID_11842
  Probeset Number=SeqID_20201
ggcgcgcaggtgctgggcgcgggcatgctgcgcggcctgcacgacacgcgcgtgccgatgatctacgcggccatcggctactggggcgtgggcctgccgtgcggcgcctggctggcgttccgggccgactggcgcggggtcggcatctggagcgggctggcgatcggcctggcggtggtggcggtgctgatgatgcaacgctgggcccggcgcgcgccgctgggcctggtcgggcggcgcgtgtcccacatgccataatcgccgatgcatttcctggaacttccatgcccaccgccttgcccgtttttcccctgttgaacgccgaacgcctgtggtcgcgtgtcgagaccctgtcgcgctacaccctgcccgaccagccctggacccgccgcgccttttcgccgctgttcctcgaagcgcgcgactggctgcgcggtgaattcgaggccgccggcctggccacgcgcctggacgccggcggcaacctgatcggcacccgcgccggccgcaacccgcagcgcaagcccatcgccaccggctcgcactgcgacaccgtcatgagc

SEQ ID NO: 5799 - DNA, 593 bp, Zea mays
  misc_feature (1)..(5): n is a, c, g, or t
  Peptide Sequence Number=SeqID_11843
  Probeset Number=SeqID_20202
nnnnntggtgacgcggacggtctccggccccagcgcggcccgcagccgctcgagcgccagttcgggccgggcggccccgcacatgaagatgtccagcgcggcgaaccggtgttcgggccaggaatggatgctgatgtgcgattcgctcagcatgaccaccccggtcacgccggcgccctctccgaaatggtggaagtgggcgcccagcacccgcgcccccgccgcctcggcggccaggaccagctcgcgttcgagcgcctgggcgtcggccagcaggcgggcggacacgccgcggaaatcggccaggatgtggcggccgggcgtggcgtgcggcgtcacttgtgcgaaccgcccgatgaccagcccgagctgcccgacgagccgccgccccagctgctgctgctgccgccgctgccgccgccgctggtgaagcgggcgccgggcgagctggcgccggtggcggccatgaccacgatcagggcgtagatggcgtagatgaacttgcccatgcctcagtcgtcctttgcggacatcttgtccgcgaggctggccggcagccacaggaaggccaggccgatcacgagcggcaaaat

SEQ ID NO: 5800 - DNA, 593 bp, Zea mays
  misc_feature (589)..(593): n is a, c, g, or t
  Peptide Sequence Number=SeqID_11844
  Probeset Number=SeqID_20203
attttgccgctcgtgatcggcctggccttcctgtggctgccggccagcctcgcggacaagatgtccgcaaaggacgactgaggcatgggcaagttcatctacgccatctacgccctgatcgtggtcatggccgccaccggcgccagctcgcccggcgcccgcttcaccagcggcggcggcagcggcggcagcagcagcagctggggcggcggctcgtcgggcagctcgggctggtcatcgggcggttcgcacaagtgacgccgcacgccacgcccggccgccacatcctggccgatttccgcggcgtgtccgcccgcctgctggccgacgcccaggcgctcgaacgcgagctggtcctggccgccgaggcggcgggggcgcgggtgctgggcgcccacttccaccatttcggagagggcgccggcgtgaccggggtggtcatgctgagcgaatcgcacatcagcatccattcctggcccgaacaccggttcgccgcgctggacatcttcatgtgcggggccgcccggcccgaactggcgctcgagcggctgcgggccgcgctggggccggagaccgtccgcgtcaccannnnn

SEQ ID NO: 5801 - DNA, 631 bp, Zea mays
  misc_feature (1)..(1): n is a, c, g, or t
  misc_feature (630)..(631): n is a, c, g, or t
  Peptide Sequence Number=SeqID_11845
  Probeset Number=SeqID_20204
nagatccgtcagatcgacaacggcatgaagcaatttttcgacggtatcagccagaacgtcgaatacgtggccaaggacccgcgcgttgtcgcggccagggacctcaagagttatgccggcgccgacgctgcgcaaatcccgctgactgcgaccaacaaagacctgctggggattttcgaccagttcgccaaaagccatcccagcaccgcctacctgtccctgggactgagcgacggcggttacgccagttggcctgacgacaccaaactgaacaactacgacccgcgcgtgcgcccctggtaccaggcggccatcgccgcaccaggcaagaccgtgcgtaccggcgcctactattgggcgccagacgatgtgtcgctgatcggcaccgtgcacaccgtcgccgacgacacgggcaagatcctcggcgtcgtcggcctggacgtgtcgctcaagcaactcaccgaactggtgcgcaacattaagctcggcgacagcggctacctgatgctggtggaagccaacggcaacgtgctggtagaccccagcgacgccaagcacaacttcaaaccgatggccgacttgggccctgattatgccgagctggccaagcgcggcgacggcgtgacccann

SEQ ID NO: 5802 - DNA, 160 bp, Zea mays
  Peptide Sequence Number=SeqID_11846
  Probeset Number=SeqID_20205
ttcagcggtccataactgttcggtcaggcggatgtccagggtgatgctttcgttgaggctgcgttgcagcagctcacccatcgaacttaccaattgattgatctgtaccggttttgaatccagcgactggcgacgggaaaacgccagcaagcggtgggtc

SEQ ID NO: 5803 - DNA, 160 bp, Zea mays
  Peptide Sequence Number=SeqID_11847
  Probeset Number=SeqID_20206
gacccaccgcttgctggcgttttcccgtcgccagtcgctggattcaaaaccggtacagatcaatcaattggtaagttcgatgggtgagctgctgcaacgcagcctcaacgaaagcatcaccctggacatccgcctgaccgaacagttatggaccgctgaa

SEQ ID NO: 5804 - DNA, 208 bp, Zea mays
  misc_feature (1)..(3): n is a, c, g, or t
  Peptide Sequence Number=SeqID_11848
  Probeset Number=SeqID_20207
nnngcgctggaacgtctcggccgcgttgctgggcggcatctccctggccgccgccatgagcgcggtcggcctgttcagcttcgcgcccgacatgccctactggccgttcgcggcgatcgtggcgctggccaacctgggcgtcggcattgcggtgcccgcgatgaccagcgtggtgatgcaggtctcgggcaagcaccatgccaacagc

SEQ ID NO: 5805 - DNA, 208 bp, Zea mays
  misc_feature (206)..(208): n is a, c, g, or t
  Probeset Number=SeqID_20208
gctgttggcatggtgcttgcccgagacctgcatcaccacgctggtcatcgcgggcaccgcaatgccgacgcccaggttggccagcgccacgatcgccgcgaacggccagtagggcatgtcgggcgcgaagctgaacaggccgaccgcgctcatggcggcggccagggagatgccgcccagcaacgcggccgagacgttccagcgcnnn

SEQ ID NO: 5806 - DNA, 839 bp, Zea mays
  misc_feature (753)..(755): n is a, c, g, or t
  misc_feature (767)..(770): n is a, c, g, or t
  misc_feature (772)..(780): n is a, c, g, or t
  misc_feature (783)..(784): n is a, c, g, or t
  misc_feature (798)..(804): n is a, c, g, or t
  misc_feature (806)..(810): n is a, c, g, or t
  misc_feature (815)..(817): n is a, c, g, or t
  misc_feature (819)..(825): n is a, c, g, or t
  misc_feature (833)..(836): n is a, c, g, or t
  misc_feature (838)..(839): n is a, c, g, or t
  Peptide Sequence Number=SeqID_11849
  Probeset Number=SeqID_20209
gacatcacgctgccggccgccgggctgaacacctatctgttcgaggtggtcaacgacaagaaccagatcatctccaccgaagtcgtggaaacggtcaggcgcctgtacatccaggagatcatgctgcccggccccgaaccgatgcagcgtccgcacggcttccagccaaccgccaccgaatacgcgcggcacggcgtggacgtggtgcagctgccgccgctgaccacgcgcggccaggccaattacgatgtgatctacgacaacagcgcggacgatccgcgcctgcgcagcgcggcgcgctcggtctatgcccaatcgcaaggcgccgagcgcgagccgttcaccatcgtcgcctgccacgtggaccggctggccacgccgaagccggtacagcccttctacatccgcgccaatgcgggtccgggcgcgggcagcacgcaggtccagttcgccgatgccgcgggcgacgtcagcttcctctggtacaacatcgacccgggccaggactggttcctggaatgcctgttcgaatacaccgacccggccgccggcgtgcgacgcgcggtggtgccgcgcgatcgggtcacgccggtcccctacgatccggccgagcccaaggcctgccatgccgtgaatgtccgcctggaggggctgctgcccgtgcccacggccggcaagatcgtgctgcgcgtgcggctcatggaaagcgcggcggcgggcatcgcgttctacaacaccaacctgctgtgcgtnnncgcgatgtcgcnnnngnnnnnnnnnacnntggactaccagcannnnnnntnnnnncatgnnntnnnnnnnctgatcgnnnngnn

SEQ ID NO: 5807 - DNA, 839 bp, Zea mays
  misc_feature (1)..(2): n is a, c, g, or t
  misc_feature (4)..(7): n is a, c, g, or t
  misc_feature (15)..(21): n is a, c, g, or t
  misc_feature (23)..(25): n is a, c, g, or t
  misc_feature (30)..(34): n is a, c, g, or t
  misc_feature (36)..(42): n is a, c, g, or t
  misc_feature (56)..(57): n is a, c, g, or t
  misc_feature (60)..(68): n is a, c, g, or t
  misc_feature (70)..(73): n is a, c, g, or t
  misc_feature (85)..(87): n is a, c, g, or t
  Probeset Number=SeqID_20210
nncnnnncgatcagnnnnnnnannncatgnnnnnannnnnnntgctggtagtccanngtnnnnnnnnncnnnngcgacatcgcgnnnacgcacagcaggttggtgttgtagaacgcgatgcccgccgccgcgctttccatgagccgcacgcgcagcacgatcttgccggccgtgggcacgggcagcagcccctccaggcggacattcacggcatggcaggccttgggctcggccggatcgtaggggaccggcgtgacccgatcgcgcggcaccaccgcgcgtcgcacgccggcggccgggtcggtgtattcgaacaggcattccaggaaccagtcctggcccgggtcgatgttgtaccagaggaagctgacgtcgcccgcggcatcggcgaactggacctgcgtgctgcccgcgcccggacccgcattggcgcggatgtagaagggctgtaccggcttcggcgtggccagccggtccacgtggcaggcgacgatggtgaacggctcgcgctcggcgccttgcgattgggcatagaccgagcgcgccgcgctgcgcaggcgcggatcgtccgcgctgttgtcgtagatcacatcgtaattggcctggccgcgcgtggtcagcggcggcagctgcaccacgtccacgccgtgccgcgcgtattcggtggcggttggctggaagccgtgcggacgctgcatcggttcggggccgggcagcatgatctcctggatgtacaggcgcctgaccgtttccacgacttcggtggagatgatctggttcttgtcgttgaccacctcgaacagataggtgttcagcccggcggccggcagcgtgatgtc

SEQ ID NO: 5808 - DNA, 544 bp, Zea mays
  misc_feature (1)..(6): n is a, c, g, or t
  misc_feature (41)..(45): n is a, c, g, or t
  misc_feature (113)..(113): n is a, c, g, or t
  misc_feature (115)..(115): n is a, c, g, or t
  misc_feature (216)..(218): n is a, c, g, or t
  misc_feature (226)..(226): n is a, c, g, or t
  misc_feature (229)..(241): n is a, c, g, or t
  misc_feature (243)..(265): n is a, c, g, or t
  misc_feature (267)..(326): n is a, c, g, or t
  misc_feature (331)..(371): n is a, c, g, or t
  misc_feature (373)..(381): n is a, c, g, or t
  misc_feature (383)..(384): n is a, c, g, or t
  misc_feature (388)..(400): n is a, c, g, or t
  misc_feature (402)..(406): n is a, c, g, or t
  misc_feature (408)..(412): n is a, c, g, or t
  misc_feature (418)..(422): n is a, c, g, or t
  misc_feature (424)..(424): n is a, c, g, or t
  misc_feature (426)..(443): n is a, c, g, or t
  misc_feature (445)..(472): n is a, c, g, or t
  misc_feature (474)..(478): n is a, c, g, or t
  misc_feature (480)..(527): n is a, c, g, or t
  misc_feature (529)..(541): n is a, c, g, or t
  misc_feature (544)..(544): n is a, c, g, or t
  Peptide Sequence Number=SeqID_11850
  Probeset Number=SeqID_20211
nnnnnnttggcccgaggcgtaggtgccgtcgccgaccaccnnnnncggcgggttgccgccgctgccgaccagggtgatgggcgcgccctgcacggtgtagcggtcggtggcgnantggatgcccgagacgcgcaccgggccggcgccgccatcgacggtgaccgtgccggccgcgccggtgaagatggcatagccgccgccgggcagggcgccggnnncgttggtnggnnnnnnnnnnnnncnnnnnnnnnnnnnnnnnnnnnnntnnnnnnnnnnnnnnnnnnnnnnnnnnnnnnnnnnnnnnnnnnnnnnnnnnnnnnnnnnnnggcgnnnnnnnnnnnnnnnnnnnnnnnnnnnnnnnnnnnnnnnnncnnnnnnnnngnnctcnnnnnnnnnnnnntnnnnncnnnnnttcctnnnnngngnnnnnnnnnnnnnnnnnncnnnnnnnnnnnnnnnnnnnnnnnnnnnntnnnnngnnnnnnnnnnnnnnnnnnnnnnnnnnnnnnnnnnnnnnnnnnnnnnnngnnnnnnnnnnnnnacn

SEQ ID NO: 5809 - DNA, 544 bp, Zea mays
  misc_feature (1)..(1): n is a, c, g, or t
  misc_feature (4)..(16): n is a, c, g, or t
  misc_feature (18)..(65): n is a, c, g, or t
  misc_feature (67)..(71): n is a, c, g, or t
  misc_feature (73)..(100): n is a, c, g, or t
  misc_feature (102)..(119): n is a, c, g, or t
  misc_feature (121)..(121): n is a, c, g, or t
  misc_feature (123)..(127): n is a, c, g, or t
  misc_feature (133)..(137): n is a, c, g, or t
  misc_feature (139)..(143): n is a, c, g, or t
  misc_feature (145)..(157): n is a, c, g, or t
  misc_feature (161)..(162): n is a, c, g, or t
  misc_feature (164)..(172): n is a, c, g, or t
  misc_feature (174)..(214): n is a, c, g, or t
  misc_feature (219)..(278): n is a, c, g, or t
  misc_feature (280)..(302): n is a, c, g, or t
  misc_feature (304)..(316): n is a, c, g, or t
  misc_feature (319)..(319): n is a, c, g, or t
  misc_feature (327)..(329): n is a, c, g, or t
  misc_feature (430)..(430): n is a, c, g, or t
  misc_feature (432)..(432): n is a, c, g, or t
  misc_feature (500)..(504): n is a, c, g, or t
  misc_feature (539)..(544): n is a, c, g, or t
  Probeset Number=SeqID_20212
ngtnnnnnnnnnnnnncnnnnnnnnnnnnnnnnnnnnnnnnnnnnnnnnnnnnnnnnnnnnnnnncnnnnnannnnnnnnnnnnnnnnnnnnnnnnnnnngnnnnnnnnnnnnnnnnnncncnnnnnaggaannnnngnnnnnannnnnnnnnnnnngagnncnnnnnnnnngnnnnnnnnnnnnnnnnnnnnnnnnnnnnnnnnnnnnnnnnncgccnnnnnnnnnnnnnnnnnnnnnnnnnnnnnnnnnnnnnnnnnnnnnnnnnnnnnnnnnnnnannnnnnnnnnnnnnnnnnnnnnngnnnnnnnnnnnnnccnaccaacgnnnccggcgccctgcccggcggcggctatgccatcttcaccggcgcggccggcacggtcaccgtcgatggcggcgccggcccggtgcgcgtctcgggcatccantncgccaccgaccgctacaccgtgcagggcgcgcccatcaccctggtcggcagcggcggcaacccgccgnnnnnggtggtcggcgacggcacctacgcctcgggccaannnnnn

SEQ ID NO: 5810 - DNA, 843 bp, Zea mays
  misc_feature (5)..(5): n is a, c, g, or t
  misc_feature (9)..(9): n is a, c, g, or t
  misc_feature (41)..(41): n is a, c, g, or t
  misc_feature (47)..(52): n is a, c, g, or t
  misc_feature (54)..(57): n is a, c, g, or t
  misc_feature (62)..(62): n is a, c, g, or t
  misc_feature (80)..(82): n is a, c, g, or t
  misc_feature (100)..(101): n is a, c, g, or t
  misc_feature (103)..(103): n is a, c, g, or t
  misc_feature (841)..(843): n is a, c, g, or t
  Peptide Sequence Number=SeqID_11851
  Probeset Number=SeqID_20213
cgttncgancggttcgggcgttggcccgatgttcctggacnacatcnnnnnnannnncaagncgtacaccacgcgtgtgnnntcgggtccattccccganngnactgttcgacgacgttggtgcgcacctggccaaacaaggtcacgagttcggcgcaactaccggccgtgctcgtcgttgtggctggttcgacgccgttatcctgcgtcgcgctatcgatgtgaacagcatctcgggcatctgcctgaccaagctggacgtacttgacggcctggaaaccatcaacatctgcatcggctacaaagatgcggaaggtaaggacgttgccccgactgatgctgacagctacgtagggctgcagcctgtgtacgaagaagtgccgggctggaccgaatcgaccgtgggtgccaagaccctggaagagctgccagccaacgctcgcgcttacatcaagcgcgtcgaagagctgatcggtgcgccaatcgacattatttcgacgggcccggaccgcaacgagaccatcgttctgcgtcacccgttcgcttaataagctgttgatgtaaaaagcaaagggctccttcgggagccctttgtcgtttccggctggtaaacggcacggcccttgctatggttctttctttcgcggtgctatcaaattaatggcacccgtggtggagggattcccagtgtctgccgttctctcattgttacaaagccggctgttgcggccggtgttcgttaccctaggtatcgctcttttggtgcaagtactggtggccgtcgccctgacgcgaagcaccgtcactgcattggaagcggatttgggcaatcgcctgggcnnn

SEQ ID NO: 5811 - DNA, 166 bp, Zea mays
  misc_feature (1)..(3): n is a, c, g, or t
  Peptide Sequence Number=SeqID_11852
  Probeset Number=SeqID_20214
nnnctcggcacggcagcccccagcgggaacacgccttcgcgacgggattcgaccaacacctgttgaatgatgctgctgcgggtgaccaaccctggacgctcgacccgggcaatatccggcgtaggcgcggtgagcgccggcgtctggtgcacgtaatacccggact

SEQ ID NO: 5812 - DNA, 166 bp, Zea mays
  misc_feature (164)..(166): n is a, c, g, or t
  Peptide Sequence Number=SeqID_11853
  Probeset Number=SeqID_20215
agtccgggtattacgtgcaccagacgccggcgctcaccgcgcctacgccggatattgcccgggtcgagcgtccagggttggtcacccgcagcagcatcattcaacaggtgttggtcgaatcccgtcgcgaaggcgtgttcccgctgggggctgccgtgccgagnnn

SEQ ID NO: 5813 - DNA, 657 bp, Zea mays
  misc_feature (1)..(4): n is a, c, g, or t
  misc_feature (586)..(586): n is a, c, g, or t
  misc_feature (590)..(590): n is a, c, g, or t
  misc_feature (615)..(615): n is a, c, g, or t
  misc_feature (617)..(619): n is a, c, g, or t
  misc_feature (623)..(648): n is a, c, g, or t
  misc_feature (650)..(654): n is a, c, g, or t
  misc_feature (657)..(657): n is a, c, g, or t
  Peptide Sequence Number=SeqID_11854
  Probeset Number=SeqID_20216
nnnntcgtaattgacgaaacgaccctggcgttcctcgcgcaccagccgcgcctggcgcagcaccgccaggtgctgcgagaccgcgggctggctgatgtccaggccctcgcgcagcgcgctggcgttcatggcgcccgccgcgagcttgtcgaacagcgcgcggcgggtcgggtcggccagggccttgaagatgtcgttttcgatcatggcaacacattagcagttgcttatgtgttgtgcaagcccggcccggcccggatcaggggccgggccgccgccctgcgcgggcgggggactcagtggatgacgcgggccgccttgcgggcgcgcttgatctcgtacatgcgggcatcggccaggcgcaccgcttcctcggccgccaggccgcgcggatcgagcgccaccacgccgacgctggcgccctcgtagggcagggcggtctcgccgagctggtagcggccgacggtggcggcggcggcgcggtcttcgagcgagcgcgccgcttcctcggcatcgccgcgctcggcctcgtggcctggcgccgcgtcgccgcgcgccagcgcggggccggggccgatcagcacgnattnatcgccgcccagccgcccgaccatntnnnaggnnnnnnnnnnnnnnnnnnnnnnnnnngnnnnntcn

SEQ ID NO: 5814 - DNA, 657 bp, Zea mays
  misc_feature (1)..(1): n is a, c, g, or t
  misc_feature (4)..(8): n is a, c, g, or t
  misc_feature (10)..(35): n is a, c, g, or t
  misc_feature (39)..(41): n is a, c, g, or t
  misc_feature (43)..(43): n is a, c, g, or t
  misc_feature (68)..(68): n is a, c, g, or t
  misc_feature (72)..(72): n is a, c, g, or t
  misc_feature (654)..(657): n is a, c, g, or t
  Peptide Sequence Number=SeqID_11855
  Probeset Number=SeqID_20217
ngannnnncnnnnnnnnnnnnnnnnnnnnnnnnnncctnnnanatggtcgggcggctgggcggcgatnaatncgtgctgatcggccccggccccgcgctggcgcgcggcgacgcggcgccaggccacgaggccgagcgcggcgatgccgaggaagcggcgcgctcgctcgaagaccgcgccgccgccgccaccgtcggccgctaccagctcggcgagaccgccctgccctacgagggcgccagcgtcggcgtggtggcgctcgatccgcgcggcctggcggccgaggaagcggtgcgcctggccgatgcccgcatgtacgagatcaagcgcgcccgcaaggcggcccgcgtcatccactgagtcccccgcccgcgcagggcggcggcccggcccctgatccgggccgggccgggcttgcacaacacataagcaactgctaatgtgttgccatgatcgaaaacgacatcttcaaggccctggccgacccgacccgccgcgcgctgttcgacaagctcgcggcgggcgccatgaacgccagcgcgctgcgcgagggcctggacatcagccagcccgcggtctcgcagcacctggcggtgctgcgccaggcgcggctggtgcgcgaggaacgccagggtcgtttcgtcaattacgannnn

SEQ ID NO: 5815 - DNA, 567 bp, Zea mays
  misc_feature (1)..(5): n is a, c, g, or t
  misc_feature (565)..(565): n is a, c, g, or t
  Peptide Sequence Number=SeqID_11856
  Probeset Number=SeqID_20218
nnnnnggaagacgaacttcccgacgaccttaccgtggttaaaacagacatcgtcgcagacaaaaaggccatcgccgccaagctcaaagaaatccgtgatcacaatgaggcggtgcgcaagcgcatagccgccggcgaagatgcggagcacgaaattatccccgaaccgaaatgggctcaccttgaacgcggcgacagttcgattcgcatcaggtgacgccagcatgatcagcaatcacctcagcctgatcgagcagcaacgccaacacgcagaatcaatatcggaacgtgttgctcagtttttgcagccggcgggacgatctatcagggcgaaagcctggccatcaacacgcaacctccgaagcgcaccgcaaagatcgatcccgaaacagtcctcaagcgccgtaagcctccgatcacgagagccgagcgtgaagcgctgcgcaaactcgcggaggcgctatgagcaggaagcgcaagcctcacaacctcaaggcccgcattgaacgctcgtgccgcgctctactcgcaaccaaccacgtagcggttgtgaacatcgacccaanct

SEQ ID NO: 5816 - DNA, 567 bp, Zea mays
  misc_feature (3)..(3): n is a, c, g, or t
  misc_feature (563)..(567): n is a, c, g, or t
  Peptide Sequence Number=SeqID_11857
  Probeset Number=SeqID_20219
agnttgggtcgatgttcacaaccgctacgtggttggttgcgagtagagcgcggcacgagcgttcaatgcgggccttgaggttgtgaggcttgcgcttcctgctcatagcgcctccgcgagtttgcgcagcgcttcacgctcggctctcgtgatcggaggcttacggcgcttgaggactgtttcgggatcgatctttgcggtgcgcttcggaggttgcgtgttgatggccaggctttcgccctgatagatcgtcccgccggctgcaaaaactgagcaacacgttccgatattgattctgcgtgttggcgttgctgctcgatcaggctgaggtgattgctgatcatgctggcgtcacctgatgcgaatcgaactgtcgccgcgttcaaggtgagcccatttcggttcggggataatttcgtgctccgcatcttcgccggcggctatgcgcttgcgcaccgcctcattgtgatcacggatttctttgagcttggcggcgatggcctttttgtctgcgacgatgtctgttttaaccacggtaaggtcgtcgggaagttcgtcttccnnnnn

SEQ ID NO: 5817 - DNA, 896 bp, Zea mays
  misc_feature (758)..(762): n is a, c, g, or t
  misc_feature (770)..(787): n is a, c, g, or t
  misc_feature (799)..(803): n is a, c, g, or t
  misc_feature (811)..(815): n is a, c, g, or t
  misc_feature (824)..(832): n is a, c, g, or t
  misc_feature (834)..(844): n is a, c, g, or t
  misc_feature (851)..(882): n is a, c, g, or t
  misc_feature (884)..(886): n is a, c, g, or t
  misc_feature (889)..(894): n is a, c, g, or t
  Peptide Sequence Number=SeqID_11858
  Probeset Number=SeqID_20220
gacaaaggccactctgaccatgccggtcagcctttgcaggcgagcgtcttcagggtaggacttgaagtggttgaggtgagtgagcaactgatattcccataagcgcttctctaccagttgctcctggtggttggggccgctcgtgcaggcacaaagcagtaagacaagtgcgatccagctgtatttcataaacgcagttccgttgacgtttggtttgcgaagtgaggctaattatccggcgttatgctggctatcgctttgcgatcagagcgggtagctcgtcgagcgattttatagtgtcttgcgcgggagcaaggcctgcgggccattgatgaaacccctgaaaccatacagcgtacatcccggcggcttttgccccttggtagtcgtttagagggtgatcaccgacaaaccagcagtgctcgggaagaacgcctaaccgtgcagccgcctcatggaagatttcccgtgcaggtttggctgtcccgaacgcttgcgagctgacaacggtaccaaccgactgagcgaagggcaatgcagcgatggttttccttcgcgagtgctcggcgccattggaaacaatcccgaccttgatgtgtctgtgctccagcgcctgaatcaacgctgcagcgcccggcattggcacggctgcggccggaaaatggctgacccagtgctcgaccaggacctcagccggctgcggcactcgccacggcagttggttggcaagggtgtggcctacagcttcgcggatcgannnnnatgcggannnnnnnnnnnnnnnnnncgccgctgtctnnnnncaaaatcnnnnncgtgatgtnnnnnnnnngnnnnnnnnnnngatgtgnnnnnnnnnnnnnnnnnnnnnnnnnnnnnnnntnnngtnnnnnnct

SEQ ID NO: 5818 - DNA, 896 bp, Zea mays
  misc_feature (3)..(8): n is a, c, g, or t
  misc_feature (11)..(13): n is a, c, g, or t
  misc_feature (15)..(46): n is a, c, g, or t
  misc_feature (53)..(63): n is a, c, g, or t
  misc_feature (65)..(73): n is a, c, g, or t
  misc_feature (82)..(86): n is a, c, g, or t
  misc_feature (94)..(98): n is a, c, g, or t
  misc_feature (110)..(127): n is a, c, g, or t
  misc_feature (135)..(139): n is a, c, g, or t
  Peptide Sequence Number=SeqID_11859
  Probeset Number=SeqID_20221
agnnnnnnacnnnannnnnnnnnnnnnnnnnnnnnnnnnnnnnnnncacatcnnnnnnnnnnncnnnnnnnnnacatcacgnnnnngattttgnnnnnagacagcggcgnnnnnnnnnnnnnnnnnntccgcatnnnnntcgatccgcgaagctgtaggccacacccttgccaaccaactgccgtggcgagtgccgcagccggctgaggtcctggtcgagcactgggtcagccattttccggccgcagccgtgccaatgccgggcgctgcagcgttgattcaggcgctggagcacagacacatcaaggtcgggattgtttccaatggcgccgagcactcgcgaaggaaaaccatcgctgcattgcccttcgctcagtcggttggtaccgttgtcagctcgcaagcgttcgggacagccaaacctgcacgggaaatcttccatgaggcggctgcacggttaggcgttcttcccgagcactgctggtttgtcggtgatcaccctctaaacgactaccaaggggcaaaagccgccgggatgtacgctgtatggtttcaggggtttcatcaatggcccgcaggccttgctcccgcgcaagacactataaaatcgctcgacgagctacccgctctgatcgcaaagcgatagccagcataacgccggataattagcctcacttcgcaaaccaaacgtcaacggaactgcgtttatgaaatacagctggatcgcacttgtcttactgctttgtgcctgcacgagcggccccaaccaccaggagcaactggtagagaagcgcttatgggaatatcagttgctcactcacctcaaccacttcaagtcctaccctgaagacgctcgcctgcaaaggctgaccggcatggtcagagtggcctttgtc

SEQ ID NO: 5819 - DNA, 909 bp, Zea mays
  misc_feature (1)..(4): n is a, c, g, or t
  misc_feature (746)..(747): n is a, c, g, or t
  misc_feature (753)..(753): n is a, c, g, or t
  misc_feature (757)..(765): n is a, c, g, or t
  misc_feature (770)..(771): n is a, c, g, or t
  misc_feature (779)..(784): n is a, c, g, or t
  misc_feature (786)..(787): n is a, c, g, or t
  misc_feature (789)..(793): n is a, c, g, or t
  misc_feature (797)..(799): n is a, c, g, or t
  misc_feature (803)..(812): n is a, c, g, or t
  misc_feature (815)..(823): n is a, c, g, or t
  misc_feature (825)..(833): n is a, c, g, or t
  misc_feature (837)..(883): n is a, c, g, or t
  misc_feature (885)..(902): n is a, c, g, or t
  misc_feature (909)..(909): n is a, c, g, or t
  Peptide Sequence Number=SeqID_11860
  Probeset Number=SeqID_20222
nnnnagccgggcctgatgcacggctgcggccacgacggccatacggcggtgctgatcggggccgccaagtacctggcgcagacgcgcaatttcgatggcacggccgtcctcatcttccagccggccgaggaagggcgcggcggcgccaaagccatgatggaggatgggttattcgacacctttccctgtgacgccatctatgcgctgcacaactggcccggcctgaagcctggcaccatcggcatcaatccggggccgatgatggcggcggccgaccgcttcgagatcctgatcaccggccgcggcggccacggcgcgcatccttatcagacgatcgacccggtgacgatcgccggccagatcatcacggcgctgcagaccatcgtgtcgcgcaacgtcaatccgctggattccgccgtcgtgtccatcggctcgctgcaggcgggccatcccggcgcgatgagcgtgattccgcgcgaggcccggatggtgggcacggtgcgcacgttccgcaagtcggtgcaggagatggtcgagacgcgcatgcgcgaactggtcacggcgattgccagcgcctttggcggcaccgccgaactgacctacgaacgcatctatcccgcgaccctgaatacgccgcagcacgccaacctggtcgccgacatcgccaccgagatgatcggcaaggaaaacgtggtgcgtgatctggtaccgtcgatggggtcggaggatttctccttcatgctgcnnagcaancctnnnnnnnnnttccnnctggggcnnnnnngnncnnnnnccgnnngcgnnnnnnnnnnctnnnnnnnnnannnnnnnnntgcnnnnnnnnnnnnnnnnnnnnnnnnnnnnnnnnnnnnnnnnnnnnnnngnnnnnnnnnnnnnnnnnnttaaaan

SEQ ID NO: 5820 - DNA, 870 bp, Zea mays
  misc_feature (1)..(2): n is a, c, g, or t
  misc_feature (4)..(15): n is a, c, g, or t
  misc_feature (19)..(21): n is a, c, g, or t
  misc_feature (23)..(23): n is a, c, g, or t
  misc_feature (25)..(25): n is a, c, g, or t
  misc_feature (34)..(35): n is a, c, g, or t
  misc_feature (37)..(39): n is a, c, g, or t
  misc_feature (47)..(48): n is a, c, g, or t
  misc_feature (75)..(77): n is a, c, g, or t
  misc_feature (80)..(80): n is a, c, g, or t
  misc_feature (114)..(114): n is a, c, g, or t
  misc_feature (117)..(117): n is a, c, g, or t
  misc_feature (867)..(870): n is a, c, g, or t
  Peptide Sequence Number=SeqID_11861
  Probeset Number=SeqID_20223
nnannnnnnnnnnnngatnnntnangccgaaaanntnnncagcgagnngtttgtgtgggacgccctcaagcgtgnnntgnaatcgcgcaagctgaagatggaatcaccgttggncgnactgggccgcctggccacggtgaccctcaacccgcaagtgatcccgttgcagctcaaggtcatcatcattggttcccgccagctgtactacgcgttgcaggacgcggatccggacttccaggagatgttccgggtgctggtggacttcgacgaagacatcccgatggtggatgaaagcctggagcagttcgcccagttgctgaaaacccgcacctcggaagaaggcatggcgccgttgacctcggatgcggtcgcgcggctggcgacctacagcgcgcggctggcggagaaccaggggcgcttgtcggcgcgtatcggtgatttgttccaactggtcagcgaggcggacttcattcgtcacctggcgggcgatgagcgcaccgactccgggcacatcgagcgtgcactcaaggccaaggccacgcgcaccgggcgggtgtcggcgcggattctcgacgacatgctcgccggggtgatcctgatcgacaccgccggtgcggcggtgggcaagtgcaacgggctgacagtgctggaagtgggggactcggcattcggcgtgccggcgcggatctctgcatcggtgtacccgggcggcagcggcattgtggatatcgagcgtgaagttaacctcggccagccgattcactccaagggcgtgatgatcctcaccggttacctgggcagccggtatgcccaggaattcccgttggcgatctcggcgagtattgccctggagcagtcctacgggtnnnn

SEQ ID NO: 5821 - DNA, 674 bp, Zea mays
  misc_feature (1)..(4): n is a, c, g, or t
  misc_feature (638)..(674): n is a, c, g, or t
  Peptide Sequence Number=SeqID_11862
  Probeset Number=SeqID_20224
nnnngcagcctcaacgccctgaccgaattcaacagcgagttccaggaaatgatcacccgccacgcctggggtgatatctggacccgcccgggcctgccgcggcatacccgcagcctgatcaccatcgccatgctgatcggcatgaaccgcaccgaagagctgaagctgcacctgcgggccgccgcgagcaacggcgtgacccgcgccgagatcaaggaagtgctgatgcagagcgcaatctactgcgggatcccggcggcgaatgcgacgtttcatttggctgagtcggtgtgggatgagttgggggttgaatcgcgcgatccagtctgattgaacccccgcaggacgcgtctgctatgtgtactgggtgcgtaacgggcggcccatttcctctcggagagcattttccgtaaagggcttgggattggttgtcgtgggttcggttgatcgatgattgtcgaagtcaaaaggcagcgcaatcgtaggcaggcctacagcttgccgttcggcgttgggttcgccgccggggttctccgggatgccggtatcgccttcgagaaaggttcccgtggcaccgttataggcatgggccatttcatggtagagggcgttgactggggcgctgtcttcatccagtnnnnnnnnnnnnnnnnnnnnnnnnnnnnnnnnnnnnn

SEQ ID NO: 5822 - DNA, 794 bp, Zea mays
  misc_feature (1)..(5): n is a, c, g, or t
  misc_feature (776)..(776): n is a, c, g, or t
  misc_feature (794)..(794): n is a, c, g, or t
  Peptide Sequence Number=SeqID_11863
  Probeset Number=SeqID_20225
nnnnnggacagcgaactgccgtcgggcctgcaactgggtaccggtgtggccatcgttggcactcagaagaacttcagcgccggtaacttgcagcaaaccggccagccgctggacttggcggtcaacggtaagggtttcttccagatcctgcagccggacggcaccaccacctacacccgcgacggtacgttccacctggacgccaatggccaggtcgtgaccgccaacggtttcgcgctggagccggcgattgtggtgccgaacaacgcccagactttcaccgtcggcaacgacggcaccgtgtcgatcactgtggccggtaacccggcctcccaggtgatcggcaacctgcaaaccgccgacttcatcaacccggccggcctgcaggcgattggtaacaacctgttcctggaaaccgcgtccagcggcgcgccgcaaatcggcacccctggccttaacggttttggtaccaccctgcaaagcaccctggaaacgtccaacgtcagcaccgttgaagagatggtcaacatgatcaccacgcagcgcgcctacgagatgaactccaaggtgatttccaccgccgaccagatgctttcgttcgtaacgcagaatctgtaatcaagtctatgggggcgcccttgaaggcgcctgcaacaccgtgaggtatgggtcatgaatcgctatgtttctgttctggcattgagtgggattgctgcgctggcgggctgtgtcgccccgacgccaaagcccaatgatccgtactatgcgccggtgtngccgcgcacgccgttgcn

SEQ ID NO: 5823 - DNA, 526 bp, Zea mays
  misc_feature (1)..(2): n is a, c, g, or t
  misc_feature (8)..(11): n is a, c, g, or t
  Peptide Sequence Number=SeqID_11864
  Probeset Number=SeqID_20226
nngggtcnnnngatatagatcttcagcgctgaatagcgcgcatccatggcggcgagccaccggcgcaggccgtcggcgccgtcggtgcgcgcgatctgcgtcgcatcgcgggtgaggttgccgggattcaggccgtccagcgaatcgacgcggtaccaggccaccgccgcggtcagcatcatgccgcagaccgtgatgatggccatcgcgccccagaaggtcaggaaggcgcgccagaacagcgagcgtatcggcagccaggccatcaggccgcgcccgccagcacgtagcccagcccccgcaggttgcggatggcgggggcgtcgccggcctggtccagctgcagtttcctgcgcaggctgctgatgtgggtgtcgatgctgcggtcgtagcggtcggcgctgcggcccagcgcgtacaggctgatctggtcgcgcgccaccacctggcccggcgcgcgcatcaggatttccaggatgcgctgttcggcgccggtcagcagcacctcttgcgcgccaaggcgggc

SEQ ID NO: 5824 - DNA, 526 bp, Zea mays
  misc_feature (516)..(519): n is a, c, g, or t
  misc_feature (525)..(526): n is a, c, g, or t
  Peptide Sequence Number=SeqID_11865
  Probeset Number=SeqID_20227
gcccgccttggcgcgcaagaggtgctgctgaccggcgccgaacagcgcatcctggaaatcctgatgcgcgcgccgggccaggtggtggcgcgcgaccagatcagcctgtacgcgctgggccgcagcgccgaccgctacgaccgcagcatcgacacccacatcagcagcctgcgcaggaaactgcagctggaccaggccggcgacgcccccgccatccgcaacctgcgggggctgggctacgtgctggcgggcgcggcctgatggcctggctgccgatacgctcgctgttctggcgcgccttcctgaccttctggggcgcgatggccatcatcacggtctgcggcatgatgctgaccgcggcggtggcctggtaccgcgtcgattcgctggacggcctgaatcccggcaacctcacccgcgatgcgacgcagatcgcgcgcaccgacggcgccgacggcctgcgccggtggctcgccgccatggatgcgcgctattcagcgctgaagatctatatcnnnngacccnn

SEQ ID NO: 5825 - DNA, 360 bp, Zea mays
  misc_feature (1)..(5): n is a, c, g, or t
  Peptide Sequence Number=SeqID_11866
  Probeset Number=SeqID_20228
nnnnncgacccggccagcctgggcttcatggacacggtcatcgtccacgtgaccctggaaagccacagcgaggaaacgctctatgagttcgggcgggcgctggcgcagattccggaggtgctggaagccttcctggtgtcgggcgactacgactattacatccgcatcgccgtgcgcgacacccgcgactacgagcggctgctgcgcgagcagctgtatcgcatccccggcatccgccacagcaaatcctgcttcgtattgcggcgcctgaaggaaaccatgctgccgctgaacgggccgacgacctgaatcctggcgctcagcgcagcacgcagtccaccggctgcgccggctcgggca

SEQ ID NO: 5826 - DNA, 1044 bp, Zea mays
  misc_feature (1)..(4): n is a, c, g, or t
  misc_feature (727)..(730): n is a, c, g, or t
  misc_feature (785)..(786): n is a, c, g, or t
  misc_feature (789)..(795): n is a, c, g, or t
  misc_feature (797)..(798): n is a, c, g, or t
  misc_feature (803)..(805): n is a, c, g, or t
  misc_feature (819)..(833): n is a, c, g, or t
  misc_feature (837)..(837): n is a, c, g, or t
  misc_feature (842)..(856): n is a, c, g, or t
  misc_feature (863)..(867): n is a, c, g, or t
  misc_feature (874)..(883): n is a, c, g, or t
  misc_feature (886)..(891): n is a, c, g, or t
  misc_feature (894)..(898): n is a, c, g, or t
  misc_feature (901)..(914): n is a, c, g, or t
  misc_feature (916)..(934): n is a, c, g, or t
  misc_feature (936)..(975): n is a, c, g, or t
  misc_feature (979)..(996): n is a, c, g, or t
  misc_feature (998)..(1020): n is a, c, g, or t
  misc_feature (1022)..(1022): n is a, c, g, or t
  misc_feature (1024)..(1028): n is a, c, g, or t
  misc_feature (1030)..(1030): n is a, c, g, or t
  misc_feature (1036)..(1041): n is a, c, g, or t
  misc_feature (1043)..(1044): n is a, c, g, or t
  Peptide Sequence Number=SeqID_11867
  Probeset Number=SeqID_20229
nnnncgcccctgccagcggcttccactgctccctctgtgcaggcccccgtcgtagtcaccagcaaatcatcccggtatatcggtcacgacagacccctggatttcatgtatttctcttccctttccaagctcgccgcggatcagaaccccctcgacaaaaacgaaaaaaaatacaccaacaccgacatattgcgtcatgaccagaatgtgaagatttaccaggaaatcacctacgtcagcaaaggcgggaagcctgtaggcgctgccggtaacgaattcatcatcgagaccgccaatcacgacgacaaggtggtcatcaaaaaaagtccggacaacaatctgatcgccatcatcaacaacacgccctatcaactgaacctgcttcgttcccctgatggcagtgaaacccaaccactgcggatcagaaccaatggcggcaacgattgcgtgctgatcgatccacaggttgataacgatattcgcattgagttgggcgctggtgacgattacgcccaggcgggctccggcaatacccggctatacggcggtgcaggtaacgacaggctcaaactcgggagcggcaatggcatcgcgatgggcgatgatggcgatgacctgctgatcgcaggctcaggcaacagcatcctcaaaggcaataacggcaacgatcgcatgcaggcaggccaaggcctccctgagcgccgcctgctcatggacggcggtgatnnnnacgacttcatgattgtcaccccgcaatgacacaaacattccggcggtcatgcacnnagnnnnnnngnnaaaannngattgtcactcacnnnnnnnnnnnnnnntatnccggnnnnnnnnnnnnnnntgtcagnnnnncaaaaannnnnnnnnnccnnnnnnttnnnnncannnnnnnnnnnnnnannnnnnnnnnnnnnnnnnntnnnnnnnnnnnnnnnnnnnnnnnnnnnnnnnnnnnnnnnnaaannnnnnnnnnnnnnnnnnannnnnnnnnnnnnnnnnnnnnnnancnnnnnanaaaaannnnnnann

SEQ ID NO: 5827 - DNA, 1044 bp, Zea mays
  misc_feature (1)..(2): n is a, c, g, or t
  misc_feature (4)..(9): n is a, c, g, or t
  misc_feature (15)..(15): n is a, c, g, or t
  misc_feature (17)..(21): n is a, c, g, or t
  misc_feature (23)..(23): n is a, c, g, or t
  misc_feature (25)..(47): n is a, c, g, or t
  misc_feature (49)..(66): n is a, c, g, or t
  misc_feature (70)..(109): n is a, c, g, or t
  misc_feature (111)..(129): n is a, c, g, or t
  misc_feature (131)..(144): n is a, c, g, or t
  misc_feature (147)..(151): n is a, c, g, or t
  misc_feature (154)..(159): n is a, c, g, or t
  misc_feature (162)..(171): n is a, c, g, or t
  misc_feature (178)..(182): n is a, c, g, or t
  misc_feature (189)..(203): n is a, c, g, or t
  misc_feature (208)..(208): n is a, c, g, or t
  misc_feature (212)..(226): n is a, c, g, or t
  misc_feature (240)..(242): n is a, c, g, or t
  misc_feature (247)..(248): n is a, c, g, or t
  misc_feature (250)..(256): n is a, c, g, or t
  misc_feature (259)..(260): n is a, c, g, or t
  misc_feature (315)..(318): n is a, c, g, or t
  misc_feature (1041)..(1044): n is a, c, g, or t
  Peptide Sequence Number=SeqID_11868
  Probeset Number=SeqID_20230
nntnnnnnntttttntnnnnngntnnnnnnnnnnnnnnnnnnnnnnntnnnnnnnnnnnnnnnnnntttnnnnnnnnnnnnnnnnnnnnnnnnnnnnnnnnnnnnnnnnannnnnnnnnnnnnnnnnnntnnnnnnnnnnnnnntgnnnnnaannnnnnggnnnnnnnnnntttttgnnnnnctgacannnnnnnnnnnnnnnccggnatannnnnnnnnnnnnnngtgagtgacaatcnnnttttnncnnnnnnnctnngtgcatgaccgccggaatgtttgtgtcattgcggggtgacaatcatgaagtcgtnnnnatcaccgccgtccatgagcaggcggcgctcagggaggccttggcctgcctgcatgcgatcgttgccgttattgcctttgaggatgctgttgcctgagcctgcgatcagcaggtcatcgccatcatcgcccatcgcgatgccattgccgctcccgagtttgagcctgtcgttacctgcaccgccgtatagccgggtattgccggagcccgcctgggcgtaatcgtcaccagcgcccaactcaatgcgaatatcgttatcaacctgtggatcgatcagcacgcaatcgttgccgccattggttctgatccgcagtggttgggtttcactgccatcaggggaacgaagcaggttcagttgatagggcgtgttgttgatgatggcgatcagattgttgtccggactttttttgatgaccaccttgtcgtcgtgattggcggtctcgatgatgaattcgttaccggcagcgcctacaggcttcccgcctttgctgacgtaggtgatttcctggtaaatcttcacattctggtcatgacgcaatatgtcggtgttggtgtattttttttcgtttttgtcgagggggttctgatccgcggcgagcttggaaagggaagagaaatacatgaaatccaggggtctgtcgtgaccgatataccgggatgatttgctggtgactacgacgggggcctgcacagagggagcagtggaagccgctggcaggggcgnnnn

SEQ ID NO: 5828 - DNA, 872 bp, Zea mays
  misc_feature (1)..(4): n is a, c, g, or t
  misc_feature (680)..(684): n is a, c, g, or t
  misc_feature (710)..(710): n is a, c, g, or t
  misc_feature (751)..(751): n is a, c, g, or t
  misc_feature (765)..(767): n is a, c, g, or t
  misc_feature (769)..(778): n is a, c, g, or t
  misc_feature (781)..(806): n is a, c, g, or t
  misc_feature (808)..(826): n is a, c, g, or t
  misc_feature (828)..(839): n is a, c, g, or t
  misc_feature (842)..(857): n is a, c, g, or t
  misc_feature (859)..(866): n is a, c, g, or t
  misc_feature (869)..(870): n is a, c, g, or t
  misc_feature (872)..(872): n is a, c, g, or t
  Peptide Sequence Number=SeqID_11869
  Probeset Number=SeqID_20231
nnnntgctggcgcgccatcccgccaccgcgcgcttcatcagcgccaagctggccgcctacttcatgggcgacgcgccgccggcctcggtcatcgacaggatggcccgcaccttccaggccagcgacggcgacatcgccgccacgctgcagacgctgtacggctcgccggaattcacgcagtcgctcaggaccggcgtgttcaaggaccccgtgcattacgtgtactcggccttgcggctgacctacgccgacctgcctcccatcgccaatccgcgcccggccatggccatgctcaggcagctgggccagccgctgaaccagcgcctgacgcccgacggctatccgcaggcgcagtcggactgggccggctcgggccagatgaccgcgcgcttcgaagtggcgcgcgccatcgccgccgcgccgcaggccttctaccgcgagggcgacgacaaggggcctgtggaattgccgcgcctgcccgacctgctgcgcgagaacgccgccgacggcctgttcgcgcgcctgtcgcccgccacccgcgacgccatcgcgcaggcgaagaaccccaaggacgccaacacctatctgctggcctcgcccgaattcatgcggcgctgacccgccgcgggagacacatcatgcatcgccgccgcatcctgcaactcctggcctcggcgccnnnnngtcgccggcgccagccgcctgtacgncgcgccggccgccgccggcaacaagctgctggtcgtcttcntgcgcggcgcctannncnnnnnnnnnntgnnnnnnnnnnnnnnnnnnnnnnnnnntnnnnnnnnnnnnnnnnnnntnnnnnnnnnnnngcnnnnnnnnnnnnnnnngnnnnnnnntgnncn

SEQ ID NO: 5829 - DNA, 817 bp, Zea mays
  misc_feature (1)..(3): n is a, c, g, or t
  misc_feature (735)..(737): n is a, c, g, or t
  misc_feature (746)..(747): n is a, c, g, or t
  misc_feature (752)..(753): n is a, c, g, or t
  misc_feature (755)..(757): n is a, c, g, or t
  misc_feature (762)..(763): n is a, c, g, or t
  misc_feature (768)..(817): n is a, c, g, or t
  Peptide Sequence Number=SeqID_11870
  Probeset Number=SeqID_20232
nnngcgtgcgcaggtggatgacacctgcggcatgctggaaactcgcgccgaagtggacaaggacatcgcggaattgaacggcaatacgtccgacttccgcctctccgaggcccaagctttcctggaaagcatgaaccagaccatggccagctcgctgttctacggcgatcagtcggtcaatcccgagcgcatcaccggcctggcgccccgcttctcgctgaagtcggcccccaacggcggcaatatcatcgacgcaggcggtaccggcgccgacaacacgtcggtctggttggtggtgtggggcaagaacaccgcgcacggcatcttccccaagggctccaaggccggcctgatccacgaggacatgggtctgatcgacgcgttcgactccaacaacaaccgcttccgcgcctacgccgaccactggcaatggaaatcaggcctgacgttgcgcgactggcgctacgtggtgcgtatcgcgaacgtggacatcagcgacctggtgggccagaccggcacgcaagcgcccacggccgccaccgccatcatgaagctgatgctgcgggcgatggcgcgcattcccgcgatgggtatgggcactccggtgttctacgccaaccgcacggtcaaggaaatgctgtcgatcgccgccctggacaagtcgcagaatgcgctggccatcgaggccgctaccaaccagttcggcacggttgcaccgggtagcgtcggcaacgnnncgctgcggnncttcnncnnnccggnncgcannnnnnnnnnnnnnnnnnnnnnnnnnnnnnnnnnnnnnnnnnnnnnnnnn

SEQ ID NO: 5830 - DNA, 1050 bp, Zea mays
  misc_feature (1)..(3): n is a, c, g, or t
  misc_feature (690)..(691): n is a, c, g, or t
  misc_feature (696)..(696): n is a, c, g, or t
  misc_feature (713)..(713): n is a, c, g, or t
  misc_feature (741)..(745): n is a, c, g, or t
  misc_feature (752)..(756): n is a, c, g, or t
  misc_feature (758)..(759): n is a, c, g, or t
  misc_feature (761)..(763): n is a, c, g, or t
  misc_feature (768)..(775): n is a, c, g, or t
  misc_feature (778)..(779): n is a, c, g, or t
  misc_feature (786)..(792): n is a, c, g, or t
  misc_feature (795)..(800): n is a, c, g, or t
  misc_feature (805)..(805): n is a, c, g, or t
  misc_feature (809)..(818): n is a, c, g, or t
  misc_feature (827)..(831): n is a, c, g, or t
  misc_feature (833)..(835): n is a, c, g, or t
  misc_feature (841)..(853): n is a, c, g, or t
  misc_feature (861)..(1050): n is a, c, g, or t
  Peptide Sequence Number=SeqID_11871
  Probeset Number=SeqID_20233
nnnattccacaccgcctgcaggctgctggacagcgtgcgccactggggttggccttcgatcatgcggttccagtaattgagctgttgctcctggaaggcacagagcatgacgggcgccagcacattgagcatctgggcgatctcgccgatgcgcaccggcaagtgcagcggtgggtcgctgagcggctgctgggtcaagaaatgcacaccctcgatgtaaagggtcgggaggcccgatacagcctggtgcgcaaggatatcggtgagggtctggtagcggggttcgagtggctgaacctggtcaccgacaaccccccaggcgggtgtgcagaccaggacgatatccgggtccagtgccaaggcgggatataacgtgtgcagtgaatagcgcaactgcaccgaagcggtctcgcgaaacgaggggcccaggcacagttgggtgagcaggctttcaggcgttggacggagcggggtgggtgtggtcatggcgggcatccctggcgtatgaaaacgacccgaggcgatgcctcggggggttcatgctagggagcggcctggcagatcagggggtggatatatagggcgaccagcctcaggcgagttcgccgcacaggtccagttccaccaggcggcgaacctcggtcaccggcaggccggcaccgagcagtgcgttgagcttgccgaacgcgnnctcgngggtcatcccgcccacnctgacaacacgcccacgccacgcaagcnnnnnaccggcnnnnnanncnnnccagnnnnnnnncgnncttcatnnnnnnncgnnnnnncccancacnnnnnnnnnngttatcctnnnnngnnntgaagnnnnnnnnnnnnngggggggnnnnnnnnnnnnnnnnnnnnnnnnnnnnnnnnnnnnnnnnnnnnnnnnnnnnnnnnnnnnnnnnnnnnnnnnnnnnnnnnnnnnnnnnnnnnnnnnnnnnnnnnnnnnnnnnnnnnnnnnnnnnnnnnnnnnnnnnnnnnnnnnnnnnnnnnnnnnnnnnnnnnnnnnnnnnnnnnnnnnnnnnnnnnnn

SEQ ID NO: 5831 - DNA, 1050 bp, Zea mays
  misc_feature (1)..(190): n is a, c, g, or t
  misc_feature (198)..(210): n is a, c, g, or t
  misc_feature (216)..(218): n is a, c, g, or t
  misc_feature (220)..(224): n is a, c, g, or t
  misc_feature (233)..(242): n is a, c, g, or t
  misc_feature (246)..(246): n is a, c, g, or t
  misc_feature (251)..(256): n is a, c, g, or t
  misc_feature (259)..(265): n is a, c, g, or t
  misc_feature (272)..(273): n is a, c, g, or t
  misc_feature (276)..(283): n is a, c, g, or t
  misc_feature (288)..(290): n is a, c, g, or t
  misc_feature (292)..(293): n is a, c, g, or t
  misc_feature (295)..(299): n is a, c, g, or t
  misc_feature (306)..(310): n is a, c, g, or t
  misc_feature (338)..(338): n is a, c, g, or t
  misc_feature (355)..(355): n is a, c, g, or t
  misc_feature (360)..(361): n is a, c, g, or t
  misc_feature (1048)..(1050): n is a, c, g, or t
  Peptide Sequence Number=SeqID_11872
  Probeset Number=SeqID_20234
nnnnnnnnnnnnnnnnnnnnnnnnnnnnnnnnnnnnnnnnnnnnnnnnnnnnnnnnnnnnnnnnnnnnnnnnnnnnnnnnnnnnnnnnnnnnnnnnnnnnnnnnnnnnnnnnnnnnnnnnnnnnnnnnnnnnnnnnnnnnnnnnnnnnnnnnnnnnnnnnnnnnnnnnnnnnnnnnnnnnnnnnnnnnnncccccccnnnnnnnnnnnnncttcannncnnnnnaggataacnnnnnnnnnngtgntgggnnnnnncgnnnnnnnatgaagnncgnnnnnnnnctggnnngnntnnnnngccggtnnnnngcttgcgtggcgtgggcgtgttgtcagngtgggcgggatgacccncgagnncgcgttcggcaagctcaacgcactgctcggtgccggcctgccggtgaccgaggttcgccgcctggtggaactggacctgtgcggcgaactcgcctgaggctggtcgccctatatatccaccccctgatctgccaggccgctccctagcatgaaccccccgaggcatcgcctcgggtcgttttcatacgccagggatgcccgccatgaccacacccaccccgctccgtccaacgcctgaaagcctgctcacccaactgtgcctgggcccctcgtttcgcgagaccgcttcggtgcagttgcgctattcactgcacacgttatatcccgccttggcactggacccggatatcgtcctggtctgcacacccgcctggggggttgtcggtgaccaggttcagccactcgaaccccgctaccagaccctcaccgatatccttgcgcaccaggctgtatcgggcctcccgaccctttacatcgagggtgtgcatttcttgacccagcagccgctcagcgacccaccgctgcacttgccggtgcgcatcggcgagatcgcccagatgctcaatgtgctggcgcccgtcatgctctgtgccttccaggagcaacagctcaattactggaaccgcatgatcgaaggccaaccccagtggcgcacgctgtccagcagcctgcaggcggtgtggaatnnn

SEQ ID NO: 5832 - DNA, 813 bp, Zea mays
  misc_feature (1)..(1): n is a, c, g, or t
  misc_feature (3)..(3): n is a, c, g, or t
  misc_feature (5)..(16): n is a, c, g, or t
  misc_feature (21)..(56): n is a, c, g, or t
  misc_feature (58)..(70): n is a, c, g, or t
  misc_feature (78)..(87): n is a, c, g, or t
  misc_feature (89)..(90): n is a, c, g, or t
  misc_feature (92)..(94): n is a, c, g, or t
  misc_feature (105)..(111): n is a, c, g, or t
  misc_feature (116)..(116): n is a, c, g, or t
  misc_feature (813)..(813): n is a, c, g, or t
  Peptide Sequence Number=SeqID_11873
  Probeset Number=SeqID_20235
ngnannnnnnnnnnnnggggnnnnnnnnnnnnnnnnnnnnnnnnnnnnnnnnnnnnannnnnnnnnnnnnaccggtcnnnnnnnnnnanngnnnccccccgcccnnnnnnngtccnttgcatcaagaggcgatcgactccatgtccgacaccattctcgtcatcaacgccggcagttccagcatcaagttctacctgtacgacatcgacgacaagcaggccctggcgccgcgcctgggcggccagctcgaaggcatcggcaccagccatccgcgcctgcgggtgcgcgacgccgccggccagacgctggtggagcgcgacatcgcgcccagccacgcgcccgacgtgccaaacggccaggaagtggtcggcacctggctcagcggccacctgggcggcgcgccgctggccgtcggccaccgcgtggtgcacggcggccccgacctgtccgaaccggtgctgatcgacgatgacatcctcgcccggctcgaggccttcacgccgctggcgccgctgcaccagcccaacaacctggcgccgatccgcgtgatccgcgagcggcgtccgtggattccgcaggtggcgtgcttcgacaccgccttccaccgcagccattcggacgtggccgaccgctacgccctgcccgagtcgctgtaccagcagggcgtgcggcgctacggcttccatggcctgtcctacgaatacatcgcgcagcggctgcgccaggcgctgcccgagatcgccatgggcaagatcatcgccgcgcacctgggctcgggcgtgtcggcctgcgccatgcaccagggcaagagcn

SEQ ID NO: 5833 - DNA, 913 bp, Zea mays
  misc_feature (1)..(6): n is a, c, g, or t
  misc_feature (698)..(699): n is a, c, g, or t
  misc_feature (715)..(717): n is a, c, g, or t
  misc_feature (719)..(719): n is a, c, g, or t
  misc_feature (721)..(721): n is a, c, g, or t
  misc_feature (731)..(733): n is a, c, g, or t
  misc_feature (735)..(735): n is a, c, g, or t
  misc_feature (738)..(745): n is a, c, g, or t
  misc_feature (747)..(749): n is a, c, g, or t
  misc_feature (753)..(760): n is a, c, g, or t
  misc_feature (763)..(772): n is a, c, g, or t
  misc_feature (774)..(797): n is a, c, g, or t
  misc_feature (799)..(803): n is a, c, g, or t
  misc_feature (805)..(805): n is a, c, g, or t
  misc_feature (807)..(855): n is a, c, g, or t
  misc_feature (859)..(861): n is a, c, g, or t
  misc_feature (863)..(863): n is a, c, g, or t
  misc_feature (867)..(883): n is a, c, g, or t
  misc_feature (887)..(891): n is a, c, g, or t
  misc_feature (893)..(906): n is a, c, g, or t
  misc_feature (908)..(908): n is a, c, g, or t
  Peptide Sequence Number=SeqID_11874
  Probeset Number=SeqID_20236
nnnnnngccgtggaatgacccggtagaagccgaggtcgagctgcagcctgccgtcgagccggtgctggaaaccaccagcgagcagcctgaactgacacccatgcccgcgccgaccccggacagcgtagtgccggacgcccccgagtgggtttcggccccggtgccggagccgaccgtcgcgcaagtggacgccgccaccccgggcaccgacctcgacgacgagccgccgctggacgaagactatatcgagccagacatggattcggcctacagctacctggacgacctggccagcgaacacaccgccgagcctgccccggagccggaacccgaacctgccgcgatgccggccaccggcctggcgttgcaatggctggagctgttcccgaaactgccgatctccggcatgaccggcagcatcgccgccaactgcacactgattgccgtggatggcgaccattggttgttgcacctggacccggcccacagcgccctgttcaacgcgacccagcaacgtcggctcaacgatgccctgaaccagttccacgggcgcacactgactatcagcatcgaactgatcaagcccgagcaggaaaccccggcccaggcggcgtcccgccgccgggtcaaccgccagcgcgaggctgaagagtcgatccacggtgatccgctcatccagcagatgatggagcagtttnntgcggtggtgcggcannntncnattgaacctnnngnagnnnnnnnncnnncgtnnnnnnnnggnnnnnnnnnntnnnnnnnnnnnnnnnnnnnnnnnntnnnnngntnnnnnnnnnnnnnnnnnnnnnnnnnnnnnnnnnnnnnnnnnnnnnnnnnaaannngnccannnnnnnnnnnnnnnnngccnnnnncnnnnnnnnnnnnnnangaccg

SEQ ID NO: 5834 - DNA, 506 bp, Zea mays
  misc_feature (1)..(2): n is a, c, g, or t
  Peptide Sequence Number=SeqID_11875
  Probeset Number=SeqID_20237
nngacgcgttcgccgtccgcgggggtggaggttctcagagtgatcatggtgctacggaaaaaaaagaagaagggttggcggcggccgtcagccggcgtcggtgcgccgctcgatggcgcggattaccgccaccatgtcggacgcgcccaggccctgggcctcggtctcgccgtacagcgcgtggctggcatccagcagcggcgaggcgatgccggcgctgcgcgcggcctcggccaccaggcggctgttcttgaggacgtcggtgatcgccgcctgcacggaaaagtcctgcgtcaccagcttgcccagtttgacgcgcgacacatcgctggccatcggcccggcgttcagcacctcggcgaacagcgccaggtcgatgccctgccgctcagcgaaatgcaccgactcggtcaggcccgtaaccatggtgatgaggaacaggttgaccgacagcttcatggccagcgccgacggcaccgcgccacagacgaaactgtcgcggcaca

SEQ ID NO: 5835 - DNA, 506 bp, Zea mays
  misc_feature (505)..(506): n is a, c, g, or t
  Peptide Sequence Number=SeqID_11876
  Probeset Number=SeqID_20238
tgtgccgcgacagtttcgtctgtggcgcggtgccgtcggcgctggccatgaagctgtcggtcaacctgttcctcatcaccatggttacgggcctgaccgagtcggtgcatttcgctgagcggcagggcatcgacctggcgctgttcgccgaggtgctgaacgccgggccgatggccagcgatgtgtcgcgcgtcaaactgggcaagctggtgacgcaggacttttccgtgcaggcggcgatcaccgacgtcctcaagaacagccgcctggtggccgaggccgcgcgcagcgccggcatcgcctcgccgctgctggatgccagccacgcgctgtacggcgagaccgaggcccagggcctgggcgcgtccgacatggtggcggtaatccgcgccatcgagcggcgcaccgacgccggctgacggccgccgccaacccttcttcttttttttccgtagcaccatgatcactctgagaacctccacccccgcggacggcgaacgcgtcnn

SEQ ID NO: 5836 - DNA, 1194 bp, Zea mays
  misc_feature (462)..(463): n is a, c, g, or t
  misc_feature (527)..(529): n is a, c, g, or t
  misc_feature (554)..(556): n is a, c, g, or t
  misc_feature (746)..(747): n is a, c, g, or t
  misc_feature (749)..(749): n is a, c, g, or t
  misc_feature (781)..(782): n is a, c, g, or t
  misc_feature (788)..(790): n is a, c, g, or t
  misc_feature (795)..(799): n is a, c, g, or t
  misc_feature (805)..(810): n is a, c, g, or t
  misc_feature (812)..(837): n is a, c, g, or t
  misc_feature (842)..(848): n is a, c, g, or t
  misc_feature (851)..(852): n is a, c, g, or t
  misc_feature (856)..(856): n is a, c, g, or t
  misc_feature (858)..(895): n is a, c, g, or t
  misc_feature (898)..(901): n is a, c, g, or t
  misc_feature (903)..(917): n is a, c, g, or t
  misc_feature (919)..(981): n is a, c, g, or t
  misc_feature (983)..(1031): n is a, c, g, or t
  misc_feature (1034)..(1043): n is a, c, g, or t
  misc_feature (1045)..(1050): n is a, c, g, or t
  misc_feature (1054)..(1070): n is a, c, g, or t
  misc_feature (1074)..(1089): n is a, c, g, or t
  misc_feature (1092)..(1120): n is a, c, g, or t
  misc_feature (1123)..(1124): n is a, c, g, or t
  misc_feature (1129)..(1138): n is a, c, g, or t
  misc_feature (1140)..(1194): n is a, c, g, or t
  Peptide Sequence Number=SeqID_11877
  Probeset Number=SeqID_20239
agatcctgtatgaccgcgccgtcgcgctgacgggccgcgacatgtcgcccgacatcgtgatcgtggcgatcgacgacaccagcatcgacgcgctcggccgctggccctggcgccgcgcggtgcacgcggcattgctggaccgcctgcagggcgcgcgcgcggtcggcctggatttgatcttcgccgaacccgacaccacccatcccggcgacgacgccatcctcgccgacagcctgcggcgcaatggccacaccgtgctgccggtggtgctggaccgcctggcctacccctcctccatcagcaccccgatcccgatcctggcgcaggccgcggcgggcagcggtttcatcaacgccaacctggatgccgatggcgtgctgcggtcggcgatgctgacgacgcgtttcgccggcgagcgctggcagcatttcgcgttgagcatgctggacgtgggcggccagnnggcgatggccgagcggctgctgcgccgcgcgggcaaggatggcggcatcctgattccctacgcnnnccccgcggcgcatacgcgcgcggtnnntacctgtcggtgctgcgcggcgacgtgccgcccgagcagctgcgcggcaagtatgtgctggtgggcgcctgggccaccggcctgggcgatgcctacaccacgccggtctcgcacgaggtcagcggcatgccgggcgtggagatcatcgccaacctgctgcaggcagccaacgacgacatcgccttccggnngnccgctccctggctcaatgccctgttctcggcnntgccgnnnctgcnnnnntgcctnnnnnngnnnnnnnnnnnnnnnnnnnnnnnnnngctcnnnnnnntcnnactncnnnnnnnnnnnnnnnnnnnnnnnnnnnnnnnnnnnnnnacnnnnannnnnnnnnnnnnnncnnnnnnnnnnnnnnnnnnnnnnnnnnnnnnnnnnnnnnnnnnnnnnnnnnnnnnnnnnnnnnngnnnnnnnnnnnnnnnnnnnnnnnnnnnnnnnnnnnnnnnnnnnnnnnnnggnnnnnnnnnncnnnnnngggnnnnnnnnnnnnnnnnnccgnnnnnnnnnnnnnnnnggnnnnnnnnnnnnnnnnnnnnnnnnnnnnnaannccccnnnnnnnnnngnnnnnnnnnnnnnnnnnnnnnnnnnnnnnnnnnnnnnnnnnnnnnnnnnnnnnnn

SEQ ID NO: 5837 - DNA, 211 bp, Zea mays
  misc_feature (1)..(9): n is a, c, g, or t
  Peptide Sequence Number=SeqID_11878
  Probeset Number=SeqID_20240
nnnnnnnnncggcatagccatgcttggcgtagaacgcgcggctctgcgtattgaaggtgtcggtctccagccgcgcctcgccgaagccggcggcgcgcatgccatcctcggccagcgccagcagcgccgcgccgaccccgcgccgctgctgcgccggatgcacgtgcagggcccagatgaagttcttctcccagtccaccatgcccgccac

SEQ ID NO: 5838 - DNA, 211 bp, Zea mays
  misc_feature (203)..(211): n is a, c, g, or t
  Peptide Sequence Number=SeqID_11879
  Probeset Number=SeqID_20241
gtggcgggcatggtggactgggagaagaacttcatctgggccctgcacgtgcatccggcgcagcagcggcgcggggtcggcgcggcgctgctggcgctggccgaggatggcatgcgcgccgccggcttcggcgaggcgcggctggagaccgacaccttcaatacgcagagccgcgcgttctacgccaagcatggctatgccgnnnnnnnnn

SEQ ID NO: 5839 - DNA, 766 bp, Zea mays
  misc_feature (1)..(147): n is a, c, g, or t
  misc_feature (763)..(766): n is a, c, g, or t
  Peptide Sequence Number=SeqID_11880
  Probeset Number=SeqID_20242
nnnnnnnnnnnnnnnnnnnnnnnnnnnnnnnnnnnnnnnnnnnnnnnnnnnnnnnnnnnnnnnnnnnnnnnnnnnnnnnnnnnnnnnnnnnnnnnnnnnnnnnnnnnnnnnnnnnnnnnnnnnnnnnnnnnnnnnnnnnnnnnnnnngccagcccggccggccgctacggccagcccgaggagctgggggcgctgtgcgcctatgtctgctcggcgcacgcgggctacatgacggcgcagaacatcctgctcgatggcggcggctaccccggcacgtactgaatccgcgccccgggcggtccgtggggctgcttagggtgttccgcggctggacgcgggcggggtgtcagggcaagattgcggcgatatcgcttgaggaatccccatggaccagacggacatcaagatcttggcgttgctgcagaaggacgccacctgctcggtcgccgagatcgccgagcaggtcaatctgtccgtcaccccctgctggcgccgcatccagaagctcaaggacgatggcgtcatcgcccgcaacgccatcctgctggacccgcgcgcgctggggctgaacctgaccgtgttcgtctcgatcaagaccagccagcacaacgagaaatggacccagagcctgatcaacgcggtcatggcgctgccgaatgtggtcgagttccatcgcatggccggcgacatcgactacctgctcaaggtggtggtcgaggacatggcggcctatgaccgcttctaccgccgcctgatcgccgcnnnn

SEQ ID NO: 5840 - DNA, 380 bp, Zea mays
  misc_feature (376)..(379): n is a, c, g, or t
  Peptide Sequence Number=SeqID_11881
  Probeset Number=SeqID_20243
agccaactgggcgccgacctgggccgggtactgatgttcgggctgccgctcacggccttcctgtgctacgtcggctaccgcgtggccggacgcatgacccggcgtttttacccgatgtctgatgatatccgtgcagaggtctacggcccccacgtgaccaacgatgacctgcgcgcctggcataacggcaacgcccagaacgtcgaacagggggctggcgccgtcgcgcacatgggcctcgaagagtccaccagcagtctcgttgccaagctgccgcccgctccggcgccgggtttcgggctgatcgtcagcctgatcctgttgcccatcatcctgattctgctgggcaccctggcgacgtcgctgctgcccatcnnnng

SEQ ID NO: 5841 - DNA, 552 bp, Zea mays
  misc_feature (1)..(7): n is a, c, g, or t
  misc_feature (9)..(12): n is a, c, g, or t
  misc_feature (14)..(15): n is a, c, g, or t
  misc_feature (21)..(27): n is a, c, g, or t
  misc_feature (52)..(52): n is a, c, g, or t
  misc_feature (56)..(58): n is a, c, g, or t
  misc_feature (76)..(76): n is a, c, g, or t
  misc_feature (84)..(85): n is a, c, g, or t
  Peptide Sequence Number=SeqID_11882
  Probeset Number=SeqID_20244
nnnnnnnannnntnngtcgcnnnnnnncacgccttgggctgatcagcgttcnccannnacaagagagataagaagntgaaaatnnccaaactgaccaccttcatcgtcccgccccgctggtgcttcctcaaggttgaaaccgaccagggcgtgaccggttggggcgaacctgtggtcgagggccgcgcccacaccgtagccgccgccgtcgaagaactgtccgactacttgatcggcaaagacccacgcaatatcgaagacatctggacggtgctctaccgcggcggtttctaccgtggcggcgcgatccatatgagcgccctcgccggcatcgaccaggcgctgtgggacatcaagggcaaggctctcggtgtgtcggtcagcgacctgctgggtggccaggtgcgcgacaaaatccgcgtgtattcatggattggtggcgaccgcccggccgacactgcccgcgccgccaaggaagccgtggcccgtggttttactgcggtgaaaatgaacggcaccgaagagctgcaatttctcgacagcttcgaaaaa

SEQ ID NO: 5842 - DNA, 868 bp, Zea mays
  misc_feature (1)..(3): n is a, c, g, or t
  misc_feature (784)..(784): n is a, c, g, or t
  misc_feature (789)..(789): n is a, c, g, or t
  misc_feature (794)..(796): n is a, c, g, or t
  misc_feature (800)..(800): n is a, c, g, or t
  misc_feature (802)..(816): n is a, c, g, or t
  misc_feature (821)..(823): n is a, c, g, or t
  misc_feature (829)..(832): n is a, c, g, or t
  misc_feature (849)..(868): n is a, c, g, or t
  Peptide Sequence Number=SeqID_11883
  Probeset Number=SeqID_20245
nnngtggccggccaggccgagttgtacagcctgatcacccgcctgcgggaccgccatggctgcggcgtgctgatggtctcccacgacctgcacctggtgatgagcaccaccgaccaggtggtgtgccttaatcgccacgtgtgctgctccggccacccggaacaggtcagcggcgacccggctttcgtcgagctgttcggcaagaacgcccagagcctggcgatttatcaccaccatcacgaccatgcccatgacctgcatggcgctgttgtctctgaccccgccacaccccatacccacgttcatggagatagctgcaagcatggctgattttctgctctacgccctgctggcaggcttggctctggcgctggtggcgggcccactgggctcgttcgtggtctggcggcgcatggcctattttggcgacaccttgtcccacgctgcgctgctgggcgtggccatggggtttctgctggatgtgagcccgaccattgccgtcaccgtcggctgcctgttgctggcggtgctgctggtgaccctgcaacagcgccagccgctggcttccgatacgctgctgggcatcctggccccaagcaccttgtccctgggcctggtggtgctgagcttcatgcatgaagtgcgtatcgacctgatggcctacctgttcggcgacctgctggcgatcagccccaccgacctggcgtggatcctcggcggcagcgcggcggtgctggtgctgctggtgacgctgtggcgcccgctgctggcgatcaccgtccangaagnactcnnnactntnnnnnnnnnnnnnnntggcnnngctgcnnnngaccctgatgctgctgnnnnnnnnnnnnnnnnnnnn

SEQ ID NO: 5843 - DNA, 458 bp, Zea mays
  misc_feature (458)..(458): n is a, c, g, or t
  Peptide Sequence Number=SeqID_11884
  Probeset Number=SeqID_20246
gctgccgccgctggaggtgctggacgacatcatgtaccgcgccatcgccatcggcttcgccttcttcaccgtggcgaccatcctgggcgcgctgtgggccgcggacgcctggggcgcctactggcagtgggaccccaaggaaacctgggcgctgatcgtctggctgaactacgcggcctggctgcacatgcgcctgatcaagggcctgcgcggcaccatggcggcctattgggcgctgacgggcctgctgatcaccggcttcgccttcctcggcgtgaacatgttcctgtcgggcctgcattcctacggccagctctgagccagacgcgcacggcaaaaggccccgtttcgacggggcctttttcgtggggcggcggggcgttcagggcagcgtcgattcgccgcgcagcaggtcgtccagcgtttcgcgctggcgcaccacgtgatagtggccgccn

SEQ ID NO: 5844 - DNA, 164 bp, Zea mays
  misc_feature (1)..(7): n is a, c, g, or t
  misc_feature (164)..(164): n is a, c, g, or t
  Peptide Sequence Number=SeqID_11885
  Probeset Number=SeqID_20247
nnnnnnnctgacggtgcgcttcgtgggttcggagcgcacggtcgaagccgtgcgcaacttgtcgttccatgtggaccggggcgagaccctggccatcgtgggcgaatcgggttcgggcaagtcggtgacgtcgctggcgctgatgcgcctggtggaacatggcn

SEQ ID NO: 5845 - DNA, 164 bp, Zea mays
  misc_feature (1)..(1): n is a, c, g, or t
  misc_feature (158)..(164): n is a, c, g, or t
  Peptide Sequence Number=SeqID_11886
  Probeset Number=SeqID_20248
ngccatgttccaccaggcgcatcagcgccagcgacgtcaccgacttgcccgaacccgattcgcccacgatggccagggtctcgccccggtccacatggaacgacaagttgcgcacggcttcgaccgtgcgctccgaacccacgaagcgcaccgtcagnnnnnnn

SEQ ID NO: 5846 - DNA, 456 bp, Zea mays
  misc_feature (1)..(2): n is a, c, g, or t
  Peptide Sequence Number=SeqID_11887
  Probeset Number=SeqID_20249
nngcttctggcgcacccgttcggccatcgacctgggcggcctgccgcaagaacgccgcgccaagatcctgccgttcatccgcacctgggccgaaagcggcggcggccagtccggcgaagccgtgttccgcagctactacgaaacgctcaacgtgcgcgccaggacggtcgccgccaccgctcccttcgactacgtcctgtcgccggtggcgccggtggtcgcctacaacgccgagtgggccgcgcccaccaacgaggtcgccacgaccatgcaccacatcggctacacgctgccctacaacatgagcgagcagccggccgcctcggtcaattgcggctacacccgggccggcctgccgatcggcctgcagatcgccggcgcgcgcttcgatgacctcggcgtgctgcgcgtggcccgcgcctgggagcgcatgcgcccggcccagcatccctggcc

SEQ ID NO: 5847 - DNA, 967 bp, Zea mays
  misc_feature (1)..(1): n is a, c, g, or t
  misc_feature (27)..(31): n is a, c, g, or t
  misc_feature (34)..(34): n is a, c, g, or t
  misc_feature (73)..(73): n is a, c, g, or t
  misc_feature (297)..(303): n is a, c, g, or t
  misc_feature (306)..(307): n is a, c, g, or t
  misc_feature (400)..(400): n is a, c, g, or t
  misc_feature (430)..(430): n is a, c, g, or t
  misc_feature (480)..(482): n is a, c, g, or t
  misc_feature (740)..(740): n is a, c, g, or t
  misc_feature (750)..(750): n is a, c, g, or t
  misc_feature (757)..(757): n is a, c, g, or t
  misc_feature (789)..(792): n is a, c, g, or t
  misc_feature (794)..(797): n is a, c, g, or t
  misc_feature (799)..(799): n is a, c, g, or t
  misc_feature (813)..(813): n is a, c, g, or t
  misc_feature (835)..(835): n is a, c, g, or t
  misc_feature (840)..(844): n is a, c, g, or t
  misc_feature (848)..(848): n is a, c, g, or t
  misc_feature (850)..(853): n is a, c, g, or t
  misc_feature (860)..(866): n is a, c, g, or t
  misc_feature (868)..(871): n is a, c, g, or t
  misc_feature (873)..(875): n is a, c, g, or t
  misc_feature (879)..(879): n is a, c, g, or t
  misc_feature (881)..(887): n is a, c, g, or t
  misc_feature (894)..(899): n is a, c, g, or t
  misc_feature (903)..(904): n is a, c, g, or t
  misc_feature (906)..(906): n is a, c, g, or t
  misc_feature (913)..(913): n is a, c, g, or t
  misc_feature (915)..(924): n is a, c, g, or t
  misc_feature (931)..(943): n is a, c, g, or t
  misc_feature (946)..(963): n is a, c, g, or t
  Peptide Sequence Number=SeqID_11888
  Probeset Number=SeqID_20250
ngcaagagttcgctatgctctgaggcnnnnntcnaagcaacacgctcacacacggggtctagatcatggatangcatcagcatccggctggaagcacctccccaccattttggaggcgcaaaacaggcgttgtactgatcatgctcattgcgatcggtgccttttacggggtgcgggaacatttcacccacgtttatccgtatttgccctacctcatcctgttgatctgtccattgatgcatttttttggacatggacatggcggacatgaccatggcgatcaggcaggaaccaacnnnnnnngannaatagctatgcccactccaccgagccaccacgatcacggtcccgcccacgctgcctcacccaatgacggtggtctacgcgacccggtgtgcgntatggcggttatacctccaagtaaatttgncgagtcttaccaaggacagacgtatcaattttgtagccagaaatgccaannnaaatttcgggcagatccagaacgctacattggtaatcatcccagcgctgaacccagcagcgccgctatagagcccacgctacaggtagccactgagtttacctgtcctatgcacccggaaataagacagccagggcccggcaattgccctaaatgtggcatgacattagagcccgtcatgcccgcgcttgatgacgatgacaaacccgagctcctggatttcacccgccgcttttggtggtcgctgcctttaaccgtnatggtggccnttctagncatggcgggtcactcattacaaatcttccatnnnncnnnncnaaactggatcgagntcgctcttgccactccggtcancttannnnncagntnnnnccttttnnnnnnnannnntnnnatcngnnnnnnntcgcagnnnnnncatnngnactctgntnnnnnnnnnnactgccnnnnnnnnnnnnnacnnnnnnnnnnnnnnnnnntatt

SEQ ID NO: 5848 - DNA, 888 bp, Zea mays
  misc_feature (1)..(1): n is a, c, g, or t
  misc_feature (4)..(7): n is a, c, g, or t
  misc_feature (11)..(11): n is a, c, g, or t
  misc_feature (15)..(23): n is a, c, g, or t
  misc_feature (27)..(29): n is a, c, g, or t
  misc_feature (54)..(57): n is a, c, g, or t
  misc_feature (72)..(78): n is a, c, g, or t
  misc_feature (885)..(888): n is a, c, g, or t
  Peptide Sequence Number=SeqID_11889
  Probeset Number=SeqID_20251
ngcnnnncagnagcnnnnnnnnnacgnnngtgtattagtacagacgaacggcgnnnngctgctcgcgctgannnnnnntggcgtgacgcttaacagcggctgctgctttacgcttacgctcagaagttggcttctcgtaaaattcgcggctacgaacttcagccagaacaccggctttttcgcaggagcgcttgaaacgacgcagagctacgtcgaagggttcgttctcttttactttgacggctggcatccagagctaccttctttcattaccgggaatcaacgttctcgtcgcaaaaaattcgcggctgaggtcgtcggtttttaagggttgcggatgttaacccctcattgcccggaatgcaaagcctctgatcgaaaaccgctagtcgggagggggagtggcgactattatgcgcgccttcgaattcagcctctacaaggcgcaaacccatgctagttctgggattagaaacctcgtgcgatgaaaccggtgtcgcactttacgacagtgaacgcgggcttttggccgacgcactgttcagtcagatcgacctgcaccgcgcctatggtggcgtggtgccggagctggccagccgtgatcatgtgaaacgcatgctgccattgattcgccaggtgttggacgaggccggctgcgtgccgaccgagatcgatgccattgcctataccgcaggcccgggattggtcggagccctgctggttggggcctcttgcgcccaagcgctggcatttgcctggggcattccggccctcggtgtgcaccacatggaaggccatttactggcgccgatgctggaagaaaacccgccagagttcccgttcgtcgctttgttggtttcaggtggccatacgcagctggttcannnn

SEQ ID NO: 5849 - DNA, 197 bp, Zea mays
  misc_feature (1)..(8): n is a, c, g, or t
  misc_feature (13)..(25): n is a, c, g, or t
  misc_feature (194)..(197): n is a, c, g, or t
  Peptide Sequence Number=SeqID_11890
  Probeset Number=SeqID_20252
nnnnnnnngaatnnnnnnnnnnnnnggcgtgatccaggcctgcctggacctggcccattttccaagacgcggagcgcggcgccatgccgccaaccccaatctccgcttcctgcatcatcagaagcgatgcaccatcgcctactccttgaacgatgacgggtccgtgaccattatgggcgtgttctatggaggannnn

SEQ ID NO: 5850 - DNA, 197 bp, Zea mays
  misc_feature (1)..(4): n is a, c, g, or t
  misc_feature (173)..(185): n is a, c, g, or t
  misc_feature (190)..(197): n is a, c, g, or t
  Peptide Sequence Number=SeqID_11891
  Probeset Number=SeqID_20253
nnnntcctccatagaacacgcccataatggtcacggacccgtcatcgttcaaggagtaggcgatggtgcatcgcttctgatgatgcaggaagcggagattggggttggcggcatggcgccgcgctccgcgtcttggaaaatgggccaggtccaggcaggcctggatcacgccnnnnnnnnnnnnnattcnnnnnnnn

SEQ ID NO: 5851 - DNA, 225 bp, Zea mays
  Probeset Number=SeqID_20254
accggcgacatgcccaccaccatgggcgcggcgcacttcctcggccaccggcccgaggccgacgccgagtgcgtggccttgttgcgcgcggccggcgccatcgtcatcggcaagaccctgacgcatgaattcgcctacggtcccaccggcgaccgcagcgtgcagggcgcctcgcgcaacccctggcgcaccagccagatcacgggcggctccagcgccggcagc

SEQ ID NO: 5852 - DNA, 225 bp, Zea mays
  Peptide Sequence Number=SeqID_11892
  Probeset Number=SeqID_20255
gctgccggcgctggagccgcccgtgatctggctggtgcgccaggggttgcgcgaggcgccctgcacgctgcggtcgccggtgggaccgtaggcgaattcatgcgtcagggtcttgccgatgacgatggcgccggccgcgcgcaacaaggccacgcactcggcgtcggcctcgggccggtggccgaggaagtgcgccgcgcccatggtggtgggcatgtcgccggt

SEQ ID NO: 5853 - DNA, 366 bp, Zea mays
  misc_feature (1)..(4): n is a, c, g, or t
  Peptide Sequence Number=SeqID_11893
  Probeset Number=SeqID_20256
nnnnggccgcgttgcgcgcggcctggtgcagataggcgcgcggctgcgccacctgcgccgggtccgtttccaggcacttgaccagcgcgtcgtgggccagatcgcgcgcggcgtcgcggcagcctagcttccgggtccagaccgcgagcagttcttcgtaataggccaggaagccggatgggcgggacgaacgcaatgacatggcgcgcaatcgatagagtcaggcatgataatggtttccattttcataaacaaacccgcattccatgcaaggacgccaccatggccgctgacgacgcctccgccgccgcacccggacggattccccgcgcgcagggcgagccgattcccgagtcggtcgccacc

SEQ ID NO: 5854 - DNA, 366 bp, Zea mays
  misc_feature (363)..(366): n is a, c, g, or t
  Peptide Sequence Number=SeqID_11894
  Probeset Number=SeqID_20257
ggtggcgaccgactcgggaatcggctcgccctgcgcgcggggaatccgtccgggtgcggcggcggaggcgtcgtcagcggccatggtggcgtccttgcatggaatgcgggtttgtttatgaaaatggaaaccattatcatgcctgactctatcgattgcgcgccatgtcattgcgttcgtcccgcccatccggcttcctggcctattacgaagaactgctcgcggtctggacccggaagctaggctgccgcgacgccgcgcgcgatctggcccacgacgcgctggtcaagtgcctggaaacggacccggcgcaggtggcgcagccgcgcgcctatctgcaccaggccgcgcgcaacgcggccnnnn

SEQ ID NO: 5855 - DNA, 891 bp, Zea mays
  misc_feature (1)..(6): n is a, c, g, or t
  misc_feature (832)..(836): n is a, c, g, or t
  misc_feature (838)..(841): n is a, c, g, or t
  misc_feature (847)..(847): n is a, c, g, or t
  misc_feature (849)..(850): n is a, c, g, or t
  misc_feature (852)..(852): n is a, c, g, or t
  misc_feature (854)..(855): n is a, c, g, or t
  misc_feature (859)..(860): n is a, c, g, or t
  misc_feature (863)..(863): n is a, c, g, or t
  misc_feature (865)..(891): n is a, c, g, or t
  Peptide Sequence Number=SeqID_11895
  Probeset Number=SeqID_20258
nnnnnnggaccggccgccctggcgctgttgcagagtgaatccttcgatgcggtgctgctggatgtgccggagggcgggttctcgctgtgttgccagatccgtgcattgcctggctgtggcgagctgccggtgatcgccttgagcacttcattgcaagctccggagcgtgagggctgtcatggtgtgggtgtcactgatcgagtggccaagccagtacgcttcgaggccttgcagctagtattgcaactgcggttgttgcatatggtcgagggtgaaagcgccgccacttaggcgcttatgccacttttttaacccggttgacggtgcttaactgaaattcaggcctcaatgaacgtggccttttttcaggaggcccgtcatgaacctgcaccagttcgccgaaacccacgacgtcaccaaccagccaccgtccctggacggcaccaacctgtaccgtatcgatctccccctgcaagaatggtcccggcgctttggggccggctgggccgagcagcgtatcgatacctacggtgccttggcaggcgggccgctgatggaggccggtttcctggccaaccagaacaagccggtgttcaacagtcatgaccgttttggtcatcgtatcgacttggttgaatttcatccggcctaccacgaactgatgcgcaccgccgtcgagcatggtctgccgtcgttgccgtgggcccacccacaatccggcgcccatgtggcccgcgcgtccatgacttacctgcacagccaggccgaagccggcaccggctgcccgctgaccatgaccttcgcctgcgtcccggccctgcgcttgcagccnnnnntnnnngaaacntnncngnngaanntcntnnnnnnnnnnnnnnnnnnnnnnnnnnn

SEQ ID NO: 5856 - DNA, 455 bp, Zea mays
  misc_feature (1)..(3): n is a, c, g, or t
  misc_feature (5)..(11): n is a, c, g, or t
  misc_feature (451)..(455): n is a, c, g, or t
  Peptide Sequence Number=SeqID_11896
  Probeset Number=SeqID_20259
nnnannnnnnnacacccggctatgacgtgacctatcaaaccgacacctatggtgttcaggcgcagaacacctcgacctttgccttgagcgagctgtccgtgctcaaggctaactatgggctggagtttttctacgacaaggtccggccggactccaatcaaccggtggaggctggctctgcggttgaggcttccgcgctggaaagcatcacccccagaggtgaccgggcgatgggcagcctgttcggtcgcctggattacgactacgacgactggctgaatctgaatgccgggctgcgttacgaccgctatcggttgcggggcgaaaccggcttgaacacccgcaccttcatcatcggcaccacccgccagatcggcgtacccgtgggctacgacgttgaccgggaggaggggcatttctcgccgaccttcggcctgtcgatcaagccggnnnnn

SEQ ID NO: 5857 - DNA, 821 bp, Zea mays
  misc_feature (678)..(678): n is a, c, g, or t
  misc_feature (787)..(788): n is a, c, g, or t
  misc_feature (799)..(806): n is a, c, g, or t
  misc_feature (808)..(820): n is a, c, g, or t
  Peptide Sequence Number=SeqID_11897
  Probeset Number=SeqID_20260
tgcccgactacctgcaagcccgggaaaccccgagcccgcgtcgtccattgaacgagctggtgtccgaaggcgacttcaatcaccaggactgacacgctctgacaacccttgacggtcgcttcaaaaccctgctgccatcacagcagggtgtacccgccacaagtgtagctacgccttggcgatcagcgcgtaataggccctgcgcagctcgtctctatcacgcttgtacaaactggcgagaaacggtgtcatgtcttcaagcccgttggcgttcaagtccactggataaattttattatccctcgccgaatacaggaaattgctcagctgcagatcgttgtggtaaagatttttctgctccatacgccgaaacgcgtcatccagtaaaagccgcgcctctgggggcaaacttcccctcgccagggtattaacgtccaccccgtccagtttgcccattttcaaataacgacgaccatcctcaaatatcgtcgttgcaaagccgtcaccgtaatagctgttcaggcacagggtctcgttatcgacaaagtcgtcggcagccgtcatggatgaagggccatagtccttataaacacttttaccgtcgagactttcgtagatcgtcccctcgccgcccccgccaatttttgggcccaggtccgatgccaccgaaggcgggtngccgccgcgggcacccaggcgctgccattggtccccctgaaggtgctgcaccaacagcggcgtttgccgattattgtgataaatccgtgcctgcacggcaccgtcggcnntgcgagtcacnnnnnnnncnnnnnnnnnnnnng

SEQ ID NO: 5858 - DNA, 821 bp, Zea mays
  misc_feature (2)..(14): n is a, c, g, or t
  misc_feature (16)..(23): n is a, c, g, or t
  misc_feature (34)..(35): n is a, c, g, or t
  misc_feature (144)..(144): n is a, c, g, or t
  Peptide Sequence Number=SeqID_11898
  Probeset Number=SeqID_20261
cnnnnnnnnnnnnngnnnnnnnngtgactcgcanngccgacggtgccgtgcaggcacggatttatcacaataatcggcaaacgccgctgttggtgcagcaccttcagggggaccaatggcagcgcctgggtgcccgcggcggcnacccgccttcggtggcatcggacctgggcccaaaaattggcgggggcggcgaggggacgatctacgaaagtctcgacggtaaaagtgtttataaggactatggcccttcatccatgacggctgccgacgactttgtcgataacgagaccctgtgcctgaacagctattacggtgacggctttgcaacgacgatatttgaggatggtcgtcgttatttgaaaatgggcaaactggacggggtggacgttaataccctggcgaggggaagtttgcccccagaggcgcggcttttactggatgacgcgtttcggcgtatggagcagaaaaatctttaccacaacgatctgcagctgagcaatttcctgtattcggcgagggataataaaatttatccagtggacttgaacgccaacgggcttgaagacatgacaccgtttctcgccagtttgtacaagcgtgatagagacgagctgcgcagggcctattacgcgctgatcgccaaggcgtagctacacttgtggcgggtacaccctgctgtgatggcagcagggttttgaagcgaccgtcaagggttgtcagagcgtgtcagtcctggtgattgaagtcgccttcggacaccagctcgttcaatggacgacgcgggctcggggtttcccgggcttgcaggtagtcgggca

SEQ ID NO: 5859 - DNA, 577 bp, Zea mays
  misc_feature (1)..(3): n is a, c, g, or t
  misc_feature (436)..(438): n is a, c, g, or t
  misc_feature (465)..(475): n is a, c, g, or t
  misc_feature (481)..(490): n is a, c, g, or t
  misc_feature (492)..(495): n is a, c, g, or t
  misc_feature (498)..(505): n is a, c, g, or t
  misc_feature (507)..(509): n is a, c, g, or t
  misc_feature (511)..(511): n is a, c, g, or t
  misc_feature (515)..(518): n is a, c, g, or t
  misc_feature (524)..(526): n is a, c, g, or t
  misc_feature (529)..(531): n is a, c, g, or t
  misc_feature (536)..(539): n is a, c, g, or t
  misc_feature (547)..(550): n is a, c, g, or t
  misc_feature (553)..(563): n is a, c, g, or t
  misc_feature (565)..(568): n is a, c, g, or t
  misc_feature (570)..(576): n is a, c, g, or t
  Peptide Sequence Number=SeqID_11899
  Probeset Number=SeqID_20262
nnntcgccccggtgctgtgcgccggcgtcacggtctacaagggcctgaagatgaccgacacgcggcccggcaactgggtcgtgatctccggcatcggcggcctcggccacatggcggtgcagtatgcgcgcgccatgggcctgaacgtggcggcggtggacatcgacgatgacaagctggccttcgccaagcgtctcggcgcggaggtggtcgtcaacgccaagaccaccgatccggcggcgtacctgaagaaggagatcggcggcgcccacggcgcgctgatcacggcggtctcgcccaaggccttcgagcaggcgctgggcatggtgcggcgcggcggcacggtggcgctcaacggcctgccgccgggcgacttcccgctgtcgatcttcgacatggtgctcaacggcgtgacggtgcgcggctcgatcgtggnnncgcgcctggacctgcaggaatcgctgnnnnnnnnnnnggaagnnnnnnnnnncnnnnttnnnnnnnncnnncngctnnnnaacatnnncannntgttnnnncgcatgcnnnncgnnnnnnnnnnnannnncnnnnnnnc

SEQ ID NO: 5860 - DNA, 582 bp, Zea mays
  misc_feature (1)..(6): n is a, c, g, or t
  misc_feature (580)..(580): n is a, c, g, or t
  misc_feature (582)..(582): n is a, c, g, or t
  Peptide Sequence Number=SeqID_11900
  Probeset Number=SeqID_20263
nnnnnnctgatcctggtcgccgccggcgccggcggccacgccggccagctcaaccccatcgccctcgtcaacgagatccgcgccttccacgacggcccgctggccctgtccggctgcatcagccacggcaaggacatcctcgccgcccaggccctgggctgcgacttcgcctacatgggcacccgcttcatcgccacccgcgaatccctcgccaacgacgcctaccgcgaaatgatcctgcgcgcccaggccgccgacgtcacctacacgccccacttctccggcgtccccgccaactacctcaccgaaagcatccgcgccgccggcctggaccccacccggctccccgactacgacgccccgcctcccaacctcgacaagagcacccggcccaaagcctggaaagacatctggagcgccggccaaggcgtcggcgccacccaggaaatcctgtcggtggccgaactcgtgacccagctggaaacggaataccaggaagcaaagagggcgctgctgcgctaacaccgagccccccaagcgcgcagcgtcatccggagccgcaagacaccgcgtaagccgnan

SEQ ID NO: 5861 - DNA, 881 bp, Zea mays
  misc_feature (6)..(11): n is a, c, g, or t
  misc_feature (13)..(26): n is a, c, g, or t
  misc_feature (28)..(42): n is a, c, g, or t
  misc_feature (45)..(47): n is a, c, g, or t
  misc_feature (50)..(54): n is a, c, g, or t
  misc_feature (66)..(71): n is a, c, g, or t
  misc_feature (76)..(77): n is a, c, g, or t
  misc_feature (82)..(84): n is a, c, g, or t
  misc_feature (86)..(86): n is a, c, g, or t
  misc_feature (93)..(93): n is a, c, g, or t
  misc_feature (96)..(98): n is a, c, g, or t
  misc_feature (100)..(106): n is a, c, g, or t
  misc_feature (108)..(110): n is a, c, g, or t
  misc_feature (112)..(112): n is a, c, g, or t
  misc_feature (114)..(120): n is a, c, g, or t
  misc_feature (126)..(127): n is a, c, g, or t
  misc_feature (129)..(129): n is a, c, g, or t
  misc_feature (136)..(137): n is a, c, g, or t
  misc_feature (142)..(143): n is a, c, g, or t
  misc_feature (147)..(148): n is a, c, g, or t
  misc_feature (151)..(152): n is a, c, g, or t
  misc_feature (161)..(161): n is a, c, g, or t
  misc_feature (184)..(187): n is a, c, g, or t
  misc_feature (878)..(881): n is a, c, g, or t
  Peptide Sequence Number=SeqID_11901
  Probeset Number=SeqID_20264
tccaannnnnnannnnnnnnnnnnnntnnnnnnnnnnnnnnnagnnnaannnnnccccgggggggnnnnnncgctnntttgnnncncaagcgnggnnnannnnnnngnnncncnnnnnnnggcggnngncgccaanntcagnntgannctnntcaatgccnatgaaaaaaccgagcgctgaaannnncccgacagcctcaaatgccaacacaccgccaagctcaccagtggccattgcctgtactcggacatgggccgcgtattggccgccatcaccgccgacacctgcggctggagcgacagcatcggcggcgtgttatgcgcctccgaagtcgcggaaaaatacggcaagggccgctatcaagagctgcgcaacggcttctaccgcaacggcaccgacaacctgctggtggaattgggcaagtggggcctggggctgtccgacctgctgatgaccctcaacctgttcagcaaaatcaccgtggatgacgccggcacgctgcacttcgccgaaggccattccaaggccggcgactacatcgaactctacgcaccgatggacacgctggtggtgctcaccgccctgcaacaccccatggacccgaaccccgaatacgcgccgcagccgctgaaactcagctggatgaacgccgatccaagcgtcgccgaacactgccgcacctcgcgcccggaaaacgagcgcggctttatcaacactgaccgtctgttcgcctgaggacctgccatgtctatcgcactcgccaaccaaccggacgcagccgtgtaccgcgcgaccatccccgccggcgaaccctggctgatggaagtcaaggccggccagaccctgcgcatcctcgaccttgagggcaaccaggccnnnn

SEQ ID NO: 5862 - DNA, 1035 bp, Zea mays
  misc_feature (1)..(4): n is a, c, g, or t
  misc_feature (714)..(718): n is a, c, g, or t
  misc_feature (726)..(726): n is a, c, g, or t
  misc_feature (742)..(745): n is a, c, g, or t
  misc_feature (747)..(747): n is a, c, g, or t
  misc_feature (753)..(764): n is a, c, g, or t
  misc_feature (777)..(777): n is a, c, g, or t
  misc_feature (781)..(781): n is a, c, g, or t
  misc_feature (783)..(786): n is a, c, g, or t
  misc_feature (801)..(801): n is a, c, g, or t
  misc_feature (805)..(807): n is a, c, g, or t
  misc_feature (813)..(815): n is a, c, g, or t
  misc_feature (821)..(830): n is a, c, g, or t
  misc_feature (833)..(835): n is a, c, g, or t
  misc_feature (837)..(843): n is a, c, g, or t
  misc_feature (845)..(860): n is a, c, g, or t
  misc_feature (862)..(884): n is a, c, g, or t
  misc_feature (887)..(908): n is a, c, g, or t
  misc_feature (912)..(912): n is a, c, g, or t
  misc_feature (914)..(923): n is a, c, g, or t
  misc_feature (925)..(927): n is a, c, g, or t
  misc_feature (929)..(942): n is a, c, g, or t
  misc_feature (944)..(944): n is a, c, g, or t
  misc_feature (946)..(954): n is a, c, g, or t
  misc_feature (958)..(962): n is a, c, g, or t
  misc_feature (964)..(971): n is a, c, g, or t
  misc_feature (973)..(990): n is a, c, g, or t
  misc_feature (995)..(1008): n is a, c, g, or t
  misc_feature (1010)..(1010): n is a, c, g, or t
  misc_feature (1012)..(1035): n is a, c, g, or t
  Peptide Sequence Number=SeqID_11902
  Probeset Number=SeqID_20265
nnnncgcgctttttcaggacgcgcgtcttgcgcaggaccagcaggcccagcagcagcacgacgccgcacgccaccagctgccattccaggcccgccagcagccaggcggcgacaccgcccgcggccaatcccagcgccaccagcagcaagtagaaggttcccgtcgccagttcgcctatgagcgccagcgcggccagccctaaccaaatccacatagttacgttcgcctgaaaggatgagtcggtcagcggattgtacgtatttccatgacgccgcggtgacacccccgccgcccctggacaatcgcctggattatgatgtgcgctggctgccgtccccggccgctggcattttccacgcacacaccccaatgaccgctgcaatctcctccgcccgccccgtcctcatcctgcacacgggcgacccggacgatacgctcaaaagccagttcggtggctatgccgagcagctggcgcgggcctccggcctgacgcccgacgcccttgaagtggtcgccgtccacgccggcgaacgcccgcgcgcgccggaccagtaccgcgccgccctgatcaccggctcgcccgccatggtcaccgacctggaaccctggagcgaagacaccgccgcctggctgcgcgaggccgccgcggccggcctgccgatgttcggcatctgctacggccaccagttgctggcgcacgccctgggcggcannnnnggctacanccccgccggccgcgannnngncacccnnnnnnnnnnnntgctgcccgctgncgcngnnnncaagctgctggccgngctnnngcccannntcccgnnnnnnnnnntgnnngnnnnnnncnnnnnnnnnnnnnnnncnnnnnnnnnnnnnnnnnnnnnnntcnnnnnnnnnnnnnnnnnnnnnnagancnnnnnnnnnncnnnannnnnnnnnnnnnnancnnnnnnnnncccnnnnnannnnnnnncnnnnnnnnnnnnnnnnnnccccnnnnnnnnnnnnnntncnnnnnnnnnnnnnnnnnnnnnnnn

SEQ ID NO: 5863 - DNA, 1064 bp, Zea mays
  misc_feature (1)..(2): n is a, c, g, or t
  misc_feature (4)..(4): n is a, c, g, or t
  misc_feature (6)..(8): n is a, c, g, or t
  misc_feature (12)..(21): n is a, c, g, or t
  misc_feature (26)..(40): n is a, c, g, or t
  misc_feature (42)..(83): n is a, c, g, or t
  misc_feature (85)..(91): n is a, c, g, or t
  misc_feature (97)..(125): n is a, c, g, or t
  misc_feature (127)..(158): n is a, c, g, or t
  misc_feature (161)..(198): n is a, c, g, or t
  misc_feature (206)..(208): n is a, c, g, or t
  misc_feature (211)..(214): n is a, c, g, or t
  misc_feature (217)..(219): n is a, c, g, or t
  misc_feature (224)..(224): n is a, c, g, or t
  misc_feature (226)..(237): n is a, c, g, or t
  misc_feature (1059)..(1064): n is a, c, g, or t
  Peptide Sequence Number=SeqID_11903
  Probeset Number=SeqID_20266
nnantnnncccnnnnnnnnnntttcnnnnnnnnnnnnnnngnnnnnnnnnnnnnnnnnnnnnnnnnnnnnnnnnnnnnnnnnntnnnnnnncaaaannnnnnnnnnnnnnnnnnnnnnnnnnnnntnnnnnnnnnnnnnnnnnnnnnnnnnnnnnnnnggnnnnnnnnnnnnnnnnnnnnnnnnnnnnnnnnnnnnnngctcccgnnnctnnnncgnnnacccnannnnnnnnnnnntagtcgccctgatccttggcatccttcgcccgacgatacccatgatgattctgcgtggtgtagttcgtactgaacgccgccttcagcttgaccagctcggccttgcattcgcgccggtcatccttggcgaacacctggctagcaaacgccagcgacaacaacataaggacaagactgatcttcatctgaacgcgttccttgggggctcgatcatctgccaagcctagcccagtcacgggattcttccattcacggccgccgcaccgcttgtgtgcacggtaacgacccgcacccgcacccaaatgtggcctgtcaccccggtgtgtagccaacggtagcaatccgatttcagctgctggcccagtgccttgttgccgatacaaatttatcccgttgatttaaaaagaaattaatcccgcaatatttttctgttactgcgtgtggcacactttctgctgtctattccgttgttacatactaagttccggtatagcggaatacacaacccctggagtgcttgtcatgcatcaccgaccttccgtgttcaaagcgtgtgtttttctcttcgccgcatcggcttccctcgccaacgcagtgcaggcggcggacagcaagctcgatacagtgctcaagcgtgggcatctgatcgtgggtacaggcagtaccaatgcgccgtggcacttccagggagcggatggcaagttgcaaggttttgatatcgacatcggccacatcgtggccaaggggttgttcaacgacccgagcaaagtcgaatacgtggtgcaatcttccgatgcccggattcccaacctgttgaccgannnnnn

SEQ ID NO: 5864 - DNA, 834 bp, Zea mays
  misc_feature (1)..(12): n is a, c, g, or t
  misc_feature (44)..(47): n is a, c, g, or t
  misc_feature (642)..(669): n is a, c, g, or t
  misc_feature (694)..(699): n is a, c, g, or t
  misc_feature (714)..(721): n is a, c, g, or t
  misc_feature (738)..(752): n is a, c, g, or t
  misc_feature (755)..(755): n is a, c, g, or t
  misc_feature (757)..(757): n is a, c, g, or t
  misc_feature (759)..(759): n is a, c, g, or t
  misc_feature (761)..(765): n is a, c, g, or t
  misc_feature (767)..(768): n is a, c, g, or t
  misc_feature (770)..(773): n is a, c, g, or t
  misc_feature (776)..(776): n is a, c, g, or t
  misc_feature (787)..(787): n is a, c, g, or t
  misc_feature (789)..(792): n is a, c, g, or t
  misc_feature (796)..(796): n is a, c, g, or t
  misc_feature (798)..(798): n is a, c, g, or t
  misc_feature (801)..(817): n is a, c, g, or t
  misc_feature (820)..(830): n is a, c, g, or t
  misc_feature (833)..(833): n is a, c, g, or t
  Peptide Sequence Number=SeqID_11904
  Probeset Number=SeqID_20267
nnnnnnnnnnnncgccacttcaaccgcctgatcgaccccaccannnncgcaatcctggtggacggcgaagacatcctgcaactggacatggaagccctgcgccaattccgccggcacaagatcagcatggtgttccagagcttcggcctgctgccccacaagagcgtggtggacaacgtcgcctacggtctgaaagtgcgcggcgaaaccaagcaagtgtgcaccgagcgtgcgctgcactggatcgaaaccgtgggcctcaaaggctacgaaaacaaatacccgcaccagctgtccggcggcatgcgccaacgggtgggcctggctcgcgccctggcggccgacaccgacatcatcctgatggacgaagcgttcagcgccctcgacccgctgatccgcgccgagatgcaggaccagttgctggagctgcaaaagaccctgcacaagaccatcgtctttatcacccacgacctcgacgaggccgtgcgcatcggcaaccgcattgcgatcctcaaggacggcaagcttatccaggtcggcacgccccgggaaatcctgcattcgccggcggatgaatatgtggaccggtttgttcagcggcgggctgcggtggtttgacccgcgatgtgtggtgagttgacnnnnnnnnnnnnnnnnnnnnnnnnnnnncccacatttgaaatgcattcccctnnnnnngcgggcttgcccgcnnnnnnnncggtaaggctgcacaannnnnnnnnnnnnnnacnangntnnnnnanncnnnnaantcatcatcgcngnnnncccngntgnnnnnnnnnnnnnnnnncgnnnnnnnnnnncang

SEQ ID NO: 5865 - DNA, 617 bp, Zea mays
  misc_feature (1)..(6): n is a, c, g, or t
  misc_feature (537)..(543): n is a, c, g, or t
  misc_feature (547)..(557): n is a, c, g, or t
  misc_feature (561)..(577): n is a, c, g, or t
  misc_feature (580)..(584): n is a, c, g, or t
  misc_feature (587)..(594): n is a, c, g, or t
  misc_feature (597)..(617): n is a, c, g, or t
  Peptide Sequence Number=SeqID_11905
  Probeset Number=SeqID_20268
nnnnnnggcaagccggccatgcagttcccggtggtggcgctggagccggtggccgaagccggattcgccggccgcgcctgggattccatccgcctgtggtggcgcgggcattcctgatttgacgggaggggacatggcggtgagttttccgggcgggccggccgcggcgccgacccccgatgatcccctcgggctgctgtcggcctgtcatgggcgcattgcgcggcaatgcgccaccttgcggcgcctggccgcgcatctgccgacgcatggcagcgacgccgccgcccaggtcgcggcggcgggcgtcgcgcgctatttccagacggccgcgatccatcaccacgaggacgaggaagaggacctgttcccggccctgatcgagtccatggcgggttccgacgccgtctgcctgcatgcgctggtcgatgggctgattgccgatcacgcgcggctggcggcgctgtgggcgccgttgcggcaaatcctggacgagatcgcggcgggccatcccgcggtgttgccggcggcgcaggnnnnnnngttnnnnnnnnnnnatgnnnnnnnnnnnnnnnnncannnnnacnnnnnnnngcnnnnnnnnnnnnnnnnnnnnn

SEQ ID NO: 5866 - DNA, 617 bp, Zea mays
  misc_feature (1)..(21): n is a, c, g, or t
  misc_feature (24)..(31): n is a, c, g, or t
  misc_feature (34)..(38): n is a, c, g, or t
  misc_feature (41)..(57): n is a, c, g, or t
  misc_feature (61)..(71): n is a, c, g, or t
  misc_feature (75)..(81): n is a, c, g, or t
  misc_feature (612)..(617): n is a, c, g, or t
  Peptide Sequence Number=SeqID_11906
  Probeset Number=SeqID_20269
nnnnnnnnnnnnnnnnnnnnngcnnnnnnnngtnnnnntgnnnnnnnnnnnnnnnnncatnnnnnnnnnnnaacnnnnnnncctgcgccgccggcaacaccgcgggatggcccgccgcgatctcgtccaggatttgccgcaacggcgcccacagcgccgccagccgcgcgtgatcggcaatcagcccatcgaccagcgcatgcaggcagacggcgtcggaacccgccatggactcgatcagggccgggaacaggtcctcttcctcgtcctcgtggtgatggatcgcggccgtctggaaatagcgcgcgacgcccgccgccgcgacctgggcggcggcgtcgctgccatgcgtcggcagatgcgcggccaggcgccgcaaggtggcgcattgccgcgcaatgcgcccatgacaggccgacagcagcccgaggggatcatcgggggtcggcgccgcggccggcccgcccggaaaactcaccgccatgtcccctcccgtcaaatcaggaatgcccgcgccaccacaggcggatggaatcccaggcgcggccggcgaatccggcttcggccaccggctccagcgccaccaccgggaactgcatggccggcttgccnnnnnn

SEQ ID NO: 5867 - DNA, 685 bp, Zea mays
  misc_feature (1)..(90): n is a, c, g, or t
  misc_feature (678)..(678): n is a, c, g, or t
  misc_feature (680)..(680): n is a, c, g, or t
  misc_feature (682)..(685): n is a, c, g, or t
  Peptide Sequence Number=SeqID_11907
  Probeset Number=SeqID_20270
nnnnnnnnnnnnnnnnnnnnnnnnnnnnnnnnnnnnnnnnnnnnnnnnnnnnnnnnnnnnnnnnnnnnnnnnnnnnnnnnnnnnnnnnnnccacattttatttggggtgtttggaatatttgagccaggaccgccggatattttttgttgtagtctttttcagacaattgttgcaaagatctacaaagctgccgcttttaccgctagtctgcggacatctgcaatgccgacaacagccttctacaagagcccggcgatgactgatctgtcccgaattcaagggcctgccagcgcggtgattccgaccctggaagggcgcttctatcgacccccactgcctgacggctacgtgttgcgaccgcgcctgtgcgaacggctgagtgagggattggccgggcgcttattgctggtcagtgcgccggccgggtttggcaagagttcgctggcggtggagttctgccagagcttgccggcccactggcaaagcctgtggttgggggtcagcccccgggacaacgacccgggacgtttccttgaacgcctgctcgacggcctgcagcaatacttcccgcagttgggcgcccagtccctgggcttgctgaaaatgcgccagcgccatcaaccctttgcgtttgaagagtggctcgacgggctgctggatgaactgacggtgcaccnanannnn

SEQ ID NO: 5868 - DNA, 606 bp, Zea mays
  misc_feature (1)..(2): n is a, c, g, or t
  misc_feature (422)..(422): n is a, c, g, or t
  misc_feature (424)..(425): n is a, c, g, or t
  misc_feature (427)..(437): n is a, c, g, or t
  misc_feature (446)..(457): n is a, c, g, or t
  misc_feature (459)..(464): n is a, c, g, or t
  misc_feature (470)..(471): n is a, c, g, or t
  misc_feature (480)..(481): n is a, c, g, or t
  misc_feature (483)..(486): n is a, c, g, or t
  misc_feature (489)..(521): n is a, c, g, or t
  misc_feature (523)..(539): n is a, c, g, or t
  misc_feature (541)..(563): n is a, c, g, or t
  misc_feature (565)..(567): n is a, c, g, or t
  misc_feature (569)..(579): n is a, c, g, or t
  misc_feature (581)..(604): n is a, c, g, or t
  misc_feature (606)..(606): n is a, c, g, or t
  Peptide Sequence Number=SeqID_11908
  Probeset Number=SeqID_20271
nnagggccgcgtcgggcttgccggcgcgcagttgcgccagcgccagcgtggcgagctggcgagggtcggccagccccagcgtgcgcagcgcgttcagcaccacggcggtcttttcggggcggttgttttccaggtagacataggccagcaggctgagcagctcgcgggcgtcgggcgtcaggggcatggcggcggtcatccctggtacagcgcgctgcggtacatggcgaccagctcgcgcaggccggcctcgtccttgagcagccgcaccgcgcggttcagcgcgcgggcgtcctcgggattgcggtcctggctctgctcggccgcggcggacaggccatccagcgtcgcctgcagggcctgggcgaacttgccgggcagcagcaggtcgcggttggcgaccgtggggcgcagctggctgncnngnnnnnnnnnnntgttctgcnnnnnnnnnnnntnnnnnncctganngctttcccnnannnncgnnnnnnnnnnnnnnnnnnnnnnnnnnnnnnnnncnnnnnnnnnnnnnnnnncnnnnnnnnnnnnnnnnnnnnnnntnnntnnnnnnnnnnnannnnnnnnnnnnnnnnnnnnnnnnan

SEQ ID NO: 5869 - DNA, 944 bp, Zea mays
  misc_feature (806)..(808): n is a, c, g, or t
  misc_feature (830)..(834): n is a, c, g, or t
  misc_feature (837)..(840): n is a, c, g, or t
  misc_feature (846)..(852): n is a, c, g, or t
  misc_feature (867)..(868): n is a, c, g, or t
  misc_feature (870)..(872): n is a, c, g, or t
  misc_feature (876)..(878): n is a, c, g, or t
  misc_feature (880)..(886): n is a, c, g, or t
  misc_feature (891)..(906): n is a, c, g, or t
  misc_feature (910)..(919): n is a, c, g, or t
  misc_feature (922)..(932): n is a, c, g, or t
  misc_feature (935)..(942): n is a, c, g, or t
  misc_feature (944)..(944): n is a, c, g, or t
  Probeset Number=SeqID_20272
ctatcaatggtggtagccgcaaagactccactcgcatcttaccttgccatacaagtcataatggacacaccgacgtttatgggcgcatcgatccctcgctacctggtcctacgatgacaacagcttgtgtgaacccctctaaaggccgttttgtacatccagtggagcaccatggcatcacagtgcgccaggcagcacgatttcaaacgtttcctgattggtttgtattcaaaggcggattgatggccgcaggggaacaggtcggaaatgctgtccctgttgatatgggaaaagaaataattagtgcgatagctaacgctttaagcaactataaataagtctgcgaccggagatggaacctcattatgatcgagtctatttcatttaaaactagagccaggactgttgatcacttagggcgagagcagattgcagattgcccaacagctatatcggagctttggaaaaatgcgtatgacgcatattcaaggaaagtctcgcttgatatatatcaagacgacactcctatagcagctcttgttgatgacggtcacggtatgaacaaagaggagttcatacagaaatggcttgttattggcacggagtcgaaagcaaccggcgaagcagcggcggatgatgatcgaaagggattactcccaagacctcgacaaggtcaaaagggaattggtcggctatcagcagcagctcttggtcccttacttctatttgtttcaaaaagaagtatgtcttcatttgttttagcgcttatagattggcgattatttgaaaatcctttcctgttgctnnntgacgtacaaatacccgttctnnnnntcnnnnataaannnnnnnttctcaaaaatatanncnnnaatnnncnnnnnnntactnnnnnnnnnnnnnnnncacnnnnnnnnnnaannnnnnnnnnngcnnnnnnnngn

SEQ ID NO: 5870 - DNA, 944 bp, Zea mays
  misc_feature (1)..(1): n is a, c, g, or t
  misc_feature (3)..(10): n is a, c, g, or t
  misc_feature (13)..(23): n is a, c, g, or t
  misc_feature (26)..(35): n is a, c, g, or t
  misc_feature (39)..(54): n is a, c, g, or t
  misc_feature (59)..(65): n is a, c, g, or t
  misc_feature (67)..(69): n is a, c, g, or t
  misc_feature (73)..(75): n is a, c, g, or t
  misc_feature (77)..(78): n is a, c, g, or t
  misc_feature (93)..(99): n is a, c, g, or t
  misc_feature (105)..(108): n is a, c, g, or t
  misc_feature (111)..(115): n is a, c, g, or t
  misc_feature (137)..(139): n is a, c, g, or t
  Peptide Sequence Number=SeqID_11909
  Probeset Number=SeqID_20273
ncnnnnnnnngcnnnnnnnnnnnttnnnnnnnnnngtgnnnnnnnnnnnnnnnnagtannnnnnngnnnattnnngnntatatttttgagaannnnnnntttatnnnngannnnnagaacgggtatttgtacgtcannnagcaacaggaaaggattttcaaataatcgccaatctataagcgctaaaacaaatgaagacatacttctttttgaaacaaatagaagtaagggaccaagagctgctgctgatagccgaccaattcccttttgaccttgtcgaggtcttgggagtaatccctttcgatcatcatccgccgctgcttcgccggttgctttcgactccgtgccaataacaagccatttctgtatgaactcctctttgttcataccgtgaccgtcatcaacaagagctgctataggagtgtcgtcttgatatatatcaagcgagactttccttgaatatgcgtcatacgcatttttccaaagctccgatatagctgttgggcaatctgcaatctgctctcgccctaagtgatcaacagtcctggctctagttttaaatgaaatagactcgatcataatgaggttccatctccggtcgcagacttatttatagttgcttaaagcgttagctatcgcactaattatttcttttcccatatcaacagggacagcatttccgacctgttcccctgcggccatcaatccgcctttgaatacaaaccaatcaggaaacgtttgaaatcgtgctgcctggcgcactgtgatgccatggtgctccactggatgtacaaaacggcctttagaggggttcacacaagctgttgtcatcgtaggaccaggtagcgagggatcgatgcgcccataaacgtcggtgtgtccattatgacttgtatggcaaggtaagatgcgagtggagtctttgcggctaccaccattgatag

SEQ ID NO: 5871 - DNA, 513 bp, Zea mays
  misc_feature (1)..(5): n is a, c, g, or t
  misc_feature (402)..(402): n is a, c, g, or t
  misc_feature (404)..(408): n is a, c, g, or t
  misc_feature (413)..(421): n is a, c, g, or t
  misc_feature (423)..(436): n is a, c, g, or t
  misc_feature (439)..(440): n is a, c, g, or t
  misc_feature (445)..(457): n is a, c, g, or t
  misc_feature (459)..(489): n is a, c, g, or t
  misc_feature (495)..(513): n is a, c, g, or t
  Peptide Sequence Number=SeqID_11910
  Probeset Number=SeqID_20274
nnnnnacgacatgttcgattacccgttggccgcgccgctgatttcccaaggcactcgcaaactgttggcgaatctcagcgggcgcatggatttctcaccgagcattcacaccgaacacttcccggccctggtgaagatcgtgttgcagtccaatgccattggcgtgggcaccgaggaggcgtttgccgaggacattgccaaaggcaaactggtgctgctgcactggcgcaacctgccgcaaaacctcgagagcctgaatgcccgttgcgggatcgtcagccgcaccggctttcgcttgtccccggcggcgaaagcgatgatcgagacgctggtggcagtggatcaacacgaggtaagtgtggcggtctagcacactgccccactcacctcccacgtagcagntnnnnngcccnnnnnnnnntnnnnnnnnnnnnnntgnnctgtnnnnnnnnnnnnngnnnnnnnnnnnnnnnnnnnnnnnnnnnnnnncccccnnnnnnnnnnnnnnnnnnn

SEQ ID NO: 5872 - DNA, 1010 bp, Zea mays
  misc_feature (1)..(260): n is a, c, g, or t
  misc_feature (270)..(272): n is a, c, g, or t
  misc_feature (274)..(274): n is a, c, g, or t
  misc_feature (291)..(292): n is a, c, g, or t
  misc_feature (294)..(298): n is a, c, g, or t
  misc_feature (300)..(301): n is a, c, g, or t
  misc_feature (325)..(325): n is a, c, g, or t
  misc_feature (347)..(347): n is a, c, g, or t
  misc_feature (1006)..(1010): n is a, c, g, or t
  Peptide Sequence Number=SeqID_11911
  Probeset Number=SeqID_20275
nnnnnnnnnnnnnnnnnnnnnnnnnnnnnnnnnnnnnnnnnnnnnnnnnnnnnnnnnnnnnnnnnnnnnnnnnnnnnnnnnnnnnnnnnnnnnnnnnnnnnnnnnnnnnnnnnnnnnnnnnnnnnnnnnnnnnnnnnnnnnnnnnnnnnnnnnnnnnnnnnnnnnnnnnnnnnnnnnnnnnnnnnnnnnnnnnnnnnnnnnnnnnnnnnnnnnnnnnnnnnnnnnnnnnnnnnnnnnnnnnnnnnnnnnnnnnnnnnnnntgacgctcannntngcatcagcgaagtgccnncnnnnncnnctgaagccaacgctgtgctgaacnccctggcggaaaacttcgctcnggagcacgccgagcgtgtcaaagagatcgagcgcaccaccaaccacgacgttaaagccatcgagtacctgctcaaagaacaagcggccaagctgccggaactggccaaggtcagcgagttcatccactttgcctgcaccagcgaggacatcaacaacctgtcccacgctctgatgctgcgcgaaggccgtgatgacgtcatgctgccactgatgcgccagactgccgacgctatccgcgagctggccatccgttttgccgacgtaccgatgctgtcgcgcacccacggccagccggcttcgccgaccactttgggcaaagaactggccaacgtggtgtaccgcctggagcgccagatcgctcaagtggccgccgtgccactgctgggcaagatcaacggcgccgtaggcaactacaacgcccacctgtcggcctaccctgagatcgactgggaagaaaacgcccgcgccttcatcgaagacgagctcggcctgggtttcaacccgtacaccacgcaaatcgaaccccacgactacatcgccgagctgttcgacgcgattgcgcgcttcaacaccatcctgatcgacttcgatcgcgatatctggggttacatctccctgggctacttcaagcagcgcaccattgccggtgaaatcggtnnnnn

SEQ ID NO: 5873 - DNA, 779 bp, Zea mays
  misc_feature (1)..(2): n is a, c, g, or t
  misc_feature (663)..(667): n is a, c, g, or t
  misc_feature (676)..(692): n is a, c, g, or t
  misc_feature (741)..(744): n is a, c, g, or t
  Peptide Sequence Number=SeqID_11912
  Probeset Number=SeqID_20276
nncaggccgtctacagcctggaccgggagatggggatgcaggtcatcgaaggtctgtttcaggacgatgccgtgcgcatggcctccatcggccaccccaacgaaaccatgctcgcggaaaaaacccgcgacctgcaacaatccccaacccgctggctgaccgacctgattctgggccaggagcgcacgttcaccacgccactggtggggcgcgggccttatagcgagtactacggcgacctgagcatcaccctcgacaccgccacctatggcaaagggtttctcgtcagttcggtgatcattttcatctccggggtgctgcgggccctggccatgggcctggtgttgtacctggtctatcactggctgctgaccaagccgctgtcccgcgtcatcgagcacctgagttcgatcaaccccgatcgccccagcgagcacaagattccgcagctcaagggccacgagaaaaacgaactggggatctggatcagcaccgccaaccagttgctcgaatccatcgagcgcaacacccacttgcgccacgaggcggagaacagcctgctgcgcatggcccagtacgactttctcaccggcctgccgaaccgccagaagttgcaggagcaactggacaagatcctgaccgacgccggccgccggcagcgcnnnnntcgcagtgnnnnnnnnnnnnnnnnnatgacttcaaaagcgtcaacgagcagttcacctaccaggccggcgaccnnnngctgctggccctggccgaccgcctgcgggcccaca

SEQ ID NO: 5874 - DNA, 613 bp, Zea mays
  misc_feature (1)..(5): n is a, c, g, or t
  misc_feature (613)..(613): n is a, c, g, or t
  Peptide Sequence Number=SeqID_11913
  Probeset Number=SeqID_20277
nnnnngaactggccctcggtcatcactgggcccagcatcgcctggcgtttgaagaactgctgacccaccaactctcccagcaacgcctgcgcgaaagcatgcgctccctgcgcgcaccggcaatgcccaaggctacacgcctgcccgcgcaatacctggccaacctggggtttgcaccaaccggcgcccagcaacgggtcggcaatgaaatcgcctacgacctgagccagaaagaacccatgctgcggctgatccagggcgacgtgggcgcgggtaaaaccgtggtcgccgccctcgccgccttgcaggccctcgaagccggttatcaagtggcgctgatggcgcccaccgagattctcgccgaacagcacttcatcacgttcaagcgctggctcgaaccactgggcctggaagtcgcgtggctggccggcaagctcaagggtaaaaaccgtgtagccgccctggaacagatcgccgctggcgccccgatggtggtgggcacccacgcgctgttccaggacgaagtgaagttcaagaacctggcgctggtgatcatcgacgaacaacaccgcttcggcgtgcagcagcgcctggccctgcgccagaaaggcgn

SEQ ID NO: 5875 - DNA, 605 bp, Zea mays
  misc_feature (1)..(5): n is a, c, g, or t
  misc_feature (556)..(557): n is a, c, g, or t
  misc_feature (594)..(595): n is a, c, g, or t
  misc_feature (598)..(598): n is a, c, g, or t
  misc_feature (605)..(605): n is a, c, g, or t
  Peptide Sequence Number=SeqID_11914
  Probeset Number=SeqID_20278
nnnnnggcgagccgattgacgtacagcgcacctgggtgccgtgggatcagatctccgacgagcttaaagtggcggtgatggcgggcgaagaccagcgcttcccgcagcattggggttttgatttcgacgcgatccaggcggcattgctgcataacgagcgcggcggctcgattcgcggcgccagcaccttgagccagcaggtgtcgaagaacctgtttttgtggaccggacgcagctatttccgcaagggcctggaagcctggtttaccgggctgatcgagattctctggcccaagcagcgaattcttgaggtgtacctcaacagcgtggaatgggatgaaggcgtgttcggcgcagaagcagcggcgcggcatcactttggggtgagcgccaaggcgctaacccgccagcaggccagctacctggcggcggtgttgcctaacccacgggtgtggagcgccagccatccaacatcgtatgtggcgcgacgggcggcgtggattcggcagcagatgagtcagttgggtggcgacagctacctgaatgagctgaacanntcgcgcaaggcgcctttgggctgactgacaccccacnnaanaactgtn

SEQ ID NO: 5876 - DNA, 530 bp, Zea mays
  misc_feature (1)..(8): n is a, c, g, or t
  misc_feature (501)..(508): n is a, c, g, or t
  misc_feature (511)..(517): n is a, c, g, or t
  misc_feature (519)..(530): n is a, c, g, or t
  Peptide Sequence Number=SeqID_11915
  Probeset Number=SeqID_20279
nnnnnnnnaggcgtcatgacgggcttggacgattggatatgtttgatggacgttgagtatccaatggtactgcgggaaggggaatactgggtgccaggcgtcggccctctgtgccggtgtcccgcccacttcccttcattcaaaggaaaccatcatgtcccgcgttcccctgctcgattccgcctccgccccggccgccagccaggacctgctgcgccatatccacggcgcgttcggcgccacgcccaacatgttccgcgcggtcgccaattcgcccgcggcgctggccagcatgtgggccgcgttcggcgccctgggcggcggcacgctgtccgcgcaactgggcgagaagatcgccgtggccgtggccgacagcaaccgctgcgaatactgcctggcggcgcataccgcgctgggccgcaaggccggcgcgagcgccgaggaaatggccgcggcccaggccggccgcgccaatgacccgcgcaccgccgcggcgctggnnnnnnnnctnnnnnnngnnnnnnnnnnnn

SEQ ID NO: 5877 - DNA, 947 bp, Zea mays
  misc_feature (1)..(2): n is a, c, g, or t
  misc_feature (657)..(658): n is a, c, g, or t
  misc_feature (763)..(766): n is a, c, g, or t
  misc_feature (771)..(772): n is a, c, g, or t
  misc_feature (785)..(785): n is a, c, g, or t
  misc_feature (787)..(787): n is a, c, g, or t
  misc_feature (790)..(790): n is a, c, g, or t
  misc_feature (792)..(794): n is a, c, g, or t
  misc_feature (796)..(796): n is a, c, g, or t
  misc_feature (816)..(817): n is a, c, g, or t
  misc_feature (819)..(822): n is a, c, g, or t
  misc_feature (827)..(836): n is a, c, g, or t
  misc_feature (846)..(846): n is a, c, g, or t
  misc_feature (858)..(858): n is a, c, g, or t
  misc_feature (860)..(860): n is a, c, g, or t
  misc_feature (863)..(868): n is a, c, g, or t
  misc_feature (876)..(879): n is a, c, g, or t
  misc_feature (882)..(906): n is a, c, g, or t
  misc_feature (908)..(908): n is a, c, g, or t
  misc_feature (912)..(914): n is a, c, g, or t
  misc_feature (920)..(933): n is a, c, g, or t
  misc_feature (935)..(935): n is a, c, g, or t
  misc_feature (937)..(945): n is a, c, g, or t
  Peptide Sequence Number=SeqID_11916
  Probeset Number=SeqID_20280
nnagctccatcgcccacgtattcggctttcatcacctgatgcttgccaccgtccggttgttcgccacgcccgcacaatggcaaacctggttcagcctgacggccagcaacaactggttctggggcaacaccctgaacccgctggacacccgcacggtggtcaagcgccacacgggctggcgggaattctcgggacagaagaacttctgctccggggccaacgactcggagatgctgatcgcctcggccatcgatgaaagcgccggcggcaagttgctgatcgcggcgattcccagcgcccgcagcgggatcatcctgcacaacgactggaacaacatgggccagcgccagaccgacagcggcagcgtgaccttcaagcgcgtacgcgtggaagagtccgacctgctgctggacccggggccgttgagcacgccgttcgcctgcctgcgcccgctgattgcgcaactgcacttcgcgaatatcttcctcggcatcgccgagggcgcattcgaagaagcgcgccaatacaccctggaagaagcccgcccgtggttccgctccagcgccagccacagcacccaggacccttacatcctcagccactacggcgacttctgggtggcgctgcaaagcacccgcctgttggtggagcgcgcanngtgaggtactggacgcggcatgggccaagggctcggccctgaccaacgaggaacgcggcacagctgcgattgccatcgccaccgcaaaagtcgccgccagccgcnnnngcctnnagttgtgtagcangntcntnnngntcaccggcgcgcgggcgacnnannnntcggnnnnnnnnnncaggcactgncgcaacttgcgnanccnnnnnntgcatgannnnctnnnnnnnnnnnnnnnnnnnnnnnnngnatgnnnactgannnnnnnnnnnnnnancnnnnnnnnnta

SEQ ID NO: 5878 - DNA, 1108 bp, Zea mays
  misc_feature (1)..(51): n is a, c, g, or t
  misc_feature (54)..(57): n is a, c, g, or t
  misc_feature (59)..(64): n is a, c, g, or t
  misc_feature (73)..(80): n is a, c, g, or t
  misc_feature (84)..(88): n is a, c, g, or t
  misc_feature (97)..(103): n is a, c, g, or t
  misc_feature (105)..(108): n is a, c, g, or t
  misc_feature (116)..(119): n is a, c, g, or t
  misc_feature (126)..(128): n is a, c, g, or t
  misc_feature (138)..(140): n is a, c, g, or t
  Peptide Sequence Number=SeqID_11917
  Probeset Number=SeqID_20281
nnnnnnnnnnnnnnnnnnnnnnnnnnnnnnnnnnnnnnnnnnnnnnnnnnnaannnnannnnnntgatcgccnnnnnnnncccnnnnnaagcccacnnnnnnnannnnttcgagcnnnncaccgannnagggccgatnnncttgctgccgttgccggacaaccgttgcgcgctggtctggacccgcatcggcatggacgccaagcgcctggccgagctggacgagcgcagcttcctcagtgaattgcagggcgtgttcggttaccgcctgggtaccctcaagcaggtcggcgcacgtcacttgtacccgctgacccttgtggaagccgaagagcaagtgcgctcccatctggcggtgctcggtaatgccgcccacagcctgcacccgattgccggtcagggcttcaacctgtccctgcgggatgcctacgcgctcgccgaggcgctgctggccgggcccgcgatccctggcgacctggcgacactgcaggcgtaccgcgagcgtcagcgcatggaccagaaactcaccgtcggcttctccgaccaagtcacccgtctgtttggcagtgcgcaaccgttggtagcgctgggccgcaacatggggttgttgggtctggacctgctgccgccggccaagcgctggttcgcgcgtcaggccatgggcctgggcactcgtcccgatgcgtgagtggctgacccaacgcctgggcaaggcgcggctgttgcgctggatcatgaccttgtacccgccgtacctcggggccggagtccgggtgttgcacatcggcagcgattttcgcgaggtcaaggtgcgcatgggcctgggctggtacaaccgcaattacgtcggcacgcagtttggcggcagcctgtattcgatggtcgatccgttctacatgctgatgctgatggagaatctggggcgcgattacattgtctgggacaaggctgcggccatcgatttcatctcgccgggcaaaggcccggtgtttgccgaattttccatcgaccaaggattgctggacgagattcgccagcacaccgccggcggcgagaaatacttgccgcagctcaaggtgcagattcatgacggctccggcaccctggtg

SEQ ID NO: 5879 - DNA, 170 bp, Zea mays
  misc_feature (1)..(2): n is a, c, g, or t
  Peptide Sequence Number=SeqID_11918
  Probeset Number=SeqID_20282
nnaggctgctctcgaagcggaaccccggcagcgctttccacgcctgcaggaaggcctcctgcaatgcatcctcggcacgtgcctgctggccgccacacaaccgccaaagcacagcgaatacacgcggcgcgtggcgccggtacagcagttcgtaggcagcggtgtcgccc

SEQ ID NO: 5880 - DNA, 170 bp, Zea mays
  misc_feature (169)..(170): n is a, c, g, or t
  Peptide Sequence Number=SeqID_11919
  Probeset Number=SeqID_20283
gggcgacaccgctgcctacgaactgctgtaccggcgccacgcgccgcgtgtattcgctgtgctttggcggttgtgtggcggccagcaggcacgtgccgaggatgcattgcaggaggccttcctgcaggcgtggaaagcgctgccggggttccgcttcgagagcagcctnn

SEQ ID NO: 5881 - DNA, 511 bp, Zea mays
  misc_feature (1)..(7): n is a, c, g, or t
  misc_feature (467)..(467): n is a, c, g, or t
  misc_feature (483)..(484): n is a, c, g, or t
  misc_feature (487)..(493): n is a, c, g, or t
  misc_feature (495)..(495): n is a, c, g, or t
  misc_feature (497)..(499): n is a, c, g, or t
  misc_feature (501)..(506): n is a, c, g, or t
  misc_feature (510)..(511): n is a, c, g, or t
  Peptide Sequence Number=SeqID_11920
  Probeset Number=SeqID_20284
nnnnnnnctacacgctgaccttcgccgcgctgctgctcgtggccggcgccctggccgaccgctacggcgccaagaccatctacctggccggcctgggggtcttcacgctggcctcgctgctgtgcggcatcgcgcccggcggcgacctgctgatcgccgcccgcatgctgcagggactgggcgcggcgctgttcatgcccagctcgctcagcctgctgacccatgcctacgaagacgagcaggtgcgcaaccgcatgctggccgcctggtcggccatcgtggcggtggccggcgccgccggcccgctgctgggcggcgtgctgatccatcaattcggctggcgcggcatcttcctcatcaacctgccgctgggcctggccggtctgtggctggccaggcgccgcatccaggccgcgccgcgccgtccgcgcgcgctcaacccgctgagccacgtgctcggcgtggtngcgctgtccgcgctgnnttnnnnnnngntnnngnnnnnngccnn

SEQ ID NO: 5882 - DNA, 511 bp, Zea mays
  misc_feature (1)..(2): n is a, c, g, or t
  misc_feature (6)..(11): n is a, c, g, or t
  misc_feature (13)..(15): n is a, c, g, or t
  misc_feature (17)..(17): n is a, c, g, or t
  misc_feature (19)..(25): n is a, c, g, or t
  misc_feature (28)..(29): n is a, c, g, or t
  misc_feature (45)..(45): n is a, c, g, or t
  misc_feature (505)..(511): n is a, c, g, or t
  Peptide Sequence Number=SeqID_11420
  Probeset Number=SeqID_20285
nnggcnnnnnncnnnancnnnnnnnaanncagcgcggacagcgcnaccacgccgagcacgtggctcagcgggttgagcgcgcgcggacggcgcggcgcggcctggatgcggcgcctggccagccacagaccggccaggcccagcggcaggttgatgaggaagatgccgcgccagccgaattgatggatcagcacgccgcccagcagcgggccggcggcgccggccaccgccacgatggccgaccaggcggccagcatgcggttgcgcacctgctcgtcttcgtaggcatgggtcagcaggctgagcgagctgggcatgaacagcgccgcgcccagtccctgcagcatgcgggcggcgatcagcaggtcgccgccgggcgcgatgccgcacagcagcgaggccagcgtgaagacccccaggccggccaggtagatggtcttggcgccgtagcggtcggccagggcgccggccacgagcagcagcgcggcgaaggtcagcgtgtagnnnnnnn

SEQ ID NO: 5883 - DNA, 638 bp, Zea mays
  misc_feature (635)..(638): n is a, c, g, or t
  Peptide Sequence Number=SeqID_11421
  Probeset Number=SeqID_20286
gccgatgggccgctgcctggccaggaagcattgcgcttgcagcagcaacagcagcgcgacctgcagcaattacaactggaacagcgtcagcggcaaatccagcgaggcagtttcgcagtaccaccgaccacacccgcactgccggcagacaccgcccaggaccagcgctgctggcctttgagcggtacgcgcgtggccggtgtcacgctgttcaacaaggctgaactgaacacccgcatcgaaccctatgtggcgccgtgcatgggcgtcgcgcagatcaaccgcctgctcgccgagatcacccgcctgtatgtcgaggccggctatatcgccagtcgcccatacctgatcagcaccccggccgccgggcacccgctggatattcacgtcgaggaaggctacgtcgaagccatcgagctggccgatcagagcctccccgtgtcgttacgcggggcattcccgggaatgctcggcgaaccgctgaacctgcgggacctggaacagggcctggaccaactcaatcgcctgcgctcggttgacctcaccgccgacatcgcccccggcagcacaccgggcgcctcacggatcatcctgcgctcgcgcagcagtgcctcgcggtgggcgttgggactggnnnn

SEQ ID NO: 5884 - DNA, 940 bp, Zea mays
  misc_feature (1)..(7): n is a, c, g, or t
  misc_feature (750)..(751): n is a, c, g, or t
  misc_feature (794)..(794): n is a, c, g, or t
  misc_feature (808)..(808): n is a, c, g, or t
  misc_feature (820)..(826): n is a, c, g, or t
  misc_feature (840)..(844): n is a, c, g, or t
  misc_feature (850)..(850): n is a, c, g, or t
  misc_feature (865)..(865): n is a, c, g, or t
  misc_feature (870)..(870): n is a, c, g, or t
  misc_feature (875)..(880): n is a, c, g, or t
  misc_feature (883)..(888): n is a, c, g, or t
  misc_feature (890)..(891): n is a, c, g, or t
  misc_feature (895)..(899): n is a, c, g, or t
  misc_feature (901)..(940): n is a, c, g, or t
  Peptide Sequence Number=SeqID_11422
  Probeset Number=SeqID_20287
nnnnnnngcgcccgacgccagcaccgtggtgctgcacctgtccgagcccgacgcctcgctgctgtcgcagctgtccgaccgcgccggcatgatgatctcgcccgcctcgttcgacaaggatcccggcggcaagccggtgtgctccggcccgtaccagttcaaggaacgggtgcagaacgaccgcatcgtgcttgagaaatttcccaagtattgggacgccgccaactatcacttcgaccgtgtcgtcttcacgccgatccccgacaacaccgtgcgcctgaacaacctgcgcgccggcgacctcgacatcatcgagcgcgtggcgcccagcgacgccaaggcggtcaaggacgacgccaacctgcgcctggccccggtcaccggcctgggcttccagtcgatctcggtcaacctgggcaacggcgcgcgcgccaacaatccgctggccaaggacaagcgcgtgcgccaggcgctcgacctcgccatcgaccgcgacgtgctcaaccaggtcatcggcgaaggccagtaccagccggcctaccagccgttcccgccggccagcttcgcctacaacaagtcgttcgagcacgccggccgcgatcccaagaaggcccaggccctgctcaaggaagcgggcttcgaccgcgtcaagttcgagatcaccttcggcaacaacaccaccatgcagcaggtcttcgaactggtgcaggccatgggcgccgaggccggtttcgacatcaccctgcgtcnngtcgagttcgcctcgctgcaatcgtcgctggcgcgtggtgacntcgaagtcggccanagcggctggtcnnnnnnngtcgatcccagcgnnnnnatccancagtacctcagctgnaaggncaacnnnnnngannnnnngnnctgnnnnncnnnnnnnnnnnnnnnnnnnnnnnnnnnnnnnnnnnnnnnn

SEQ ID NO: 5885 - DNA, 547 bp, Zea mays
  misc_feature (1)..(2): n is a, c, g, or t
  Peptide Sequence Number=SeqID_11423
  Probeset Number=SeqID_20288
nngaacacctccatgcccagcttgtcctggtagaaggcgatggcggtgtcgtaatcgttgacgagcaggacgaggcggcccagcgaatgcatgtcgagactcttttgaaagttttgcttgcggctatgctaaccggtctacgttaatccacttcgcgcagcagccggaatccgaccagcggatagcgcgtttccaccgtattccagttgcggtaggccgagcgcacgtacagcgcccaggtgtgccaggagccgccgcgccgcactttgacgttgccgctggcggggccttgcgggtcatcctggggcgaatgcgcgtagtagtcctcgccataccagtcggacacccattcccaggcgttgccgtgcatgtcgtacagcccgaacgcgttcggcgcgtagctggccaccggcgcggtgaaggcatggccgtcgcggcgcgcggcggcgaacgcctgccactttggccacaggggcgcggcgtcggcgtcgaacgtgttggccacgtccggcaacgcggccggatcgtcgccgttctggtaacggcc

SEQ ID NO: 5886 - DNA, 547 bp, Zea mays
  misc_feature (546)..(547): n is a, c, g, or t
  Peptide Sequence Number=SeqID_11424
  Probeset Number=SeqID_20289
ggccgttaccagaacggcgacgatccggccgcgttgccggacgtggccaacacgttcgacgccgacgccgcgcccctgtggccaaagtggcaggcgttcgccgccgcgcgccgcgacggccatgccttcaccgcgccggtggccagctacgcgccgaacgcgttcgggctgtacgacatgcacggcaacgcctgggaatgggtgtccgactggtatggcgaggactactacgcgcattcgccccaggatgacccgcaaggccccgccagcggcaacgtcaaagtgcggcgcggcggctcctggcacacctgggcgctgtacgtgcgctcggcctaccgcaactggaatacggtggaaacgcgctatccgctggtcggattccggctgctgcgcgaagtggattaacgtagaccggttagcatagccgcaagcaaaactttcaaaagagtctcgacatgcattcgctgggccgcctcgtcctgctcgtcaacgattacgacaccgccatcgccttctaccaggacaagctgggcatggaggtgttcnn

SEQ ID NO: 5887 - DNA, 896 bp, Zea mays
  misc_feature (1)..(5): n is a, c, g, or t
  misc_feature (41)..(43): n is a, c, g, or t
  misc_feature (750)..(752): n is a, c, g, or t
  misc_feature (768)..(769): n is a, c, g, or t
  misc_feature (787)..(791): n is a, c, g, or t
  misc_feature (802)..(804): n is a, c, g, or t
  misc_feature (806)..(806): n is a, c, g, or t
  misc_feature (810)..(816): n is a, c, g, or t
  misc_feature (818)..(819): n is a, c, g, or t
  misc_feature (821)..(831): n is a, c, g, or t
  misc_feature (846)..(848): n is a, c, g, or t
  misc_feature (851)..(859): n is a, c, g, or t
  misc_feature (861)..(862): n is a, c, g, or t
  misc_feature (864)..(870): n is a, c, g, or t
  misc_feature (878)..(880): n is a, c, g, or t
  misc_feature (882)..(885): n is a, c, g, or t
  misc_feature (887)..(894): n is a, c, g, or t
  Peptide Sequence Number=SeqID_11425
  Probeset Number=SeqID_20290
nnnnnggcattttctttgaggccatgcgcgacttgcgcctnnngcgcaagaatttcgagcgcggcttcatggagcagctctacgaggcgtttgccaatcttggcaacgtggagcggggtgagctgcaattgattccggtggtgtcctacgcggcggtgcccggcgtatccggcgatgagctggaaaaagccgttgccctcgaggccatgctgggcaaggtgctgcgccgcgatggcctggcccttgggcagttgacggcgcgtttgagtgcgttgctcgacaagcacatggatgatcgggacaaccctctgggcccggcgatgctgtgtgcgttctttctgcaagcgggacgcagccttggcgtagaaattcgggtcaagctgatcatcctcaagctgtttgaaaaatacgttctcagtgacgctgatctgttgtacggcgaagccaatcaattgctgattgccaccggcgtattgcctgagctcaaggcggtaccctcgcggcgtgcggtcgctcccgccgatttgcctgaagacacaccgccgattaccggccgtccagcagacgacagcgggcaggaagtattcgcggcactgcaagagttgctgtccgccgtgcgcggcagtgtggcgcccacccttgaggcgagcgccgagatgcagccaatttccacccgtgacctgctgcgcctgctctcccatttgcagcaatacgtacctgagcccgaagtggaggatgatttcgatctgnnnaaccagcttgaacagnngctgacccgggtcagcgnnnnnagcggtaagtnnngngtcnnnnnnnanncnnnnnnnnnnntgatcaatctgatcnnnatnnnnnnnnngnncnnnnnnnatgactgnnngnnnncnnnnnnnntc

SEQ ID NO: 5888 - DNA, 557 bp, Zea mays
  misc_feature (1)..(2): n is a, c, g, or t
  misc_feature (5)..(14): n is a, c, g, or t
  misc_feature (16)..(19): n is a, c, g, or t
  misc_feature (26)..(48): n is a, c, g, or t
  misc_feature (555)..(557): n is a, c, g, or t
  Peptide Sequence Number=SeqID_11426
  Probeset Number=SeqID_20291
nncannnnnnnnnncnnnnccttcgnnnnnnnnnnnnnnnnnnnnnnnaacgccggcgtgctggccgtcggcccgctggaagatttcagcctggaagacttcgaccgtaccctcgccatcaacgtgcgcagcgtgtttgtcgccacccaggaagccgcgcggcacatgggtgaaggtggccgcatcatcaacatcggcagcaccaatgccgatcgcatgccgtttgccggtggcggcccgtacgccatgagcaagtcggcgctggtcggcctgaccaaaggcctggcccgcgacctggggccacgtggcatcaccatcaataacgtgcagccaggcccggtggacaccgacatgaacccggcaagtggtgatttcgccgagagcctgatcggcttcatggccgtgggccggtatggccatgtggaagagatcgccagtttcgtcgcctacctggtaggccctgaggccggctatatcaccggcgccagtctgaccatcgacggcggtttcggcgcctgaacacaagctgcgacatcgcaccacgctccgaccttnnn

SEQ ID NO: 5889 - DNA, 497 bp, Zea mays
  misc_feature (1)..(5): n is a, c, g, or t
  misc_feature (370)..(383): n is a, c, g, or t
  misc_feature (386)..(406): n is a, c, g, or t
  misc_feature (408)..(439): n is a, c, g, or t
  misc_feature (447)..(456): n is a, c, g, or t
  misc_feature (458)..(461): n is a, c, g, or t
  misc_feature (463)..(479): n is a, c, g, or t
  misc_feature (481)..(483): n is a, c, g, or t
  misc_feature (486)..(497): n is a, c, g, or t
  Peptide Sequence Number=SeqID_11427
  Probeset Number=SeqID_20292
nnnnnaattgctgttcagcgagcgcctgcgctacctggaagacctgctgccggccagccgggtggtgttgcgcagcaccagcgtggtggcgcaataccatgccgcgctgcagggccagtcgctggccatcctgccctgcttcatcgcggcgcaggaccctcggctcaagccggtgctggaaaaggaagtggagatcacgcgctcgttctggatgtattgccacgaggacctgcgcaagctcaagcgcgtgacggtgctgtgggagttcatccgcaagtcggtgctgaagaatgccgacctgctggccggcaagcgcgggacgatgaaatacctgccctgaagccggcggcggcggcgcggatcacagccnnnnnnnnnnnnnnccnnnnnnnnnnnnnnnnnnnnngnnnnnnnnnnnnnnnnnnnnnnnnnnnnnnnncttaggtnnnnnnnnnncnnnncnnnnnnnnnnnnnnnnngnnncannnnnnnnnnnn

SEQ ID NO: 5890 - DNA, 499 bp, Zea mays
  misc_feature (496)..(499): n is a, c, g, or t
  Peptide Sequence Number=SeqID_11428
  Probeset Number=SeqID_20293
tacaacgtgctggcgcgccatgagccgcgcgccgcgggcggacgcgccgtgcttttcaatggccacctggacgtcgtgccaaccggtccgcatgaactgtgggacccggcgccgttcgacggcgaattacgtgacggctggctgtacggccgaggcgcgggcgacatgaaggccggcatcatctgcgcgctggcggcattcaaggccctgcaggacctgggcgtgcaacccgccggcgccgtaggcttcaacggcgtgcttgaagaggagaacaccggcaacggcaccctggccacggtttcggcgctgcagagcgcgatcgccgcagccaagctcagcgccttcgacgcggtcgttattcccgagcccacgcatgagcgcatgatgagcgcccagctcggcgtgttctggatgtacgtggacatcgtgggccggcccgcacatgccgcctacatgaccacgggtgtcaacccggtcgagactggcttgcggattnnnn

SEQ ID NO: 5891 - DNA, 873 bp, Zea mays
  misc_feature (1)..(13): n is a, c, g, or t
  misc_feature (16)..(16): n is a, c, g, or t
  misc_feature (18)..(21): n is a, c, g, or t
  misc_feature (23)..(31): n is a, c, g, or t
  misc_feature (35)..(40): n is a, c, g, or t
  misc_feature (46)..(46): n is a, c, g, or t
  misc_feature (48)..(51): n is a, c, g, or t
  misc_feature (55)..(55): n is a, c, g, or t
  misc_feature (57)..(65): n is a, c, g, or t
  misc_feature (70)..(74): n is a, c, g, or t
  misc_feature (81)..(103): n is a, c, g, or t
  misc_feature (107)..(128): n is a, c, g, or t
  misc_feature (142)..(149): n is a, c, g, or t
  misc_feature (216)..(216): n is a, c, g, or t
  misc_feature (871)..(873): n is a, c, g, or t
  Peptide Sequence Number=SeqID_11429
  Probeset Number=SeqID_20294
nnnnnnnnnnnnnatnannnnannnnnnnnnggannnnnncaggtngnnnnggcnannnnnnnnnccacnnnnnaaagggnnnnnnnnnnnnnnnnnnnnnnntcannnnnnnnnnnnnnnnnnnnnngcggcatcggacgnnnnnnnngcggagatgtttttgattttcaatctgcagcggcccgatgttctgccgctgggatgatcctgggttnctcaaggcaatctcgctacactatttcagcggcgagcctgtctcgcgcttcgaggctcgcgaagtctcgttggcgtggcaaccctggcgtaccgtggcaacctggtatctgtggcgcagtctggaaccgacgccggtccaatactgacgcaatccaggtcgcccatctacggaaccacactacatgcgcaatacatttctggaatttgaacagccgctcgccgagcttgagaacaagatcgagcagctgcgctatgtgcaggccgattcggcggtggacatctccgacgagatcggacgtctgcagcagaagagccagtcgctggccaaggaaatctacgccaagctcacgccttggcagacggcgctggtcgcccgccacccccagcgtccctacacgctggactacgtgcgcgaaatcttcaccgacttccacgaactgcacggcgaccgcatgtacgccgacgaccagtccatcgtgggcggcctggcgcgcttcaacggctcgccctgcatggtgatcggccaccagaagggccgcgacaccaaggagcgcgccgcgcgcaacttcggcatgccgcgtccggaaggctaccgcaaggccctgcgcctgatgcgcctggccgagaagttcggcattcccgtgttcaccttcnnn

SEQ ID NO: 5892 - DNA, 690 bp, Zea mays
  misc_feature (1)..(7): n is a, c, g, or t
  misc_feature (46)..(50): n is a, c, g, or t
  misc_feature (329)..(331): n is a, c, g, or t
  misc_feature (379)..(388): n is a, c, g, or t
  misc_feature (392)..(394): n is a, c, g, or t
  misc_feature (397)..(414): n is a, c, g, or t
  misc_feature (419)..(423): n is a, c, g, or t
  misc_feature (425)..(435): n is a, c, g, or t
  misc_feature (437)..(439): n is a, c, g, or t
  misc_feature (442)..(447): n is a, c, g, or t
  misc_feature (449)..(450): n is a, c, g, or t
  misc_feature (455)..(472): n is a, c, g, or t
  misc_feature (478)..(484): n is a, c, g, or t
  misc_feature (491)..(499): n is a, c, g, or t
  misc_feature (504)..(514): n is a, c, g, or t
  misc_feature (517)..(520): n is a, c, g, or t
  misc_feature (523)..(527): n is a, c, g, or t
  misc_feature (537)..(540): n is a, c, g, or t
  misc_feature (542)..(563): n is a, c, g, or t
  misc_feature (565)..(565): n is a, c, g, or t
  misc_feature (567)..(568): n is a, c, g, or t
  misc_feature (574)..(574): n is a, c, g, or t
  misc_feature (598)..(608): n is a, c, g, or t
  misc_feature (615)..(628): n is a, c, g, or t
  misc_feature (630)..(645): n is a, c, g, or t
  misc_feature (647)..(653): n is a, c, g, or t
  misc_feature (655)..(667): n is a, c, g, or t
  misc_feature (669)..(690): n is a, c, g, or t
  Peptide Sequence Number=SeqID_11430
  Probeset Number=SeqID_20295
nnnnnnntttgcccgcgccgttggtgccgatgacggcatgcacttnnnnncgttgcaatgccagcgacacgccgttgacggcggtcaggccgccgaagcgccgggtgaccgcgtcggcggtcagcaggggatcaggcatggggctctccttggatcggcagggacagcggtttggcggcgggcgatgcggccggtgcggccggcgtgttcggggcgtggcgggcgcggcgccggcgccattgcgccggcaggccggccagcccgtcgggcagcagcgccaccagcgcgatgatggccaggcccagcggcaggtgccagtggcgcgcgtnnncgccgaacagcgcctgcgactggaacagttcctgcagcagcaccagcnnnnnnnnnncccnnncannnnnnnnnnnnnnnnnnccatnnnnncnnnnnnnnnnntnnncannnnnngnnctgannnnnnnnnnnnnnnnnngtcatnnnnnnngcactcnnnnnnnnnaaccnnnnnnnnnnncgnnnnccnnnnnatttgcccgnnnntnnnnnnnnnnnnnnnnnnnnnnantnnccgtcntgaatatcgatggaaacccggttnnnnnnnnnnncttcccnnnnnnnnnnnnnnannnnnnnnnnnnnnnncnnnnnnngnnnnnnnnnnnnngnnnnnnnnnnnnnnnnnnnnnn

SEQ ID NO: 5893 - DNA, 690 bp, Zea mays
  misc_feature (1)..(22): n is a, c, g, or t
  misc_feature (24)..(36): n is a, c, g, or t
  misc_feature (38)..(44): n is a, c, g, or t
  misc_feature (46)..(61): n is a, c, g, or t
  misc_feature (63)..(76): n is a, c, g, or t
  misc_feature (83)..(93): n is a, c, g, or t
  misc_feature (117)..(117): n is a, c, g, or t
  misc_feature (123)..(124): n is a, c, g, or t
  misc_feature (126)..(126): n is a, c, g, or t
  misc_feature (128)..(149): n is a, c, g, or t
  misc_feature (151)..(154): n is a, c, g, or t
  misc_feature (164)..(168): n is a, c, g, or t
  misc_feature (171)..(174): n is a, c, g, or t
  misc_feature (177)..(187): n is a, c, g, or t
  misc_feature (192)..(200): n is a, c, g, or t
  misc_feature (207)..(213): n is a, c, g, or t
  misc_feature (219)..(236): n is a, c, g, or t
  misc_feature (241)..(242): n is a, c, g, or t
  misc_feature (244)..(249): n is a, c, g, or t
  misc_feature (252)..(254): n is a, c, g, or t
  misc_feature (256)..(266): n is a, c, g, or t
  misc_feature (268)..(272): n is a, c, g, or t
  misc_feature (277)..(294): n is a, c, g, or t
  misc_feature (297)..(299): n is a, c, g, or t
  misc_feature (303)..(312): n is a, c, g, or t
  misc_feature (360)..(362): n is a, c, g, or t
  misc_feature (641)..(645): n is a, c, g, or t
  misc_feature (684)..(690): n is a, c, g, or t
  Peptide Sequence Number=SeqID_11431
  Probeset Number=SeqID_20296
nnnnnnnnnnnnnnnnnnnnnncnnnnnnnnnnnnncnnnnnnngnnnnnnnnnnnnnnnntnnnnnnnnnnnnnngggaagnnnnnnnnnnnaaccgggtttccatcgatattcangacggnnantnnnnnnnnnnnnnnnnnnnnnnannnncgggcaaatnnnnnggnnnncgnnnnnnnnnnnggttnnnnnnnnngagtgcnnnnnnnatgacnnnnnnnnnnnnnnnnnntcagnncnnnnnntgnnnannnnnnnnnnngnnnnnatggnnnnnnnnnnnnnnnnnntgnnngggnnnnnnnnnngctggtgctgctgcaggaactgttccagtcgcaggcgctgttcggcgnnnacgcgcgccactggcacctgccgctgggcctggccatcatcgcgctggtggcgctgctgcccgacgggctggccggcctgccggcgcaatggcgccggcgccgcgcccgccacgccccgaacacgccggccgcaccggccgcatcgcccgccgccaaaccgctgtccctgccgatccaaggagagccccatgcctgatcccctgctgaccgccgacgcggtcacccggcgcttcggcggcctgaccgccgtcaacggcgtgtcgctggcattgcaacgnnnnnaagtgcatgccgtcatcggcaccaacggcgcgggcaaannnnnnn

SEQ ID NO: 5894 - DNA, 683 bp, Zea mays
  misc_feature (1)..(2): n is a, c, g, or t
  misc_feature (577)..(579): n is a, c, g, or t
  misc_feature (605)..(611): n is a, c, g, or t
  misc_feature (614)..(616): n is a, c, g, or t
  misc_feature (618)..(618): n is a, c, g, or t
  misc_feature (620)..(622): n is a, c, g, or t
  misc_feature (626)..(628): n is a, c, g, or t
  misc_feature (641)..(643): n is a, c, g, or t
  misc_feature (651)..(652): n is a, c, g, or t
  misc_feature (655)..(655): n is a, c, g, or t
  misc_feature (657)..(672): n is a, c, g, or t
  misc_feature (674)..(683): n is a, c, g, or t
  Peptide Sequence Number=SeqID_11432
  Probeset Number=SeqID_20297
nngtggccgagtacttcacccacatgccgcggccggacttcccgcccaaggagaaggactggccggacggcaagaagccgaaggacgcgcgctactgacgcgtggcggggcgagcggccggcttgccccgcgtcctacaatcggcgggtcatccttagtccgggcccgccatggaactgcgccagcttcgttatttcgtccgcgtcgtcgaagccggcagcatcggccgcgcggcgatgtcgctgggcatggtgacctccgcgctcagccagcagatcagccggctcgaaggcgagctggccacgcggctgctgcaacgcagcgccagcggcgtggtgccgaccgacgcggggctggcgttcttccgccaggcccagctcgcgctgcgccatgccgacgacgccgtccacgccgcgcagcaggcgcgcctggccggccatgtcagcgtcggcctgtcgtctaccaccgcgtccatcctgggggcgccgttcgtgcaggccatgaaccagcgctatccggatatccgcctgcatctggtcgaggcgctgtcgggccacctggccgacatgctcaacgnnngccagctcgacctggccgtcgtgttnnnnnnncgnnncngnnngccnnnggagcgtgatgcnnntgctgganngancnnnnnnnnnnnnnnnncnnnnnnnnnn

SEQ ID NO: 5895 - DNA, 810 bp, Zea mays
  misc_feature (1)..(4): n is a, c, g, or t
  misc_feature (8)..(8): n is a, c, g, or t
  misc_feature (36)..(36): n is a, c, g, or t
  misc_feature (39)..(39): n is a, c, g, or t
  misc_feature (41)..(47): n is a, c, g, or t
  misc_feature (59)..(61): n is a, c, g, or t
  misc_feature (64)..(64): n is a, c, g, or t
  misc_feature (68)..(72): n is a, c, g, or t
  misc_feature (74)..(74): n is a, c, g, or t
  misc_feature (88)..(89): n is a, c, g, or t
  misc_feature (102)..(105): n is a, c, g, or t
  misc_feature (123)..(124): n is a, c, g, or t
  misc_feature (808)..(810): n is a, c, g, or t
  Peptide Sequence Number=SeqID_11433
  Probeset Number=SeqID_20298
nnnngagngccggttgctgcgcctggtcacggaggncgncnnnnnnnaatggatcatcnnnatngagnnnnncngcggcagcggcgannacgcccggcgcgnnnngttcgggatgggcgtcannatcgccctcaagaaacgcggcacgttcatggagtacctgctcgaccagcatcctggagaagtatttgccaccaccagccggcctggctggcatgagtcgggcgcgttcgtgctgcctgggcgaaccatcggcagcgccaatgtgcggtaccaggccagcaacaaggctcaggtacttttcagccggcgcggcgagctggcgctgtggcaatcggaggtagccgccaagtgcgcgggtaacccggtgctgacactagcgatcggctgctcactggccggcccactgctgagtttggtgggcgtgctgggcggtggtgttcacctggtgggcgatagctcgagcggcaagtcgctggcgcaactgatcgggtcgtctgtatggggcgacccgggcgtgttcgccgccagttgggacatgaccaagggcggcctggagatcgaagcgtcgagccgcaatgacaccatcctccccctggatgagatcaagcgtgctgatcccaagcgagtacaggaaatggcctactccctcgccaacggccagggtaaaggcaccatgacccgtgagcgcgaaggccgcgccaaattgagctggcgcctgctgacgctctccagcggcgagcgctcgctttccgaacacgcggccatatccggcaatgccgcacacgctggcgccgagttacgcatnnn

SEQ ID NO: 5896 - DNA, 708 bp, Zea mays
  misc_feature (707)..(708): n is a, c, g, or t
  Peptide Sequence Number=SeqID_11434
  Probeset Number=SeqID_20299
tgggcaccttccggctgctgctgtgcgccgcgccggactacctggcgcgtcacggcgcgccgcaacggccgcgcgacctggaacggcaccgggcggtgcggttccgctaccccaacgccggcacgctgcaggcgtggccgctggcgctggcctctggcgaagccgagccgcggctgaccgccgcgttcacctgcaacaacatggaagccctgctgggcgcgaccatccaggggttcggcatcggctgcatgcccgatttcctggcgcgcgacgcgctcgcggccggcacgctgcgcacggtgctggacgcacaagtgcgcggcgcgggccgcttccaggcgttgtggccgtcgaaccgcaacctgtcgcccaaggtgcgcgtgttcgtggacttcctgggcgagcggctgttccgcgacggcgaccgcgcctagcccggcgcaggccctggcgccgctcggatcacgccaccggcatccgctcgcacagcaggccgatcgccgccaggtcgccctgccgcgccagacgctgcacttgctcgctgaaatccttgaaggccggatcgcgcgcctggatcgcgcgcgcccagtccatcaggtccgagatcccgccgatgtccagcaagcgttgcacctgctccagctcggcgcgcgacaggcgcggcagcgacgccgacgcgggcgccgcctcgctggcgggctgttgcnn

SEQ ID NO: 5897 - DNA, 909 bp, Zea mays
  misc_feature (1)..(1): n is a, c, g, or t
  misc_feature (6)..(12): n is a, c, g, or t
  misc_feature (18)..(23): n is a, c, g, or t
  misc_feature (26)..(44): n is a, c, g, or t
  misc_feature (49)..(59): n is a, c, g, or t
  misc_feature (65)..(65): n is a, c, g, or t
  misc_feature (67)..(67): n is a, c, g, or t
  misc_feature (69)..(74): n is a, c, g, or t
  misc_feature (85)..(85): n is a, c, g, or t
  misc_feature (88)..(91): n is a, c, g, or t
  misc_feature (108)..(108): n is a, c, g, or t
  misc_feature (172)..(177): n is a, c, g, or t
  misc_feature (222)..(223): n is a, c, g, or t
  Peptide Sequence Number=SeqID_11435
  Probeset Number=SeqID_20300
nttaannnnnnntttttnnnnnnaannnnnnnnnnnnnnnnnnnccgcnnnnnnnnnnntttttncngnnnnnnccccgcaaagntgnnnntcacgcaccctttggcnggtgttcatcgtcgtactgtttccaaggccctgacactggtttatctgttgatgaacgaagacnnnnnnggtggaccggcagtacagccacggtgtcgccctgaccttgcgcgnntactgggccgcagaccccgagaaccgcgagaagatcgccaaggccgctaccctggtccgggtcgcgggtgcgggtgtgcccgagggcgagcaacattggccctacagcgaaatctaccaacgccagatgcaggccgaactgggtgaagacaccgaggtgcggctacgcatgcatgtatcaccggcgctctgggtgcgggccccaagcctgggcgaggactggctgaaggtgccgctgtatccgcatccattgcgggggcagaagatctggaacgtgttgggctggttcctggcgattggtttgctttccaccgcgtctgcctggattttcgtgcgccagctcaatcagccgctcaaacgcctggtgtttgcggcacgccagcttggtcagggccgtagcgtgcggctgcccatcagcgacacgccgagtgaaatgaccgaggtgtacagcgcgttcaaccagatggccgaggatgtcgaacaggcggggcgcgagcgcgagctgatgctggcgggggtgtcccatgacctgcgcacgccattgacgcgtttgcggctttccctggaactgatgggcaaccacaccgaccttaccgacgacatggttcgagacatcgaggacatggacgcgattctcgaccagttcctcgcgttcatccgcgacggtcgcgacgaggtggtggaaga

SEQ ID NO: 5898 - DNA, 570 bp, Zea mays
  misc_feature (1)..(2): n is a, c, g, or t
  Peptide Sequence Number=SeqID_11436
  Probeset Number=SeqID_20301
nnacagaagcgaccgctctactcaggccgccttatcaacgagactgatgattactatcgaaccggtcgcctattggcttaccaaaacccattcctataatcgcctccactttccccctcccgtctgtcctcaggcgaaatatcctcccggaacccgacaccatgccaagcgcaagccgggcccctagcggcctccccgaacataatcaacaaaccgtcctgcaacagtggctggcgattctctcggttgccgtgggcgccttcgccctggtcaccagcgaattcctgccagtaggcgtactcaacgacgtcgccgccgacctcggcatcagcgccggccacgccggcctgatggtcaccctgcccggcatcatggccgccctcgccgccccgctgctgtcggtgggcattggcgccatggaccgccgctacctgctgatcggcctgaccctgatcatgatcatcgccaacatggtggtggcctacgccagcgacttcagcctgctgctgttcggccgcgtactgctgggcatcagcatcggcggcttctgggccacggccatcgccctca

SEQ ID NO: 5899 - DNA, 491 bp, Zea mays
  misc_feature (1)..(3): n is a, c, g, or t
  Peptide Sequence Number=SeqID_11437
  Probeset Number=SeqID_20302
nnntgaccgtgtggctggccatcgtgggcgtggcgccgttgttcatctcgcgcttcacgcgcaaggcggtctacggcctgagctttttggtggtgtacccgatcgttgcctacttcctgctgcacggcgggatcttcggcatgaccaacgtggccaccagccaatggggcggcttgatgctgaccctggtgatcgccaccgtcggcattgccggggccttgcccctgggcatcgtgctggcgctgggtcggcgttcgaacatgccggcgattcgtgtggtctgcgtgaccttcatcgagttctggcgcggcgtgccgttgatcacggtgctgttcatgtcgtcggtaatgttgccgctgttcctgccggaaggcatgggcatcgacaaattgctgcgggcgttgatcggcgtgatcctgttccagtcggcctacgtggccgaagtggtgcgcggtggcttgcaggcgattcccaagggccaatacgaggcc

SEQ ID NO: 5900 - DNA, 410 bp, Zea mays
  misc_feature (1)..(7): n is a, c, g, or t
  misc_feature (369)..(372): n is a, c, g, or t
  misc_feature (385)..(388): n is a, c, g, or t
  misc_feature (393)..(396): n is a, c, g, or t
  misc_feature (398)..(408): n is a, c, g, or t
  misc_feature (410)..(410): n is a, c, g, or t
  Peptide Sequence Number=SeqID_11438
  Probeset Number=SeqID_20303
nnnnnnnggggccgcgcttcgggatgagacagatcggcgtagggaagacgcgccatgaaaactccgcagagggattagggccggttggcgccatcgatcctagggcttcccagcatcgaaaggccgaggcgcagcaaatgcacacattcgcaagaactttgacataatgacaacacattgcgcacctccaggacaagcctagaatgaatgcgccgacccagtcccacccgcccgtcaccctcgccaactgcgatagcgaaccgatccacgtaccgggcgcgatccagccgctgggcgcgctgctcgcgttcgacgccgcgggggtgctgcgctacgccagcgaaaacgcgccgcaggtgctgggcatgnnnntggcactgggctnnnnctgcnnnncnnnnnnnnnnncn

SEQ ID NO: 5901 - DNA, 410 bp, Zea mays
  misc_feature (1)..(1): n is a, c, g, or t
  misc_feature (3)..(13): n is a, c, g, or t
  misc_feature (15)..(18): n is a, c, g, or t
  misc_feature (23)..(26): n is a, c, g, or t
  misc_feature (39)..(42): n is a, c, g, or t
  misc_feature (404)..(410): n is a, c, g, or t
  Peptide Sequence Number=SeqID_11439
  Probeset Number=SeqID_20304
ngnnnnnnnnnnngnnnngcagnnnnagcccagtgccannnncatgcccagcacctgcggcgcgttttcgctggcgtagcgcagcacccccgcggcgtcgaacgcgagcagcgcgcccagcggctggatcgcgcccggtacgtggatcggttcgctatcgcagttggcgagggtgacgggcgggtgggactgggtcggcgcattcattctaggcttgtcctggaggtgcgcaatgtgttgtcattatgtcaaagttcttgcgaatgtgtgcatttgctgcgcctcggcctttcgatgctgggaagccctaggatcgatggcgccaaccggccctaatccctctgcggagttttcatggcgcgtcttccctacgccgatctgtctcatcccgaagcgcggccccnnnnnnn

SEQ ID NO: 5902 - DNA, 218 bp, Zea mays
  misc_feature (1)..(3): n is a, c, g, or t
  Peptide Sequence Number=SeqID_11440
  Probeset Number=SeqID_20305
nnnacctgcgccagctcgccggtgatctcgatgcgcagcttctgggcggtcttgccctggcgtacatgcaggaagccgtcgcgcatgtccgtctccagaaaccgcagggtgtcggccggccgctggcccgccaggtaggccaggtccatggcgtcctgcagcggctcgtccgcagccttccagacctgcgcataggtgtcgtcctcgacgtaagtgtc

SEQ ID NO: 5903 - DNA, 218 bp, Zea mays
  misc_feature (216)..(218): n is a, c, g, or t
  Peptide Sequence Number=SeqID_11441
  Probeset Number=SeqID_20306
gacacttacgtcgaggacgacacctatgcgcaggtctggaaggctgcggacgagccgctgcaggacgccatggacctggcctacctggcgggccagcggccggccgacaccctgcggtttctggagacggacatgcgcgacggcttcctgcatgtacgccagggcaagaccgcccagaagctgcgcatcgagatcaccggcgagctggcgcaggtnnn

SEQ ID NO: 5904 - DNA, 306 bp, Zea mays
  misc_feature (1)..(11): n is a, c, g, or t
  misc_feature (252)..(254): n is a, c, g, or t
  misc_feature (265)..(270): n is a, c, g, or t
  misc_feature (275)..(277): n is a, c, g, or t
  misc_feature (282)..(285): n is a, c, g, or t
  misc_feature (294)..(306): n is a, c, g, or t
  Peptide Sequence Number=SeqID_11442
  Probeset Number=SeqID_20307
nnnnnnnnnnngccggcctttgccgcgcgctacctggtgatggcctgggtcctgtgcctgctgccgtggctgcccgaggacaccgaactgacgctggacgcctccgatcccgccgtgtggcacgcgcgcctgcccgccccggccgacgccccggccgcgccggcgctgttcgaccctcgggacatcgaaaacctggcgctggcctcgggctggcgcctggaacgacaaccccaatgctggccgctgcacctnnntgccgcgcccnnnnnngatcnnncatgnnnncccctgagnnnnnnnnnnnnn

SEQ ID NO: 5905 - DNA, 306 bp, Zea mays
  misc_feature (1)..(13): n is a, c, g, or t
  misc_feature (22)..(25): n is a, c, g, or t
  misc_feature (30)..(32): n is a, c, g, or t
  misc_feature (37)..(42): n is a, c, g, or t
  misc_feature (53)..(55): n is a, c, g, or t
  misc_feature (296)..(306): n is a, c, g, or t
  Probeset Number=SeqID_20308
nnnnnnnnnnnnnctcaggggnnnncatgnnngatcnnnnnngggcgcggcannnaggtgcagcggccagcattggggttgtcgttccaggcgccagcccgaggccagcgccaggttttcgatgtcccgagggtcgaacagcgccggcgcggccggggcgtcggccggggcgggcaggcgcgcgtgccacacggcgggatcggaggcgtccagcgtcagttcggtgtcctcgggcagccacggcagcaggcacaggacccaggccatcaccaggtagcgcgcggcaaaggccggcnnnnnnnnnnn

SEQ ID NO: 5906 - DNA, 993 bp, Zea mays
  misc_feature (1)..(2): n is a, c, g, or t
  misc_feature (687)..(689): n is a, c, g, or t
  misc_feature (717)..(717): n is a, c, g, or t
  misc_feature (719)..(721): n is a, c, g, or t
  misc_feature (738)..(740): n is a, c, g, or t
  misc_feature (748)..(748): n is a, c, g, or t
  misc_feature (758)..(758): n is a, c, g, or t
  misc_feature (771)..(772): n is a, c, g, or t
  misc_feature (774)..(780): n is a, c, g, or t
  misc_feature (791)..(792): n is a, c, g, or t
  misc_feature (797)..(799): n is a, c, g, or t
  misc_feature (806)..(814): n is a, c, g, or t
  misc_feature (816)..(816): n is a, c, g, or t
  misc_feature (818)..(818): n is a, c, g, or t
  misc_feature (823)..(826): n is a, c, g, or t
  misc_feature (830)..(831): n is a, c, g, or t
  misc_feature (833)..(866): n is a, c, g, or t
  misc_feature (869)..(888): n is a, c, g, or t
  misc_feature (891)..(901): n is a, c, g, or t
  misc_feature (903)..(944): n is a, c, g, or t
  misc_feature (946)..(957): n is a, c, g, or t
  misc_feature (960)..(987): n is a, c, g, or t
  misc_feature (993)..(993): n is a, c, g, or t
  Peptide Sequence Number=SeqID_11443
  Probeset Number=SeqID_20309
nnacctggtggcagaccgaaaccggcggcatcatgctcagcccgctggtcagcgcacaacggatcaagcccggttgcgccacccaacccatgtttggcgtggtgcccgtactgctggatgagcaaggcaaggaaatcagcggcgccggcagcggcgtgctggcgattaaatccagttggccggggcagattcgcagcgtgtacggcgacccgcaacggatgatcgacacctatttcaaaccctatccgggctactacttcaccggcgacggcgcccggcgagacgaggacggcgactactggatcaccgggcgtatcgatgatgtgatcaacgtgtccgggcaccgtatcggcaccgccgaggtggaaagcgccctggtgttgcatgatcaggtcgccgaagccgccgtggtgggctatccccacgacgtcaaaggccagggcatctatgccttcgtcacgcccatgaatggcgtcgagcccgacgaggcgctgaaaaaacacctgctggatctggtgagcaaggaaatcggcagtttcgccaagcccgagctgattcaatgggcaccggccttgccgaaaacccgctcaggcaagatcatgcggcggattttgcgcaagattgcctgcaacgaactggacagcctgggggatacttccaccctggccgacccgagcgtggtagatnnnctgatcgacaagcgcctcaaccgatagnannncatggaattcattcgcnnncgcatcgnaaaccagctnatgagcctgaccnncnnnnnnntgggtcaactnnacctnnnaaccccnnnnnnnnntncnggtcnnnntggnncnnnnnnnnnnnnnnnnnnnnnnnnnnnnnnnnnnttnnnnnnnnnnnnnnnnnnnnggnnnnnnnnnnntnnnnnnnnnnnnnnnnnnnnnnnnnnnnnnnnnnnnnnnnnngnnnnnnnnnnnnttnnnnnnnnnnnnnnnnnnnnnnnnnnnncccgtn

SEQ ID NO: 5907 - DNA, 972 bp, Zea mays
  misc_feature (1)..(314): n is a, c, g, or t
  misc_feature (968)..(972): n is a, c, g, or t
  Peptide Sequence Number=SeqID_11444
  Probeset Number=SeqID_20310
nnnnnnnnnnnnnnnnnnnnnnnnnnnnnnnnnnnnnnnnnnnnnnnnnnnnnnnnnnnnnnnnnnnnnnnnnnnnnnnnnnnnnnnnnnnnnnnnnnnnnnnnnnnnnnnnnnnnnnnnnnnnnnnnnnnnnnnnnnnnnnnnnnnnnnnnnnnnnnnnnnnnnnnnnnnnnnnnnnnnnnnnnnnnnnnnnnnnnnnnnnnnnnnnnnnnnnnnnnnnnnnnnnnnnnnnnnnnnnnnnnnnnnnnnnnnnnnnnnnnnnnnnnnnnnnnnnnnnnnnnnnnnnnnnnnnnnnnnnnnnnnnnnnnnnnnnntcccatccacaccatcgctcgcacctgattcccacttaagtactcatgaccgggtcccccttgccctctcccactttctggcgcgacaagcgcgttttgctgaccggtcacacaggtttcaaaggcggctggttggcgctgtggctgcaccggctgggcgcacgcgtcacgggcatctcccttccggccgaaacgactccggcgctccaccaggccgcgcgcatcgacagcctgatcgacggccggcactgcgacatccgcgatgccgccgccctgcgacaacaggtcctggaggcgcgacccgaaatcgtgctgcacctggccgcccaggcgctggtgcggcccagctacgccgaaccggtggacacgttcgccaccaacgtgatgggcaccgcgcacctgctggacgcgctgcgatcggcgccggacgccaaggtggccgtcatggtcaccaccgacaaggtctaccgcaacaacgaatggccctacccgtaccgcgagcacgacacgctgggcggccacgatccctatagcgccagcaaggcggccagcgaactggtcatcgcctcgtaccgcgacgccttcctgaaacaacaaggcctggcggtcgccagcgcgcgcgccggcaatgtgatcggcggcggcgactggtcnnnnn

SEQ ID NO: 5908 - DNA, 1055 bp, Zea mays
  misc_feature (1)..(3): n is a, c, g, or t
  misc_feature (679)..(679): n is a, c, g, or t
  misc_feature (684)..(684): n is a, c, g, or t
  misc_feature (703)..(707): n is a, c, g, or t
  misc_feature (727)..(727): n is a, c, g, or t
  misc_feature (735)..(742): n is a, c, g, or t
  misc_feature (747)..(756): n is a, c, g, or t
  misc_feature (758)..(758): n is a, c, g, or t
  misc_feature (761)..(763): n is a, c, g, or t
  misc_feature (768)..(771): n is a, c, g, or t
  misc_feature (773)..(777): n is a, c, g, or t
  misc_feature (779)..(858): n is a, c, g, or t
  misc_feature (860)..(862): n is a, c, g, or t
  misc_feature (864)..(900): n is a, c, g, or t
  misc_feature (904)..(904): n is a, c, g, or t
  misc_feature (906)..(931): n is a, c, g, or t
  misc_feature (934)..(946): n is a, c, g, or t
  misc_feature (950)..(952): n is a, c, g, or t
  misc_feature (954)..(957): n is a, c, g, or t
  misc_feature (961)..(961): n is a, c, g, or t
  misc_feature (963)..(988): n is a, c, g, or t
  misc_feature (990)..(997): n is a, c, g, or t
  misc_feature (1003)..(1003): n is a, c, g, or t
  misc_feature (1005)..(1011): n is a, c, g, or t
  misc_feature (1013)..(1045): n is a, c, g, or t
  misc_feature (1047)..(1053): n is a, c, g, or t
  Peptide Sequence Number=SeqID_11445
  Probeset Number=SeqID_20311
nnnttggtcatttgggcggcgatgggggttggggtctcgggtttgggggcgggtgcggccgtggtggctagcgagaggctggtgaggaaggcgaagatgagggaggagaaatacgctttatgcattggtgacgctccatgacatcgataagggaaaagcagcttttccgaagctgcttttcaaacttaggcgatgagcgaacgctgtcaaaaaggatgccgttacagagtgtgtgagggctcgagatagagaatgatcggttcacatgaaattcatgccccctccgcttccaaactcaatgccgccagacgaacctgaaccattaccgcaaaaaataaccttccagccctagcatgaggtaaaatttgtggaaaagacgaagtggcgtaagctgagccacttgcacagcgaacagcgagacggtagccccgaaaaaatgcgaattccccatgcgtaccatcacgcggaaggatttacgatcctacataagaatggagagtccatatgaaatggtggtactacttatgagagctcagggagcagcctttcaagtttcgctttgtattttttgattttttggattttattgagtcgtgccaatctctgctcttcaggctttcgctaaagtagatcactgacgatgactgcacagaattttctattaagcggaaacgtgctntgtcngccgggcatactgctttgnnnnnccccgatattggcggaccgntcctgaannnnnnnnctcannnnnnnnnngngannngcatnnnntnnnnntnnnnnnnnnnnnnnnnnnnnnnnnnnnnnnnnnnnnnnnnnnnnnnnnnnnnnnnnnnnnnnnnnnnnnnnnnnnnnnnnannncnnnnnnnnnnnnnnnnnnnnnnnnnnnnnnnnnnnnnaacncnnnnnnnnnnnnnnnnnnnnnnnnnnctnnnnnnnnnnnnncccnnntnnnntccngnnnnnnnnnnnnnnnnnnnnnnnnnncnnnnnnnncccccncnnnnnnncnnnnnnnnnnnnnnnnnnnnnnnnnnnnnnnnncnnnnnnnct

SEQ ID NO: 5909 - DNA, 1055 bp, Zea mays
  misc_feature (3)..(9): n is a, c, g, or t
  misc_feature (11)..(43): n is a, c, g, or t
  misc_feature (45)..(51): n is a, c, g, or t
  misc_feature (53)..(53): n is a, c, g, or t
  misc_feature (59)..(66): n is a, c, g, or t
  misc_feature (68)..(93): n is a, c, g, or t
  misc_feature (95)..(95): n is a, c, g, or t
  misc_feature (99)..(102): n is a, c, g, or t
  misc_feature (104)..(106): n is a, c, g, or t
  misc_feature (110)..(122): n is a, c, g, or t
  misc_feature (125)..(150): n is a, c, g, or t
  misc_feature (152)..(152): n is a, c, g, or t
  misc_feature (156)..(192): n is a, c, g, or t
  misc_feature (194)..(196): n is a, c, g, or t
  misc_feature (198)..(277): n is a, c, g, or t
  misc_feature (279)..(283): n is a, c, g, or t
  misc_feature (285)..(288): n is a, c, g, or t
  misc_feature (293)..(295): n is a, c, g, or t
  misc_feature (298)..(298): n is a, c, g, or t
  misc_feature (300)..(309): n is a, c, g, or t
  misc_feature (314)..(321): n is a, c, g, or t
  misc_feature (329)..(329): n is a, c, g, or t
  misc_feature (349)..(353): n is a, c, g, or t
  misc_feature (372)..(372): n is a, c, g, or t
  misc_feature (377)..(377): n is a, c, g, or t
  misc_feature (1053)..(1055): n is a, c, g, or t
  Probeset Number=SeqID_20312
agnnnnnnngnnnnnnnnnnnnnnnnnnnnnnnnnnnnnnnnngnnnnnnngngggggnnnnnnnngnnnnnnnnnnnnnnnnnnnnnnnnnncnggannnnannngggnnnnnnnnnnnnnagnnnnnnnnnnnnnnnnnnnnnnnnnngngttnnnnnnnnnnnnnnnnnnnnnnnnnnnnnnnnnnnnngnnntnnnnnnnnnnnnnnnnnnnnnnnnnnnnnnnnnnnnnnnnnnnnnnnnnnnnnnnnnnnnnnnnnnnnnnnnnnnnnnnnannnnnannnnatgcnnntcncnnnnnnnnnntgagnnnnnnnnttcaggancggtccgccaatatcggggnnnnncaaagcagtatgcccggcngacanagcacgtttccgcttaatagaaaattctgtgcagtcatcgtcagtgatctactttagcgaaagcctgaagagcagagattggcacgactcaataaaatccaaaaaatcaaaaaatacaaagcgaaacttgaaaggctgctccctgagctctcataagtagtaccaccatttcatatggactctccattcttatgtaggatcgtaaatccttccgcgtgatggtacgcatggggaattcgcattttttcggggctaccgtctcgctgttcgctgtgcaagtggctcagcttacgccacttcgtcttttccacaaattttacctcatgctagggctggaaggttattttttgcggtaatggttcaggttcgtctggcggcattgagtttggaagcggagggggcatgaatttcatgtgaaccgatcattctctatctcgagccctcacacactctgtaacggcatcctttttgacagcgttcgctcatcgcctaagtttgaaaagcagcttcggaaaagctgcttttcccttatcgatgtcatggagcgtcaccaatgcataaagcgtatttctcctccctcatcttcgccttcctcaccagcctctcgctagccaccacggccgcacccgcccccaaacccgagaccccaacccccatcgccgcccaaatgaccaannn

SEQ ID NO: 5910 - DNA, 452 bp, Zea mays
  misc_feature (1)..(2): n is a, c, g, or t
  Peptide Sequence Number=SeqID_11446
  Probeset Number=SeqID_20313
nngctcacctggaaatcgacgccgggctgaccgtcgaggaaggccacaagatcgccgtgcaagcgcgccagcgcgtcatgcaacggcatcgtgtattgaacgtgatgacccatgttgatccctggagacctcccgacgcgcccaagcagggcgccgagggcagggcgattatcgaaccaggccgtccgtagcgcgctttgacgacaaggaagaaacatgaaaatcaagaactccaatactcagtatgcaggcctcgtgatcgccatgcactggctcatgctcgtggtcctggcattggtctacgcctgtatggaattgcgcgggctggccactaaaggcaccgatctgtacaacaacatcaaggcgctgcatttctcgctggggttgtgtgtgatcgggctggtggttttgcgggtggttatccgggtggcttcgggcccggcgcctggcgt

SEQ ID NO: 5911 - DNA, 452 bp, Zea mays
  misc_feature (451)..(452): n is a, c, g, or t
  Peptide Sequence Number=SeqID_11447
  Probeset Number=SeqID_20314
acgccaggcgccgggcccgaagccacccggataaccacccgcaaaaccaccagcccgatcacacacaaccccagcgagaaatgcagcgccttgatgttgttgtacagatcggtgcctttagtggccagcccgcgcaattccatacaggcgtagaccaatgccaggaccacgagcatgagccagtgcatggcgatcacgaggcctgcatactgagtattggagttcttgattttcatgtttcttccttgtcgtcaaagcgcgctacggacggcctggttcgataatcgccctgccctcggcgccctgcttgggcgcgtcgggaggtctccagggatcaacatgggtcatcacgttcaatacacgatgccgttgcatgacgcgctggcgcgcttgcacggcgatcttgtggccttcctcgacggtcagcccggcgtcgatttccaggtgagcnn

SEQ ID NO: 5912 - DNA, 471 bp, Zea mays
  misc_feature (469)..(471): n is a, c, g, or t
  Peptide Sequence Number=SeqID_11448
  Probeset Number=SeqID_20315
aacaaccgctcccaagccactggtttgatggactacattcgattaagggggctcatggaccgtttccaggaaatgcagattttcctcgcagtcgccgaagaacagggctttgccgcggcggcccggcgcctgaaaatctcgccccccagcgtgacccgcgccattgccgcgatggaagcgcgtatcggcacgcagttgctctcgcgcaccacccgcagcctgcacctgagcgaggctggccagcgttatctggatgattgccggcgcattctcgcggagctggttgaggccgaagaagcagcagccggtagcttctcgatcccatgggggcacttgacggtcaccgcgcctgtgttgttcggcgaattgttcgtcgcgccgatcctgggggagtatctggaccagtttgcccaggtcagcatcaacgccttgctggtggaccgtgtggtcaatatgaccgacgaaggcnnn

SEQ ID NO: 5913 - DNA, 557 bp, Zea mays
  misc_feature (1)..(3): n is a, c, g, or t
  misc_feature (403)..(405): n is a, c, g, or t
  misc_feature (407)..(407): n is a, c, g, or t
  misc_feature (451)..(451): n is a, c, g, or t
  misc_feature (453)..(454): n is a, c, g, or t
  misc_feature (456)..(467): n is a, c, g, or t
  misc_feature (469)..(477): n is a, c, g, or t
  misc_feature (479)..(487): n is a, c, g, or t
  misc_feature (492)..(493): n is a, c, g, or t
  misc_feature (502)..(509): n is a, c, g, or t
  misc_feature (511)..(516): n is a, c, g, or t
  misc_feature (519)..(531): n is a, c, g, or t
  misc_feature (533)..(549): n is a, c, g, or t
  Peptide Sequence Number=SeqID_11449
  Probeset Number=SeqID_20316
nnnttgccgatgccggggtcgccgccgatcagcaccacggcgccggccaccaggccgccgcccagcacgcggtcgaattcctccagcccggtgggggtgcgcggcgtttcacgcgcctcgatctcggacaggctgcgcaccgggctgctggaggccagcggcgcatagcggtgcgaggccgcggcggccggcgcggccgactccacggtttcttccagggtgttccaggcgttgcagtgcggacacttgccttgccatttcggggtggtgccgccgcattcggcgcacacatagacggttcgggttttggccatgggcgcaagtttaccggcacacggcggcgcccgggagccgcggatgcgtcgccgcggcgcgccggaccggcggttttgccccgccctgnnncngccagctttcaattcgcttgcataaacagggacgtgtcacagtnanncnnnnnnnnnnnnannnnnnnnntnnnnnnnnnctgcnncatcgcgcnnnnnnnncnnnnnnatnnnnnnnnnnnnncnnnnnnnnnnnnnnnnncatacccg

SEQ ID NO: 5914 - DNA, 557 bp, Zea mays
  misc_feature (9)..(25): n is a, c, g, or t
  misc_feature (27)..(39): n is a, c, g, or t
  misc_feature (42)..(47): n is a, c, g, or t
  misc_feature (49)..(56): n is a, c, g, or t
  misc_feature (65)..(66): n is a, c, g, or t
  misc_feature (71)..(79): n is a, c, g, or t
  misc_feature (81)..(89): n is a, c, g, or t
  misc_feature (91)..(102): n is a, c, g, or t
  misc_feature (104)..(105): n is a, c, g, or t
  misc_feature (107)..(107): n is a, c, g, or t
  misc_feature (151)..(151): n is a, c, g, or t
  misc_feature (153)..(155): n is a, c, g, or t
  misc_feature (555)..(557): n is a, c, g, or t
  Peptide Sequence Number=SeqID_11450
  Probeset Number=SeqID_20317
cgggtatgnnnnnnnnnnnnnnnnngnnnnnnnnnnnnnatnnnnnngnnnnnnnngcgcgatgnngcagnnnnnnnnnannnnnnnnntnnnnnnnnnnnngnntnactgtgacacgtccctgtttatgcaagcgaattgaaagctggcngnnncagggcggggcaaaaccgccggtccggcgcgccgcggcgacgcatccgcggctcccgggcgccgccgtgtgccggtaaacttgcgcccatggccaaaacccgaaccgtctatgtgtgcgccgaatgcggcggcaccaccccgaaatggcaaggcaagtgtccgcactgcaacgcctggaacaccctggaagaaaccgtggagtcggccgcgccggccgccgcggcctcgcaccgctatgcgccgctggcctccagcagcccggtgcgcagcctgtccgagatcgaggcgcgtgaaacgccgcgcacccccaccgggctggaggaattcgaccgcgtgctgggcggcggcctggtggccggcgccgtggtgctgatcggcggcgaccccggcatcggcaannn

SEQ ID NO: 5915 - DNA, 387 bp, Zea mays
  misc_feature (1)..(3): n is a, c, g, or t
  misc_feature (334)..(335): n is a, c, g, or t
  misc_feature (362)..(364): n is a, c, g, or t
  misc_feature (370)..(374): n is a, c, g, or t
  misc_feature (380)..(387): n is a, c, g, or t
  Peptide Sequence Number=SeqID_11451
  Probeset Number=SeqID_20318
nnngcggtcaacgagctgacgcccgacgtcatcgccatcaccggcgacgtggtggacggcagcgtcgagcagctggcggcgcaggccagcccgctgggccagctgcgcgcgcccttcggcgtgtacctggtgaccggcaaccatgaatattattcaggcgccgcgccctgggtggcggaattccgccgcatgggcttgcgggtgctgatgaacgagcatgccgtgatccatcccgccggcctgccggtggtggtggccggcgtcaccgactacagcgccggcgcgttcgacccgcgccagcgcagcaaccccgcggcggcgctggccggcgcgnnggccgatgcgctgcccaagatcctgcnnntgcacnnnnngcgcannnnnnnn

SEQ ID NO: 5916 - DNA, 198 bp, Zea mays
  Peptide Sequence Number=SeqID_11452
  Probeset Number=SeqID_20319
taaagcagcagcacttatacagaccaaaaggagatgcatgcacaactctaggaagaagacaaaagacatttgtggagaaagagcacaagtatacaaccctgtgtacaatctgtcaaacattaccgttgacttactagtgtccatatacatagtgttgtccaagactaaggataatcaaatatagcttcagacggatcc

SEQ ID NO: 5917 - DNA, 198 bp, Zea mays
  Probeset Number=SeqID_20320
ggatccgtctgaagctatatttgattatccttagtcttggacaacactatgtatatggacactagtaagtcaacggtaatgtttgacagattgtacacagggttgtatacttgtgctctttctccacaaatgtcttttgtcttcttcctagagttgtgcatgcatctccttttggtctgtataagtgctgctgcttta

SEQ ID NO: 5918 - DNA, 400 bp, Zea mays
  misc_feature (2)..(6): n is a, c, g, or t
  misc_feature (10)..(11): n is a, c, g, or t
  misc_feature (29)..(30): n is a, c, g, or t
  misc_feature (41)..(47): n is a, c, g, or t
  misc_feature (50)..(52): n is a, c, g, or t
  misc_feature (58)..(58): n is a, c, g, or t
  misc_feature (60)..(60): n is a, c, g, or t
  misc_feature (71)..(76): n is a, c, g, or t
  misc_feature (96)..(96): n is a, c, g, or t
  misc_feature (98)..(100): n is a, c, g, or t
  misc_feature (144)..(144): n is a, c, g, or t
  misc_feature (392)..(399): n is a, c, g, or t
  Peptide Sequence Number=SeqID_11453
  Probeset Number=SeqID_20321
cnnnnngttnnctgaggcaaggcatgaannaaatatgtttnnnnnnnccnnngggtgngnaggtagctcannnnnnaaaaaaggttgcaaaggagngnnncctgtcgcaaatcgccaatgggtcacaaagggtcaaactcgagnaggatccagatgcagcatttgctctagttattgatggaaaagctctggcatttgctttggaggatgacatgaagcaaatgttcttgaacctggcaatcgagtgtgcttctgtcatatgttgtcgtgggtccccaaagcagaaagcactggtgacctggcccgttaaagaaggtctagcacaaacttctatataaagcgatgttgagtttgcagtccttctttggcccttgtggacattatcaatgaannnnnnnnt

SEQ ID NO: 5919 - DNA, 691 bp, Zea mays
  Peptide Sequence Number=SeqID_11454
  Probeset Number=SeqID_20322
agttgccatctcgcaaagtcgcaataacttgtcttctcgaatcggctgcaaccccaccccagaccccaccgccgccgccgctagggttttgggggtggaggatcgccgatgtcgacggctcccaggcgtcccttccgaggccgcggcgccatgccctcgggcaccggctacgtccgccgcggccccgccccagggctccgccgacgccgccaaggcccctggcgcaagccccgtcttcaccaaccggcgaaccggctttccgccccccagaacacacgggccacacttcttcacagccccggcggtcatttgccggtcccggcaccggtccctccaaaaaaggccccttccacgggaaccctcgggcccgggaaccccggggttccccccgaaaggggccctcccgccccggagagaaaagggaaccccggggcaccccgggccctcgcgggcaccccggccccggcaaaaagaaaaaaggggtgttgaccccttttttggaaaagcccagaaaaaacaaacaggggggatcctttccccgcaaaagggcgcaaaaaaattggataattggtttccaagggggcacccccattggaaaaatggggcgggggggggaaaaaggggggggggccgcggaatttggggaggggacctcgaactcccctcccggggtgttcaagagggaggaaag

SEQ ID NO: 5920 - DNA, 691 bp, Zea mays
  Probeset Number=SeqID_20323
ctttcctccctcttgaacaccccgggaggggagttcgaggtcccctccccaaattccgcggcccccccccctttttcccccccccgccccatttttccaatgggggtgcccccttggaaaccaattatccaatttttttgcgcccttttgcggggaaaggatcccccctgtttgttttttctgggcttttccaaaaaaggggtcaacaccccttttttctttttgccggggccggggtgcccgcgagggcccggggtgccccggggttcccttttctctccggggcgggagggcccctttcggggggaaccccggggttcccgggcccgagggttcccgtggaaggggccttttttggagggaccggtgccgggaccggcaaatgaccgccggggctgtgaagaagtgtggcccgtgtgttctggggggcggaaagccggttcgccggttggtgaagacggggcttgcgccaggggccttggcggcgtcggcggagccctggggcggggccgcggcggacgtagccggtgcccgagggcatggcgccgcggcctcggaagggacgcctgggagccgtcgacatcggcgatcctccacccccaaaaccctagcggcggcggcggtggggtctggggtggggttgcagccgattcgagaagacaagttattgcgactttgcgagatggcaact

SEQ ID NO: 5921 - DNA, 845 bp, Zea mays
  misc_feature (1)..(1): n is a, c, g, or t
  misc_feature (4)..(6): n is a, c, g, or t
  misc_feature (8)..(15): n is a, c, g, or t
  misc_feature (51)..(57): n is a, c, g, or t
  misc_feature (63)..(64): n is a, c, g, or t
  misc_feature (85)..(89): n is a, c, g, or t
  misc_feature (385)..(387): n is a, c, g, or t
  misc_feature (435)..(435): n is a, c, g, or t
  misc_feature (449)..(449): n is a, c, g, or t
  misc_feature (455)..(455): n is a, c, g, or t
  misc_feature (460)..(460): n is a, c, g, or t
  misc_feature (469)..(469): n is a, c, g, or t
  misc_feature (472)..(473): n is a, c, g, or t
  misc_feature (479)..(479): n is a, c, g, or t
  misc_feature (488)..(488): n is a, c, g, or t
  misc_feature (497)..(497): n is a, c, g, or t
  misc_feature (506)..(506): n is a, c, g, or t
  misc_feature (508)..(510): n is a, c, g, or t
  misc_feature (513)..(513): n is a, c, g, or t
  misc_feature (515)..(515): n is a, c, g, or t
  misc_feature (529)..(529): n is a, c, g, or t
  misc_feature (534)..(537): n is a, c, g, or t
  misc_feature (540)..(540): n is a, c, g, or t
  misc_feature (546)..(546): n is a, c, g, or t
  misc_feature (558)..(558): n is a, c, g, or t
  misc_feature (561)..(564): n is a, c, g, or t
  misc_feature (566)..(566): n is a, c, g, or t
  misc_feature (570)..(571): n is a, c, g, or t
  misc_feature (574)..(574): n is a, c, g, or t
  misc_feature (580)..(580): n is a, c, g, or t
  misc_feature (587)..(589): n is a, c, g, or t
  misc_feature (594)..(594): n is a, c, g, or t
  misc_feature (596)..(596): n is a, c, g, or t
  misc_feature (599)..(599): n is a, c, g, or t
  misc_feature (601)..(845): n is a, c, g, or t
  Peptide Sequence Number=SeqID_11455
  Probeset Number=SeqID_20324
ncannngnnnnnnnncgcgtgggcggacgcgtgggcggacgcgtgggccgnnnnnnnagcggnncccgccaaggccgccaagacnnnnnccagggacacgcccgggaagaaagcggcgcccgccaagaagcccgccgctgcggccaagaaggcccctgccaagaaggccgccccagccaagaaggctgcgaccccgtcgcggaaggtgccgtcccgtaaggcgaagaagtagagcggtggtcttggcaggaatctagggtttcgtgctccttcgattttagatgtttactcgtttttgctctattagtgggtggtgcgcggggtgggttactaggttgtaaatttgatgtcggaggctggggtacacatgggcattctgtaccannngtggaaggctccggcgactatgacaaaccagtgtgtgtcattattatnagaagacaacgttnattttntgganctgaattgntgnnttgcgnatatcattntgctgttangataatgtncnnntananaataaaacagatcntctgnnnncangggggnttactagttctnaannnntncgcnnttnggtggntgctccnnnttttntntcntnnnnnnnnnnnnnnnnnnnnnnnnnnnnnnnnnnnnnnnnnnnnnnnnnnnnnnnnnnnnnnnnnnnnnnnnnnnnnnnnnnnnnnnnnnnnnnnnnnnnnnnnnnnnnnnnnnnnnnnnnnnnnnnnnnnnnnnnnnnnnnnnnnnnnnnnnnnnnnnnnnnnnnnnnnnnnnnnnnnnnnnnnnnnnnnnnnnnnnnnnnnnnnnnnnnnnnnnnnnnnnnnnnnnnnnnnnnnnnnnnnnnn

SEQ ID NO: 5922 - DNA, 696 bp, Zea mays
  misc_feature (111)..(111): n is a, c, g, or t
  misc_feature (161)..(161): n is a, c, g, or t
  misc_feature (255)..(255): n is a, c, g, or t
  misc_feature (601)..(696): n is a, c, g, or t
  Probeset Number=SeqID_20325
actcgcaccacgccaccgctgctgcctgctcctcacagtcctccccgcgctcgcattgcgattcgcgacctagcgcgagggtaccgggggggtggtgcgcgcgcgtgcttncggtgatccgggaagcgccgcgagatggccggggtggtggaaggccgcgntgccgcgcccaagcacgacgacttcacgccgcaccccgtcaaggaccagctccctgggggtctcctactggcatcaccagccctcccccgtggnctgaaagccgttccttcttcggggttcccacattatctggccatgctttgggacccactggggatcatatccaactgcaccttgggtccccaaatgggggggaaacaatgtggccacaaagcgggggggttatcccagacattgctggtttcgttgccaggtattacaacccccctctggcagaagtttcttgggaacagtgtggcccccccagggattccgcgggggcataaacccctttggtccggcccaccaatttccgatcatcctggtgggggcgaggtttgggctatggaccctatccccctttttaaatttctcccgaatcctggcggggaaaaaaggnnnnnnnnnnnnnnnnnnnnnnnnnnnnnnnnnnnnnnnnnnnnnnnnnnnnnnnnnnnnnnnnnnnnnnnnnnnnnnnnnnnnnnnnnnnnnnnn

SEQ ID NO: 5923 - DNA, 696 bp, Zea mays
  misc_feature (1)..(96): n is a, c, g, or t
  misc_feature (442)..(442): n is a, c, g, or t
  misc_feature (536)..(536): n is a, c, g, or t
  misc_feature (586)..(586): n is a, c, g, or t
  Peptide Sequence Number=SeqID_11456
  Probeset Number=SeqID_20326
nnnnnnnnnnnnnnnnnnnnnnnnnnnnnnnnnnnnnnnnnnnnnnnnnnnnnnnnnnnnnnnnnnnnnnnnnnnnnnnnnnnnnnnnnnnnnnnnccttttttccccgccaggattcgggagaaatttaaaaagggggatagggtccatagcccaaacctcgcccccaccaggatgatcggaaattggtgggccggaccaaaggggtttatgcccccgcggaatccctgggggggccacactgttcccaagaaacttctgccagaggggggttgtaatacctggcaacgaaaccagcaatgtctgggataacccccccgctttgtggccacattgtttcccccccatttggggacccaaggtgcagttggatatgatccccagtgggtcccaaagcatggccagataatgtgggaaccccgaagaaggaacggctttcagnccacgggggagggctggtgatgccagtaggagacccccagggagctggtccttgacggggtgcggcgtgaagtcgtcgtgcttgggcgcggcancgcggccttccaccaccccggccatctcgcggcgcttcccggatcaccgnaagcacgcgcgcgcaccacccccccggtaccctcgcgctaggtcgcgaatcgcaatgcgagcgcggggaggactgtgaggagcaggcagcagcggtggcgtggtgcgagt

SEQ ID NO: 5924 - DNA, 398 bp, Zea mays
  misc_feature (1)..(37): n is a, c, g, or t
  misc_feature (192)..(192): n is a, c, g, or t
  misc_feature (298)..(298): n is a, c, g, or t
  misc_feature (347)..(347): n is a, c, g, or t
  misc_feature (372)..(372): n is a, c, g, or t
  Probeset Number=SeqID_20327
nnnnnnnnnnnnnnnnnnnnnnnnnnnnnnnnnnnnngcagcgaaccctagccgccctcagcgacggattgcagatctcccagccatgacgttcaagcggaggaacggcggacgcaacaagcacgggcgcggccacgtcaagtacatacgctgctccaactgcggccaagtgctgtcccaaaggataaggcntatcaaagcggtttcttggtgagggaacatttgttgagcaggctgctggtgagggacgtgcagggaggcttgtgtgatggaatgggatatgttcttcccaaatggnaacgcaaaggtttcatcacttgtgtctcatgcgcaatcatgcgcacaanttggtccgtgtccgctctcgtgagnaacagggaggaaccgtgagcccccgc

SEQ ID NO: 5925 - DNA, 359 bp, Zea mays
  Peptide Sequence Number=SeqID_11457
  Probeset Number=SeqID_20328
taatacatctcacccaactctgattagggttatgggttcacattccattagagctgatgtcagcgctccaggggtagaagatgtcgaacctggaactccgcttcctggtgaagacgggactgcaactacgaacacctcttcaggatcaaggcggtggccgccaacggacgtgctccacgtcatatcgggcatgtggaaggctcccgccgagatgttctcttcctctggattggtgtgttccggctgtcggagcccctaaaggtggccgactagctggttccccctttccacaccggcagaactcacgcgagtgattttgtcttgcatggtgggtggtgttgagtgacgacggggggatc

SEQ ID NO: 5926 - DNA, 462 bp, Zea mays
  Probeset Number=SeqID_20329
aaaaaagaaaagaaaaggattgataagaaaaagacaagccgggcaaggatggtggtgtccggtgtggtgggaggcgagccgcgagttggtggggaaggggtgggcggtggcagcgcaaacaagcaactccttcccaccttcccttcccctccccttctcatcctttctccgattgcctccaattacgattctccgatccccattcctgccccacaccctcgcgttcggctaatccggcggcatgcggcgcggcggcgtggctgcggcggcggcggacggtgatgtggagtcgcgtttccgcggggtgcggaagaggccgtggggccggtacgccgcggagatccgcgacccggcgaagaaggcgcgcgtctggctcggcacattcgactccgccgaggacgccgcccgcgcctacgacgccgcagcgcggatgctgcgcggacccaaggccaggaccaactt

SEQ ID NO: 5927 - DNA, 774 bp, Zea mays
  misc_feature (772)..(774): n is a, c, g, or t
  Peptide Sequence Number=SeqID_11458
  Probeset Number=SeqID_20330
gcttcttggatgctgctctcttcgtatccgtcggtgaaaagattgatctctccacttggtctgggtgtgcagtgtgctgccgccccttgccgtcgtggacatgggatggcgccaggtgttcactgggatccatggagctactaccatagattagatttgtcctcatcatcaacatgctccacaatcccaaaatcttggatttgctgttgctcgattacatctctactacttattaatgctacaagagtagccgtctatcattcctagttctaccattccctgttcaatcattccatgttctccctttttatttccattccccgtcctctctctcgtgcccactgccgttcccattcctcgtcttctctctcgcgcccattgtcgttctcattcatcgtcctctctcgcgcgcccactgccgatcccattcctcttcctctctccactgccattctcattcactctcttttccattctcatggttttgctaccatggccgataaaaatggccaaaaagggacactttataggaatcgaactctaaccaacacatagacagcaaaactcgccccttctaaccaatagcgctatttttctttcctattgtactaaggagctttcatctatttataggctttcttagaaccatcaatgttcttcatgttaattcatcttattggataattcttcgctttgcttccttgtaacaaacctatgtggtggacctacatgtgcttgtactcagatgcaatacatgatatcatgttatttnnn

SEQ ID NO: 5928 - DNA, 199 bp, Zea mays
  Probeset Number=SeqID_20331
taagtggggaaatcaaccagaactctatgctccaatctgtaatctgagtgggtgggggagggcgccgacagaggattcagagccggagcgcggagggagagacgagacggagcggagattggacccgcgggtgtagggtgccgcgctcgggggtggcatcagcttgtccaccgccggggatgacgagcgccactggatc

SEQ ID NO: 5929 - DNA, 213 bp, Zea mays
  Peptide Sequence Number=SeqID_11459
  Probeset Number=SeqID_20332
taagttggagacagtcatttccactgtactcatgctgcaaattacccttgattccacagcctgctgcagattgggggcgcctgcatgaatggtctgagcttctgttgctcccacaacaagtcctcatatcaaaatacatttttactccattcttcaatatcagtagaggctcccccaactttgccatggaagagagctgtccacccagggatc

SEQ ID NO: 5930 - DNA, 213 bp, Zea mays
  Peptide Sequence Number=SeqID_11460
  Probeset Number=SeqID_20333
gatccctgggtggacagctctcttccatggcaaagttgggggagcctctactgatattgaagaatggagtaaaaatgtattttgatatgaggacttgttgtgggagcaacagaagctcagaccattcatgcaggcgcccccaatctgcagcaggctgtggaatcaagggtaatttgcagcatgagtacagtggaaatgactgtctccaactta

SEQ ID NO: 5931 - DNA, 428 bp, Zea mays
  misc_feature (1)..(1): n is a, c, g, or t
  misc_feature (10)..(10): n is a, c, g, or t
  misc_feature (12)..(12): n is a, c, g, or t
  misc_feature (19)..(50): n is a, c, g, or t
  misc_feature (54)..(83): n is a, c, g, or t
  misc_feature (103)..(105): n is a, c, g, or t
  misc_feature (127)..(136): n is a, c, g, or t
  Probeset Number=SeqID_20334
nattcatcantnattaatnnnnnnnnnnnnnnnnnnnnnnnnnnnnnnnnccannnnnnnnnnnnnnnnnnnnnnnnnnnnnnataggcatagttcattaatnnntagtttaattcatagatcatannnnnnnnnnatatatataacatgttcatcaattattctgtaaataatatgtacatagtttcgttttactggaatattggtagttcgtttagctcacgagctggctcgttaacgtcagaaccgagcaaggatgtttcagctcgtgacaaaattcaaacgagccgatccgatccggaccatgaaccgagcgagccagcgagccacgagtatttcgtccagccctagatggagactggatgtagtgctctataatttttttgacaaattttagaaataagacattgttggaatatctatatttc

SEQ ID NO: 5932 - DNA, 497 bp, Zea mays
  Peptide Sequence Number=SeqID_11461
  Probeset Number=SeqID_20335
gatcccctgttcgacatccacagcaatgaggtgtggcggccatccagcctctggcgagcgtgcggccagtcaccagcaccagcatggacagcgccatagagtgtggagtgcccttgattcggtgctgctcctgatttgagtctgactgtcgacggagatgctggcgataccacagctgggctcgcagcgatgctggccagtggtgacaacctcaagcctcatccataagccttccttcatctgcatctcaccatcttctaaccatgtggtaaatagggccacaacccatctaggattgggcttgtcacttcttgaactcctgctgcaatggggcacaacccgttcataagtaggatacctcgtttgggtcggcgtacctggtacgcggttcacggctttgaacctgtgactttggctggaagagttggtgactatttgaatgcctttagttatgcaccattgaaacataaagtagcaaatgttgtttggtgcactta

SEQ ID NO: 5933 - DNA, 429 bp, Zea mays
  misc_feature (102)..(102): n is a, c, g, or t
  misc_feature (357)..(357): n is a, c, g, or t
  Probeset Number=SeqID_20336
aggatccctcgccaagaatggtagctcttggccctgttctgccgcttctcgatctgccgcttctaccgcttctcaatctgagacgggcgaccgtcagggccntggccctgatctcatgctccaaccacctgacgcgcttggcctcccgctccatacagcctggcgcgcttcattgatttcatctgtgtatttatctggcgctccatacagcctagcgcgcttggcttgtgatccacatgagcagcacaagcttgaatggacattttggagggctctattgctgttcgtggtagggggaaaaacaaaaggaagtggattcctgttgaagatgatgaactgatcaaagcattggttgangtttctttggattcgaggtggaggagtgatgggagtttcaagaatggttacacttcagtacttgaagctcgc

SEQ ID NO: 5934 - DNA, 213 bp, Zea mays
  Peptide Sequence Number=SeqID_11462
  Probeset Number=SeqID_20337
gatctctgcgtcttgcccggcaacgaacactttcaacattgcatcatcaacaacatgtataacttcacgcatacgacggatgcgcagggaaatggtttgctctataccttttctgatgatttgcagatcgatgtcgctgttcttgacaagaacaacaagtgttcttccccctttcttcctctgatttcttgagatagtgctgataacaggtta

SEQ ID NO: 5935 - DNA, 168 bp, Zea mays
  Probeset Number=SeqID_20338
taacaggcctgcttgcacaccaaagccaggtcctttgggcggttcagtcaaagaagtaaggcctccggctggctcacaccagaagcggccactccttggccctggttttggaactttcccagctctgagttcatcaataatctcttcaatatccttgggtgtcagatc

SEQ ID NO: 5936 - DNA, 276 bp, Zea mays
  Peptide Sequence Number=SeqID_11463
  Probeset Number=SeqID_20339
gatctggacaaactggtcaaagaagcgtttcatgagtttcaaaaagatgagacccggctaaaacaaatcgaaaagcaagacggtatgacttccttctacaacacgcccccactgggacaaagaggaacctgcagctacttgacaaaggtggtgatgaactccctgctggagggagaagtcaagcccaccaatgaggactcgtgcctggttagctagtcaggccctgtagggagcataggagatagtctcccagccgtgccttttgtgttcacgtta

SEQ ID NO: 5937 - DNA, 211 bp, Zea mays
  Peptide Sequence Number=SeqID_11464
  Probeset Number=SeqID_20340
taaggaccatatagagtatgtaacatgtatactatcattgcaagaattcttgctcaatcctttctcaaaaatattgacaacctgccaagaccacctatttaggacctattcagatcagctatggctcccagtgcacaagccaagaccaccacaacaagaacatcacatgtccctgtctcgccatattcgcaagcacgagtgagcggagatc

SEQ ID NO: 5938 - DNA, 211 bp, Zea mays
  Probeset Number=SeqID_20341
gatctccgctcactcgtgcttgcgaatatggcgagacagggacatgtgatgttcttgttgtggtggtcttggcttgtgcactgggagccatagctgatctgaataggtcctaaataggtggtcttggcaggttgtcaatatttttgagaaaggattgagcaagaattcttgcaatgatagtatacatgttacatactctatatggtcctta

SEQ ID NO: 5939 - DNA, 310 bp, Zea mays
  Peptide Sequence Number=SeqID_11465
  Probeset Number=SeqID_20342
taaggccatctgacagtcgggtgcctatagacccacaccagacaagctgccggatgcgcagtgccccagtctcccaagtgggacacccacaccaccgctttcacacggatgggggacggttatgagttccaaccgcaccatcacgccccccattgcaatgcatatccaaccccgacatcacagacacggacggaaagtagagggagagaaacctgacggatcgtggccgcccctcgcggcggcctgcgtgggaagcgacgcgagagcccggagcatgaggaggaggaggacgggctggaggtgcgagatc

SEQ ID NO: 5940 - DNA, 760 bp, Zea mays
  misc_feature (1)..(22): n is a, c, g, or t
  misc_feature (666)..(760): n is a, c, g, or t
  Probeset Number=SeqID_20343
nnnnnnnnnnnnnnnnnnnnnngcaacggcggcaagatggtgcagcgtctgacctaccgcaagcggcacagctatgccacgaagtccaaccagacgcgggtcgtcaagacccctggtggcaagctcgtgtaccagtacaccaagaagagagccagcgggcccaagtgtcccgtgaccgggaagaagatccagggcattccccatctgaggccagctgagtacaaaaggtccaggttgtctaggaaccgcagaactgtgaaccgtccctatgggggagtactatctggaactgcagttagagaaaggatcatccgtgctttcctggttgaagagcagaagattgtcaagaaggtgttgaaattacagaagaccaaagacaagacttcctcaaaaaagtaactctgaaacagaagtgagccactcttctgcagccagggaagacatttttgtcgacaggtattatcaatggcttagtcccctctagctggtctatgggtcctggatcctgagcggaccactgggttctagggcacctttgaatctgtctacgagatctctaagatatgagatgacatatccccccctattgctttgttcaaaaaaaaaaaaaaaaccttcgggggggggccgggtacccattcccccctatgggggcccaattacatnnnnnnnnnnnnnnnnnnnnnnnnnnnnnnnnnnnnnnnnnnnnnnnnnnnnnnnnnnnnnnnnnnnnnnnnnnnnnnnnnnnnnnnnnnnnnnn

SEQ ID NO: 5941 - DNA, 610 bp, Zea mays
  misc_feature (601)..(610): n is a, c, g, or t
  Peptide Sequence Number=SeqID_11466
  Probeset Number=SeqID_20344
gagacatacccgccgtcgtcgccttcatcttctccaccgccgtctctaccgtccccctccccatccgataactgcctcacgcaccttcctcctctcacctgtgtatgccgaatcccccctcggatccctcctctcccgacgtggtcgggctatcgttggccaagtcaggcgcctttgttaggcccctggcgacgtgtccaccaacctcgcctgtgccatccccatgcttggcaggtgctccgcctccatcggcaagttaagccagaagaaaaggcggaagaagagccagaattcccattagaagtcatctcaaatgctggaggtgtatccatattgatggatgaaactattgcgtttagttatgataatgacacaaaatcttccattcgaggacgttatgcaactctgtcatctgatctacaagattgttattaaaggttgtagagaatgatgacatttacacaaaatactccaacaaaatttatgacacatttaagtgggggtttatgctacaattacctcaaaataattcttgatgcattttacgtaaatttacaaaattcttgatgcgttttacgtcattttatgaaattcttgatgnnnnnnnnnn

SEQ ID NO: 5942 - DNA, 610 bp, Zea mays
  misc_feature (1)..(10): n is a, c, g, or t
  Probeset Number=SeqID_20345
nnnnnnnnnncatcaagaatttcataaaatgacgtaaaacgcatcaagaattttgtaaatttacgtaaaatgcatcaagaattattttgaggtaattgtagcataaacccccacttaaatgtgtcataaattttgttggagtattttgtgtaaatgtcatcattctctacaacctttaataacaatcttgtagatcagatgacagagttgcataacgtcctcgaatggaagattttgtgtcattatcataactaaacgcaatagtttcatccatcaatatggatacacctccagcatttgagatgacttctaatgggaattctggctcttcttccgccttttcttctggcttaacttgccgatggaggcggagcacctgccaagcatggggatggcacaggcgaggttggtggacacgtcgccaggggcctaacaaaggcgcctgacttggccaacgatagcccgaccacgtcgggagaggagggatccgaggggggattcggcatacacaggtgagaggaggaaggtgcgtgaggcagttatcggatggggagggggacggtagagacggcggtggagaagatgaaggcgacgacggcgggtatgtctc

SEQ ID NO: 5943 - DNA, 241 bp, Zea mays
  misc_feature (196)..(196): n is a, c, g, or t
  Peptide Sequence Number=SeqID_11467
  Probeset Number=SeqID_20346
taacgctccgatcatttcatttattcgacgacacagttcaccaaaaggcacgtctagccacagctctaccctggcctagggcatacatggcacggaagtgtacggacggaacagcagtataaagctccggctctgctagcgacctttcttctagctccggccggcttctgatctctgctggaggcggctggcggcnggtcggcgtcaggcgtaggagagcctggagccggggacatagatc

SEQ ID NO: 5944 - DNA, 241 bp, Zea mays
  misc_feature (46)..(46): n is a, c, g, or t
  Probeset Number=SeqID_20347
gatctatgtccccggctccaggctctcctacgcctgacgccgaccngccgccagccgcctccagcagagatcagaagccggccggagctagaagaaaggtcgctagcagagccggagctttatactgctgttccgtccgtacacttccgtgccatgtatgccctaggccagggtagagctgtggctagacgtgccttttggtgaactgtgtcgtcgaataaatgaaatgatcggagcgtta

SEQ ID NO: 5945 - DNA, 996 bp, Zea mays
  misc_feature (1)..(4): n is a, c, g, or t
  misc_feature (896)..(898): n is a, c, g, or t
  misc_feature (911)..(913): n is a, c, g, or t
  misc_feature (922)..(922): n is a, c, g, or t
  misc_feature (930)..(938): n is a, c, g, or t
  misc_feature (945)..(950): n is a, c, g, or t
  misc_feature (953)..(996): n is a, c, g, or t
  Peptide Sequence Number=SeqID_11468
  Probeset Number=SeqID_20348
nnnngcgtgcggccgtgcgggcaggtaccagatgtccatagctacagcatattagttgacgggttatgcaaacaaggggatttattcgaaggttatcatatgcttcaagcaatggcaagtaatggaatatgtcctaatcgagtgagttacagttcgcttctgcatggcctttgcaaagctggacaggttgcattggcattgaagattttcaagaatctccaagaccatggttttgagcatgaccagataacttacagcatcattcttcatggctgttgccaacacttagatctcaaggccatctctgacctttggtttgacatgattcatcatgatatctctccagatgtttacaactataccagtctgatctacgcattatgtagacatagaaacctccaagatgcattgggagtgtttgagctcatgcttgaaaatgggttgtctcccaacatcgtgacatgcacaatcctagttgacagctttagcaaagaagggctagttggtgaagctttcctattcctggatagaatgcatcagtcattgggaatcgtcccaaacctttgcatgtacagagttatgatcaatggtctttgcaagaccaacaaatatagtggtgtgtggaatgtttttgcggacatgataaagaggggctatgttcctgatgttgtcctgtacagtattattattgagggcttcgtgaaagctctgaagttgcaggaggcgttaaggttgtaccataagatgttggatgaaggtgtaaaacctaacatatttacgtattctagcctcataaatgggctgtgtaatgatgatagacttcctgaagctatgggattgattagggatatgattggggaagacctgttacttgacaatgttttgtacacatctannnaaaaaaaaaaaannnaaaaaaaanaaaaaaannnnnnnnnaaaaaannnnnnaannnnnnnnnnnnnnnnnnnnnnnnnnnnnnnnnnnnnnnnnnnn

SEQ ID NO: 5946 - DNA, 828 bp, Zea mays
  misc_feature (439)..(439): n is a, c, g, or t
  misc_feature (570)..(571): n is a, c, g, or t
  misc_feature (575)..(575): n is a, c, g, or t
  misc_feature (590)..(590): n is a, c, g, or t
  misc_feature (736)..(736): n is a, c, g, or t
  misc_feature (782)..(783): n is a, c, g, or t
  Peptide Sequence Number=SeqID_11469
  Probeset Number=SeqID_20349
gaggctccctcctcgctcccccccacccgtctgctcctcctagggtttcctctcggcttgccggcgtgccacatcgcctcgcctcgccattgccgcgggtcctggcgcggggcgttccgccgctcgggggcacccgaaccgagcctcgcgggagctgttcgtgctgattcctgctgggtcttgtggctcggactctggggcgtcgggtgggaaaggttttgccgcccgtgggggtttggatcgagggctctaagccgtgtctccgcaataccgggctggcctggcggcgattgctagggttttctggtcggatttcggcggaagagctgaggcgttgcttcgagtgcgggagctgtctgcaatccgccgcttgccttggcccgagtttggtgtttccgcagcaatgcctctccgattttagctcgccctggggttctgnaagggcgaaggggctggttgggcggtttgagcttgcaaggcgttggctggttcggtccaatgtccggggctagcgcgaggggggcggctgttcgccggcgtccagcgggcggcggagactcctgaacccgnntcancgggggggcagaccncgcctcgggtgtccgctggcctcgcggcaggaagccctcacgagggccccggggagagggattgtggcccgcgggcagcgggccgccgagggaaggaaaaagaaaccccgccagccgtgcttcacattggcaagccctcgctcagnggcgcccccgcagggaatggcgtccggcaggaagctgctggctgcnncctcgggggcttgtcttcctttgaacgcgtccctggctccctccg

SEQ ID NO: 5947 - DNA, 300 bp, Zea mays
  Probeset Number=SeqID_20350
gatcttggtctcttctgtacagtgcctgcttggctcatgctcatgtttagagatggcaacggtacccaatcccgattcaccacggagaattcctctgttaggagatgagaataaggaagaaactttccctccggggatataaacggggaaaattcattccccgacgagtaaacgaggatgagaacgggcaagcattctccatccccgttttctgcgaggacccgttaaacttgcacatgacgatgtttttgtgtagtagtttaggataaaaataaataattaccttgtcaagagaccgct

SEQ ID NO: 5948 - DNA, 300 bp, Zea mays
  Peptide Sequence Number=SeqID_11470
  Probeset Number=SeqID_20351
agcggtctcttgacaaggtaattatttatttttatcctaaactactacacaaaaacatcgtcatgtgcaagtttaacgggtcctcgcagaaaacggggatggagaatgcttgcccgttctcatcctcgtttactcgtcggggaatgaattttccccgtttatatccccggagggaaagtttcttccttattctcatctcctaacagaggaattctccgtggtgaatcgggattgggtaccgttgccatctctaaacatgagcatgagccaagcaggcactgtacagaagagaccaagatc

SEQ ID NO: 5949 - DNA, 777 bp, Zea mays
  misc_feature (760)..(760): n is a, c, g, or t
  Probeset Number=SeqID_20352
accgctcttctcccgaagacccgaactccacgccacagatctctctccctttcccccctctctctctctccgtactctaccccccgcagtctcggccgcggccatggcggaggacgcccccaacgccgccgccgagggcggccagcccgcgccccccgagggatccgccgacgccgccccgtcggctgccgcgggcgccaaggccccggcggaggcgctgctcccgtcgctcagcatctgggccgccgtcgcagcgcacgcgcgaccccgtggtgccgccgcctcgtggccgacgctcgccgcgccccgggcccttctccccatcttattgttgccgcccccgaagccccgtatgtgggggggtgtcgtccgggagccggccaggtcccaggtctttggaccgtcggcctcccaaatccccgtagcacgccgaccaccttgaatgctcccggccctccccctaaaggagggccgaactacaggcggctttccaaggcatagattcccgcgggggaggggtctgttcctcgtactctcttcacggggatgttctccaggaacacccgcaccaccccgtctgctctgggctacgggcgctcagttcccacccacaataggagtaacccctccctaacgccccctgtggctccggggccgccgcccccctcttccaggccacagtgcctcctccaatcaaacaaatttagttcactggccccccaatcagctcatagccgatgctgctacgctacatcgacancgtgaggaatcaccctg

SEQ ID NO: 5950 - DNA, 267 bp, Zea mays
  Peptide Sequence Number=SeqID_11471
  Probeset Number=SeqID_20353
taatatcatgaccattgcgacgtttatatacttcaaattgaagaactcagtcataaaatggtgcattccaagctgctatctgaggagggctgggaaatattgggatcacaaagaatagttacctgcttccatcaaatagattcatttttgtgtatatgtgtgggacgaattttcatgggatgtcttcttgttgaaagtgcaaacaaatgctagttgaactttggcagctgcacctttgattctaagtgcgcacacagcccctagatc

SEQ ID NO: 5951 - DNA, 377 bp, Zea mays
  Probeset Number=SeqID_20354
gaaccggatctggaagcgaacctaagctgcgcggtttgtcattgaaaacagtgcgaagagtgagatgggtgaagctctgctaagagattcttcaggtttcttcttggggatggaatcattgccgtgtccatcttggtcagttgagttggagatgggtgcaaccctgaacaaggaattgagaactcgagattgttcgtggggctggaatgttgggcccatctgttccagctgccgaagatttcttttttgctatgcttgattgagaggcctgtgtcttgggctagtcactaatcctactgcgcttcttattttggctctctcgagcttgtactacttcggcggcgggatccagtcgtcccccgcggggacgacgccgt

SEQ ID NO: 5952 - DNA, 377 bp, Zea mays
  Peptide Sequence Number=SeqID_11472
  Probeset Number=SeqID_20355
acggcgtcgtccccgcgggggacgactggatcccgccgccgaagtagtacaagctcgagagagccaaaataagaagcgcagtaggattagtgactagcccaagacacaggcctctcaatcaagcatagcaaaaaagaaatcttcggcagctggaacagatgggcccaacattccagccccacgaacaatctcgagttctcaattccttgttcagggttgcacccatctccaactcaactgaccaagatggacacggcaatgattccatccccaagaagaaacctgaagaatctcttagcagagcttcacccatctcactcttcgcactgttttcaatgacaaaccgcgcagcttaggttcgcttccagatccggttc

SEQ ID NO: 5953 - DNA, 183 bp, Zea mays
  Probeset Number=SeqID_20356
gatctaagttatgatggttgtgtgctgatttagtataaaatcacttgtacattcattcatttgatcaaagtaggatgctgctatctaatatctatgaactttccagcagatatttgagcatatttaggaattattgttgtagaatgcagaatattgctgttgatgtaatgcagcatgtagtta

SEQ ID NO: 5954 - DNA, 183 bp, Zea mays
  Peptide Sequence Number=SeqID_11473
  Probeset Number=SeqID_20357
taactacatgctgcattacatcaacagcaatattctgcattctacaacaataattcctaaatatgctcaaatatctgctggaaagttcatagatattagatagcagcatcctactttgatcaaatgaatgaatgtacaagtgattttatactaaatcagcacacaaccatcataacttagatc

SEQ ID NO: 5955 - DNA, 443 bp, Zea mays
  Probeset Number=SeqID_20358
agttctatagagaaccatggaaactggagagaatggactaattaatttgaaataattacaaatcattgtgcaaagttcagtaggatatttgaggaaattattttttttttctttctacacatgcacccgaatagaatttatgtgtttctcatatgtaattcttaaaattgtcagagagtaaactttcatcacggacgtcactcattgtcacgacagatatgcaaacttccactgctctaaatgatggagactacttgcaggacatgaatgcaaattagcaagacggtttacttttcaattaatgtgattaacaaggtttacttttcaattccttcacctaaatttgtgtgttctgtactgctacatacttgtgcacttatgagattactatcagcacgtgaaataaagaggaataattagtatagacaaaaaaaaaaaaaaaa

SEQ ID NO: 5956 - DNA, 504 bp, Zea mays
  Peptide Sequence Number=SeqID_11474
  Probeset Number=SeqID_20359
gggttagggttctagcgctctctggtttctccctgcgtcgccgccgtggatgatgggctaggttattcctgtcctagaattttacatgtcgctcgtgcatctgtacgccatcgctgctcctgcctgagacgtcgggcgtgtacccccgttccttgatcctagatctgtgcggatccaatcgattggggcgcggcgcgggcatccggaacttcacctcgcgtgcttacgctaacgacggcggccctctgtattttactgggttggagatccgtccatcccaacttgagtcgatttatgtctggttccttttgttgcttgtgtaagcgaacggacgaaaatttgggtggggagaaattttcgctttttaatggtcttagctatatagatatggatgtttgtcgtggtttgaattgcaccgtgcacattacacatgacactgtcactgtaaatctggtgagagagattcgtattgacgcatgtttttcgaaaaaaaaaaaaaaaaat

SEQ ID NO: 5957 - DNA, 854 bp, Zea mays
  misc_feature (1)..(1): n is a, c, g, or t
  misc_feature (9)..(12): n is a, c, g, or t
  misc_feature (64)..(66): n is a, c, g, or t
  misc_feature (82)..(85): n is a, c, g, or t
  misc_feature (89)..(92): n is a, c, g, or t
  misc_feature (790)..(790): n is a, c, g, or t
  misc_feature (800)..(800): n is a, c, g, or t
  misc_feature (810)..(810): n is a, c, g, or t
  misc_feature (829)..(829): n is a, c, g, or t
  misc_feature (854)..(854): n is a, c, g, or t
  Probeset Number=SeqID_20360
ngcgctggnnnnctcctaactgcccgcgccgacacccagcggcgcaaacttatcgagcttattnnntcgccgtcgtcaaaannnnctgnnnngaccgacgcaggcccctgcccggctggacccgccccgccgtccaccctttcatcgccttcgttggttccgtcgctgtcgcggccttcccggccggattcaccgttgctgcgaccttcccggctcgatctgtcgtccctttggccggatcgtgtcttcccagccagattcgtcgctgtcgtggccttcccgactgtatccaccgttacccctactattctgccgcgagcgtggacaccatgaccgacatagacgtgtgcgctgtcgttggcctgcctggcggggttcctcgacatccgaacggtcaaagaagcaagaaggtcgacctgctggtactcttttgttgtgtcgccctcgccgatcgttgacactcgaacgtcgacccctcccgaagaacaggcttctgttgcatgtctcccgactgcggccacctcgactttggctacctcggcatctaggggctatcgtcttcttggagcacacaccgttctctactccagccgcaacattcgcaccatcacgacgctgcgactgcggggggatttcaacccgtcggctcctaccttcggcctctactccagtctcatcgtgtgtggtgcccccgttgcgactgcggggggatgttagactatgtgtgtgtgagtgtgtgtgggccggcaccactgttgggctgccggcccattagggttagggttgagtntatatattgnacccattctntatgcaatacaacagttcntcttcctacaaaaaaaaaaaaaaan

SEQ ID NO: 5958 - DNA, 744 bp, Zea mays
  misc_feature (1)..(1): n is a, c, g, or t
  misc_feature (672)..(744): n is a, c, g, or t
  Peptide Sequence Number=SeqID_11475
  Probeset Number=SeqID_20361
nactagccaacacaaaattcggaaaaagccaatgcatactccattacagcaacataggttacataagtatggtaagttaagacactaacgcggcagcaatcgaatctctaaacacactcatgtctgacccatctgatggtccacgactactctctgctacccctcaatcaccaactttcgtcctagatacgaaatgatcaaagtcgtgatcgtgtatgacactatccctaataaagttatgtaatgccatacaagctacaataatcttcgattgcttccataactaaaaagaagggagactaagcaggattcgtcacttcatcttcaacactccaaatgatcgttctatgacattcctttgcgacaagtgggtatagttgaatacctctttcgcaccaacaagttgtcttccatgatgccatttggatatgtggtatttttgtccgttgtatggtgcagggtatcctttccggttggggtaaccggaatcaataagataatattcatctttttcaaaccgaagtcaggagcacaaagaggggaacatatctctagatctgtagataacggaagacgaatctatgaagaactctgaatcggcagcggcgaactcaacgagcaacgtctacaagaagaacaagtgctagtaaggtacctgggccgcgcccacgnnnnnnnnnnnnnnnnnnnnnnnnnnnnnnnnnnnnnnnnnnnnnnnnnnnnnnnnnnnnnnnnnnnnnnnnn

SEQ ID NO: 5959 - DNA, 744 bp, Zea mays
  misc_feature (1)..(73): n is a, c, g, or t
  misc_feature (744)..(744): n is a, c, g, or t
  Peptide Sequence Number=SeqID_11476
  Probeset Number=SeqID_20362
nnnnnnnnnnnnnnnnnnnnnnnnnnnnnnnnnnnnnnnnnnnnnnnnnnnnnnnnnnnnnnnnnnnnnnnnncgtgggcgcggcccaggtaccttactagcacttgttcttcttgtagacgttgctcgttgagttcgccgctgccgattcagagttcttcatagattcgtcttccgttatctacagatctagagatatgttcccctctttgtgctcctgacttcggtttgaaaaagatgaatattatcttattgattccggttaccccaaccggaaaggataccctgcaccatacaacggacaaaaataccacatatccaaatggcatcatggaagacaacttgttggtgcgaaagaggtattcaactatacccacttgtcgcaaaggaatgtcatagaacgatcatttggagtgttgaagatgaagtgacgaatcctgcttagtctcccttctttttagttatggaagcaatcgaagattattgtagcttgtatggcattacataactttattagggatagtgtcatacacgatcacgactttgatcatttcgtatctaggacgaaagttggtgattgaggggtagcagagagtagtcgtggaccatcagatgggtcagacatgagtgtgtttagagattcgattgctgccgcgttagtgtcttaacttaccatacttatgtaacctatgttgctgtaatggagtatgcattggctttttccgaattttgtgttggctagtn

SEQ ID NO: 5960 - DNA, 928 bp, Zea mays
  misc_feature (1)..(204): n is a, c, g, or t
  Peptide Sequence Number=SeqID_11477
  Probeset Number=SeqID_20363
nnnnnnnnnnnnnnnnnnnnnnnnnnnnnnnnnnnnnnnnnnnnnnnnnnnnnnnnnnnnnnnnnnnnnnnnnnnnnnnnnnnnnnnnnnnnnnnnnnnnnnnnnnnnnnnnnnnnnnnnnnnnnnnnnnnnnnnnnnnnnnnnnnnnnnnnnnnnnnnnnnnnnnnnnnnnnnnnnnnnnnnnnnnnnnnnnnnnnnnnnnnncggccggggacgtgcgtaccttctagtctcgtctcgtcccctctgcctcgcttccgccgctttaggacacgagaccgaacgtcacctcgagcgatgccgccggtggtcccgagatccggcaggatagttcgtcggacggcgatgatcggcgcagccaccgccgcctacctgctcttcaccgccgactacggacccgagatcttggatcctgtacgaaccgtactcctttagttctttacggctgctaacaagtcggttagtcacatcggattccctttgtgttctgaatcagcagttacagtagtgatgtcttcatgttgccggacgcagtggcatgctataatgctagcgtgaccgtctaggtaaatgccaccgattagagatggcaatggtacccacgtttttttcttggatagagatttacgattcttcctactccatgacgttctcctccactacctctcggtcagttattaccatggcgacctcttttgccccaattacccttaaccatgctttcactcttcacctaaagaagaccaactatttgatttagctacacaatctaaacttagcccatcgaagcaatcaattgctaggaattcttgatggcacaatctcagcaccctttaggcagaaatgtcatagaagtactgacggcaatttactgaccctgtaatgcaacatttaatgggccatgtagtactattttattatcatacct

SEQ ID NO: 5961 - DNA, 274 bp, Zea mays
  Probeset Number=SeqID_20364
gatctgtatccaagttatcaacctacataggatagagcacgacgaaatgctcgtcgtgtcggctcgtttgattcgtggtcaactcagcttggatcggttcatttgatttttttttttcgcgaggtggtgaaatgatatcctaagtcgaaaccagcccgcgacctaaacgaactatcatatttcagcaaaacaaactatatgcatatcatttatgtaatgattgacaaacatgttatatgtatgctaatgattggtgaactgtgtctatgtatta

SEQ ID NO: 5962 - DNA, 274 bp, Zea mays
  Peptide Sequence Number=SeqID_11478
  Probeset Number=SeqID_20365
taatacatagacacagttcaccaatcattagcatacatataacatgtttgtcaatcattacataaatgatatgcatatagtttgttttgctgaaatatgatagttcgtttaggtcgcgggctggtttcgacttaggatatcatttcaccacctcgcgaaaaaaaaaaatcaaatgaaccgatccaagctgagttgaccacgaatcaaacgagccgacacgacgagcatttcgtcgtgctctatcctatgtaggttgataacttggatacagatc

SEQ ID NO: 5963 - DNA, 815 bp, Zea mays
  misc_feature (1)..(73): n is a, c, g, or t
  misc_feature (156)..(156): n is a, c, g, or t
  misc_feature (162)..(165): n is a, c, g, or t
  misc_feature (187)..(187): n is a, c, g, or t
  misc_feature (207)..(207): n is a, c, g, or t
  misc_feature (223)..(226): n is a, c, g, or t
  misc_feature (243)..(246): n is a, c, g, or t
  misc_feature (259)..(259): n is a, c, g, or t
  misc_feature (296)..(296): n is a, c, g, or t
  misc_feature (310)..(310): n is a, c, g, or t
  misc_feature (320)..(320): n is a, c, g, or t
  misc_feature (322)..(322): n is a, c, g, or t
  misc_feature (329)..(329): n is a, c, g, or t
  misc_feature (347)..(347): n is a, c, g, or t
  misc_feature (371)..(371): n is a, c, g, or t
  misc_feature (423)..(423): n is a, c, g, or t
  misc_feature (478)..(478): n is a, c, g, or t
  misc_feature (542)..(542): n is a, c, g, or t
  misc_feature (556)..(556): n is a, c, g, or t
  misc_feature (560)..(560): n is a, c, g, or t
  misc_feature (621)..(621): n is a, c, g, or t
  misc_feature (632)..(632): n is a, c, g, or t
  misc_feature (639)..(640): n is a, c, g, or t
  misc_feature (651)..(651): n is a, c, g, or t
  misc_feature (653)..(653): n is a, c, g, or t
  misc_feature (655)..(655): n is a, c, g, or t
  misc_feature (657)..(657): n is a, c, g, or t
  misc_feature (661)..(661): n is a, c, g, or t
  misc_feature (674)..(815): n is a, c, g, or t
  Probeset Number=SeqID_20366
nnnnnnnnnnnnnnnnnnnnnnnnnnnnnnnnnnnnnnnnnnnnnnnnnnnnnnnnnnnnnnnnnnnnnnnnnagtccacctttgttgaggctaagctgagagtgtaggagtgaaggctcagtgctctctggaccgtcgaggatcgatcgggcggnggcgcnnnngtcgtcgggcagaagcggtcgncgccggacaaggcgcacagntccaccatggacgccnnnnaccaccaagagtcaccnnnnacgagcaaggtcnctaattcccccccccccccggagcgattcgagcttgngacttctactttgntgggagctgnangattctncccggcgactatggaggngttattgtctcatttggagcaacnaggaaatataaagtagtaaaacaatttctttacgaaagataaactttttcanggtcattgaaaattatgagtcaaaacctagagcataatcttcagaatggccttgnttttaataagtgattacctattttggtacagagccgaagagcatttaccaaacacattgggacnagctctaatttgcnaagnaatactctctaccttccttttaacttggttttttataaatccatatccctggacacttcanaaaaaatttcntggtggnnatgggtatggnancntntacncctgggattttgnnnnnnnnnnnnnnnnnnnnnnnnnnnnnnnnnnnnnnnnnnnnnnnnnnnnnnnnnnnnnnnnnnnnnnnnnnnnnnnnnnnnnnnnnnnnnnnnnnnnnnnnnnnnnnnnnnnnnnnnnnnnnnnnnnnnnnnnnnnnnn

SEQ ID NO: 5964 - DNA, 572 bp, Zea mays
  Peptide Sequence Number=SeqID_11479
  Probeset Number=SeqID_20367
ccatgtgtcggacccgggaatcggccatatggccggagagtagacgttgcagatgcagaaccccgctaaagacgcccaaccttctacaacgccaatggatccattttgatgcatcgagcctgtgctgctgtgctgcactgatgcgctgcaagatctgaccctgctcgggcggtatctctggtctctctctacgctaggtcgctagctccttgcatcgatcatggcagcggcggccttccaatcccaggcggatgcgctcttcaggaaaaatctcgcgatccagaggcgcgcttacaagacgaactgctgcctgatcctgttagaaacttgtgttgtctgagtctctttctcatcgaaataatgtatttgcaattatttgagttgaactagtatttgcaataattacagctcagaacaaataattacagctcagaacaatgtaattgtgtgaaccatgttggagttaccattggagttatattgtaatgaactgtacttattttaattgttttaatgtaaaaaaaaaaaaaaaaaaaaaaaaaaaaaaaaaaaaaaaaggaaaaaacccctct

SEQ ID NO: 5965 - DNA, 572 bp, Zea mays
  Probeset Number=SeqID_20368
agaggggttttttccttttttttttttttttttttttttttttttttttttttttacattaaaacaattaaaataagtacagttcattacaatataactccaatggtaactccaacatggttcacacaattacattgttctgagctgtaattatttgttctgagctgtaattattgcaaatactagttcaactcaaataattgcaaatacattatttcgatgagaaagagactcagacaacacaagtttctaacaggatcaggcagcagttcgtcttgtaagcgcgcctctggatcgcgagatttttcctgaagagcgcatccgcctgggattggaaggccgccgctgccatgatcgatgcaaggagctagcgacctagcgtagagagagaccagagataccgcccgagcagggtcagatcttgcagcgcatcagtgcagcacagcagcacaggctcgatgcatcaaaatggatccattggcgttgtagaaggttgggcgtctttagcggggttctgcatctgcaacgtctactctccggccatatggccgattcccgggtccgacacatgg

SEQ ID NO: 5966 - DNA, 695 bp, Zea mays
  misc_feature (1)..(1): n is a, c, g, or t
  misc_feature (5)..(7): n is a, c, g, or t
  misc_feature (11)..(16): n is a, c, g, or t
  misc_feature (18)..(26): n is a, c, g, or t
  misc_feature (29)..(35): n is a, c, g, or t
  misc_feature (357)..(363): n is a, c, g, or t
  misc_feature (369)..(373): n is a, c, g, or t
  misc_feature (375)..(376): n is a, c, g, or t
  misc_feature (391)..(396): n is a, c, g, or t
  misc_feature (398)..(398): n is a, c, g, or t
  misc_feature (407)..(411): n is a, c, g, or t
  misc_feature (413)..(427): n is a, c, g, or t
  misc_feature (436)..(456): n is a, c, g, or t
  misc_feature (459)..(461): n is a, c, g, or t
  misc_feature (467)..(467): n is a, c, g, or t
  misc_feature (471)..(471): n is a, c, g, or t
  misc_feature (474)..(483): n is a, c, g, or t
  misc_feature (485)..(496): n is a, c, g, or t
  misc_feature (501)..(504): n is a, c, g, or t
  misc_feature (509)..(512): n is a, c, g, or t
  misc_feature (516)..(516): n is a, c, g, or t
  misc_feature (518)..(518): n is a, c, g, or t
  misc_feature (528)..(530): n is a, c, g, or t
  misc_feature (555)..(557): n is a, c, g, or t
  misc_feature (560)..(560): n is a, c, g, or t
  misc_feature (611)..(619): n is a, c, g, or t
  misc_feature (631)..(643): n is a, c, g, or t
  misc_feature (651)..(668): n is a, c, g, or t
  misc_feature (670)..(684): n is a, c, g, or t
  misc_feature (686)..(695): n is a, c, g, or t
  Peptide Sequence Number=SeqID_11480
  Probeset Number=SeqID_20369
ngggnnnctcnnnnnngnnnnnnnnncgnnnnnnnccagtttgcgaggacgatgcgggcgcacgcagcggcatcgcaggacgcagcaaagccctgaaaccgcccccacgtccccctccccgcaccgcagagccagtcagaacaggaacaccggagcggcagctgcagcggccgagggcggagcacgcaaggcatggatagataccaaagggtagagaagcctcggaatgacacaccaatcagccagaatgagattaggattactactcaggggaggatgaggaactatatcagctatgggatgtcgctgcttgaggaaaatggacacgatgagattagtatcaaggccatgggcacnnnnnnnaaatannnnngnnatggttaccccccgnnnnnngnattgattannnnnannnnnnnnnnnnnnnatcaaaacnnnnnnnnnnnnnnnnnnnnntannntgatantgangcnnnnnnnnnngnnnnnnnnnnnntctgnnnntgctnnnngcangngacaccgtcnnnggcggaagttcaaggcatcatctcnnnttnctgaggaaaatcttgctgcagtggctgctttgaaggatgccacctcacctnnnnnnnnnagtggaatacannnnnnnnnnnnncaagatgnnnnnnnnnnnnnnnnnngnnnnnnnnnnnnnnngnnnnnnnnnn

SEQ ID NO: 5967 - DNA, 879 bp, Zea mays
  misc_feature (1)..(1): n is a, c, g, or t
  misc_feature (834)..(879): n is a, c, g, or t
  Peptide Sequence Number=SeqID_11481
  Probeset Number=SeqID_20370
ncagctacgtaggccccccccccgaactccattttgttcatgtttaccttgctaaggagctgtcgcaaccttcagggcatagaaatagaggatatcgatcagagttttgaggcagattgggagttcttaaatgctctgtggactcatgacatgtgttccgatcttcaaactgtgcacatgttgtgtatcaattggcttccaaatgaaatttcatttatgaagcttatgctctctaaagcaactcttcttcgcacattatatgttgatagacaccctgctgattttgatgatcccataattgacatgctaacatgcaaaagagcttcagctcaagctcgtgtcctgtttggaggtttggagcaacagtggtagttgaggtggcatcttctatgtattactgagtgcaagattggttcacttgaatgagacaagacccgctttccctgctccctgctgaagtattttttgtttttctccatcatcaccatgatacacgaaccatgtagcaaatggcttatccagggaactggcatgatttgtttgtcttgttcagatgaagctgatgtggtattggttgttcactagttcagtagagatattcgtggcagcaagcgcccagagtcgtttggttaacgaagcatacctccaaacttgcctgagtaggtgaaattcggctaccctttcgttagacttttcaccggacctccagaacttgttgcttgccaagcagagctcatgcaataagcaatccatggggggttttgtttctagctaaatttcttctctgtttagtgaaagcttctcccctttacttcaaaaaacaaaaaaaaaagnnnnnnnnnnnnnnnnnnnnnnnnnnnnnnnnnnnnnnnnnnnnnn

SEQ ID NO: 5968 - DNA, 1468 bp, Zea mays
  misc_feature (1159)..(1161): n is a, c, g, or t
  misc_feature (1185)..(1188): n is a, c, g, or t
  misc_feature (1199)..(1200): n is a, c, g, or t
  misc_feature (1220)..(1221): n is a, c, g, or t
  misc_feature (1394)..(1396): n is a, c, g, or t
  misc_feature (1428)..(1435): n is a, c, g, or t
  misc_feature (1437)..(1442): n is a, c, g, or t
  misc_feature (1447)..(1449): n is a, c, g, or t
  misc_feature (1465)..(1465): n is a, c, g, or t
  misc_feature (1468)..(1468): n is a, c, g, or t
  Peptide Sequence Number=SeqID_11482
  Probeset Number=SeqID_20371
agaaccaaaataacccaccccagcaaccatggactgctgctgttctgctcctgctccttttgtttgtttgcttgtgcttgccattcttcttctgaaagaaaataaaaatgcatctggccttgcacgcgcagacatggacgacactctgtacccgctgagccttggcatcaacctagcatgccgcaagaacatacaggagtacatgctgaagaagctgcggatcgaggagagccaggtccccaggatgtgcctggacctgtacagggagtatgggaccacaatggccggcctcaaggttttggggtacgatttcgactacgacgacttccacgcctgcgtgcacgggacgctgccgtacgagaaggtgaagcctgacccggtgctcaggcagctgctgctttccctgccgcagaggaagatcatcttcaccaactccgacaaggccaacgcggccagagtcctggagaagctcggcctccaggactgcttccaagggatcgtctgcttcgagaccctgaacccgccaccaccaaccgagaccgagaagaacagtggcggcagtgctgggacgatcctgtgcaagccctcactggcgtccatggaagccgtcatcgagatcgccaagctcgacgccgagagaacggtgttctttgacgacagcgcgcgcaacatcgccgcagggaaggccgccggtttccgcaccgtcatcgtggggagctcggcgctggtgccaggggcggacgtggcgctggagagcatccacaacatcaaggaggcgctgccggagctctgggaggttgccgccgccgctgccgccggcgaccgcgtcgacgccgtcctccggtccaccaccgccgtggagaccacagtgattgcctgagcaataataccatgtgacattaaccgtcacggactcaaggtcacggccacgtaatataatgctgccgtgtagtatttctcgtgcctgattaagtaccgaccgaggtaactaatactactgtatgtaccagaccagaactttacggttacgggtaataaggtttgtatagctcatccctgtcggcccgtgcttttttatggcgcggtccgtggtgcaaatggatgccacgtactgaatgcaaatatatataaaaaatgctttgtccaccacagtgattgnnngagcaataataccatgtgacattnnnngtcacggactnncggccacgtaatataatgcnnccgtgtagtagtatggtatttctcgtgacgtgcaaattaaaatgacttggaatgtggtgtgcctgattaagtaccgaccgaggtaactaatactactgtatatgacagaccagaactttactggtaataaggtttgtatagctcatccctgtcggcccgtgcttttttatggnnnggtccgtggtgcaaatggatgccacgtaatgnnnnnnnntnnnnnnaaaannntgccttgtccatctcnaan

SEQ ID NO: 5969 - DNA, 851 bp, Zea mays
  misc_feature (17)..(22): n is a, c, g, or t
  misc_feature (432)..(433): n is a, c, g, or t
  misc_feature (781)..(781): n is a, c, g, or t
  misc_feature (851)..(851): n is a, c, g, or t
  Peptide Sequence Number=SeqID_11483
  Probeset Number=SeqID_20372
tgtgagtgaataacaannnnnntctatgatcaaatatcgtatagaaactaatatgctaaataacaatcagattgatatttgatgtgaaaactgcagtttatataatcgatgttcatagtaacgtggtgttttggattcttttaccagttttttttctgttctgcaacacttttctgtttatatctcaggtaaatatccttcctttgattacattagtgtaacaccaccatatctggaggtcaactatagcacgctactcggccaacttgcaaggtcaccattggttggaaaagactgcttcatcgtgagtcccccatgctacgtaaaccaaactgctttcccctatgcgcatttctgactccatcatctatcttattagctagtcgagtacccgctgaaaacagacatggctgaatcctgcggaaaccttgnnaaggtagctacagaagtgtgaggtaagatcgcagcaggtgtagtaagtgaacgaagtttctggcgatcaaggtcgaagggcaggcgatcagcgtagcgagcgagggcgtccatgaggcgccgcaccagatcggcgagctcctcgtccttcccgcccccggcccctgcccctgccaccggggccgacaccgacgccgacgccatcgccggtgacgagaggtgagcgggattggcggctggggcagcggaaaccctagaaaagcgcgcgcaccggcgagcgggaggacagggatgggtggggtgcgagatgccccacaccaacaccacgacgaagaagaagaggagagangaagggagggagctctgcttcgcgtttttccttttgtcaggattaagggcggaggagacgcgcaatttgn

SEQ ID NO: 5970 - DNA, 641 bp, Zea mays
  misc_feature (434)..(434): n is a, c, g, or t
  misc_feature (601)..(641): n is a, c, g, or t
  Peptide Sequence Number=SeqID_11484
  Probeset Number=SeqID_20373
ggtgatagttctgattcccaggcaaggaaccctcttatcccttctcgtctcctgtcccgggaccggggaggccgggatcgagaaggggaacgagcgcgtcccgtgctcgccactcctcgccgatggcgtcctccactctgccagcctcccccttccgtatgtctcttcccggactacgagccccggaccctgctaaggttaagcacgtatccgttcgaacccccgctcgccgtcttcccgttgcagcctccgcggcaccatcaggcgccgcggcggcggcggcgagggagcgcaggcgtttcctggagcgctacgggctccacccaaacgacttcgaggaagatgcagagggtgatactccgagggtctacttccaattattctgagacttattcgctaatgctgcttgcccctgccaatttggggggattttngaagtggggatgctttccccttttcatttttttgcaaggaggaaaaaaagaacggcccagggcgaaggccattcgggaaaaggggaacaaaatttggaaaaagcgcattgacttcccgcaaaggtggaagggcccccgggaaaatcccaaaaggtctcagggggttnnnnnnnnnnnnnnnnnnnnnnnnnnnnnnnnnnnnnnnnn

SEQ ID NO: 5971 - DNA, 641 bp, Zea mays
  misc_feature (1)..(41): n is a, c, g, or t
  misc_feature (208)..(208): n is a, c, g, or t
  Peptide Sequence Number=SeqID_11485
  Probeset Number=SeqID_20374
nnnnnnnnnnnnnnnnnnnnnnnnnnnnnnnnnnnnnnnnnaaccccctgagaccttttgggattttcccgggggcccttccacctttgcgggaagtcaatgcgctttttccaaattttgttccccttttcccgaatggccttcgccctgggccgttctttttttcctccttgcaaaaaaatgaaaaggggaaagcatccccacttcnaaaatccccccaaattggcaggggcaagcagcattagcgaataagtctcagaataattggaagtagaccctcggagtatcaccctctgcatcttcctcgaagtcgtttgggtggagcccgtagcgctccaggaaacgcctgcgctccctcgccgccgccgccgcggcgcctgatggtgccgcggaggctgcaacgggaagacggcgagcgggggttcgaacggatacgtgcttaaccttagcagggtccggggctcgtagtccgggaagagacatacggaagggggaggctggcagagtggaggacgccatcggcgaggagtggcgagcacgggacgcgctcgttccccttctcgatcccggcctccccggtcccgggacaggagacgagaagggataagagggttccttgcctgggaatcagaactatcacc

SEQ ID NO: 5972 - DNA, 466 bp, Zea mays
  Peptide Sequence Number=SeqID_11486
  Probeset Number=SeqID_20375
taatgcagccaagtagagtactagtataatgccatactctagctgagtacgtaaggtcatccccatcctgggcctgcactatatatacttcagctagccatgggccatggcgagacgatatttttcacgcatagtgcttgcgagagtgtcatgagttcatgtgccgcctgcgctgcggtctccttttggtgtagcactgctgtctgctgcccacccaccgcaataacgttcttcgtgtccaaacagttcggccgtaacgaatgaattgcccatggtagcaaacagtttggcccataaatggccataaccatccagggaccagggtccttgcttcttcttgtcgaacactgcacagcctcagcgtggggcccctgtgcccccagctagcgagcgaacgagatccacccgcatatcgagttgtcactgtttttttcacgccccactggtacctcggccgggaccacgc

SEQ ID NO: 5973 - DNA, 912 bp, Zea mays
  misc_feature (1)..(311): n is a, c, g, or t
  misc_feature (565)..(565): n is a, c, g, or t
  misc_feature (672)..(675): n is a, c, g, or t
  misc_feature (679)..(681): n is a, c, g, or t
  misc_feature (697)..(701): n is a, c, g, or t
  misc_feature (713)..(715): n is a, c, g, or t
  misc_feature (912)..(912): n is a, c, g, or t
  Probeset Number=SeqID_20376
nnnnnnnnnnnnnnnnnnnnnnnnnnnnnnnnnnnnnnnnnnnnnnnnnnnnnnnnnnnnnnnnnnnnnnnnnnnnnnnnnnnnnnnnnnnnnnnnnnnnnnnnnnnnnnnnnnnnnnnnnnnnnnnnnnnnnnnnnnnnnnnnnnnnnnnnnnnnnnnnnnnnnnnnnnnnnnnnnnnnnnnnnnnnnnnnnnnnnnnnnnnnnnnnnnnnnnnnnnnnnnnnnnnnnnnnnnnnnnnnnnnnnnnnnnnnnnnnnnnnnnnnnnnnnnnnnnnnnnnnnnnnnnnnnnnnnnnnnnnnnnnnnnnnnnnttggtcagcacatgtcaggtggtggctctggcgactcacagtcgggatttggacctcagggtggcggtgaccaggcgccggaggcagagtatgaagaggttaaaaagtgaggctgcgggaagttgaggcgaaattgtagtgacctgtttagaagtagctactcttttttggaaacacagaaagtcagatgagaaatgtaaaacatgtgctgtaataatcgttggaactgtggtcccttagtttcaggtggaagngatggaggtaacaagacatttcattggttttggtgcaaagaaaacagaaaaagaaactcgaggagggacccggtaaaaaggtggcaagcgggtagttcaggcgaaannnnagtnnnctgtttagaagtagcnnnnnttttttgggaannnagatagtcagatgagatgtaaaacctgtgttgtaataatcgttggatttgcccccacttagtttccttctgcggcgatggaggtaacacgacatttcattgcttttgttgcatatgatgtcttgatctggcatggatgcatgctcacagcgaaaaccattggcgagttctgctattgaatgaaagtacatttgtttn

SEQ ID NO: 5974 - DNA, 1530 bp, Zea mays
  misc_feature (888)..(889): n is a, c, g, or t
  misc_feature (892)..(892): n is a, c, g, or t
  misc_feature (1007)..(1007): n is a, c, g, or t
  misc_feature (1024)..(1024): n is a, c, g, or t
  misc_feature (1028)..(1028): n is a, c, g, or t
  misc_feature (1039)..(1039): n is a, c, g, or t
  misc_feature (1088)..(1089): n is a, c, g, or t
  misc_feature (1167)..(1167): n is a, c, g, or t
  misc_feature (1199)..(1200): n is a, c, g, or t
  misc_feature (1513)..(1530): n is a, c, g, or t
  Peptide Sequence Number=SeqID_11487
  Probeset Number=SeqID_20377
ggcaagggagagtgtgaagattgagcatgagaaaaagctttctactctgcagagcctggaatacaaagggagggatagtgcaaagctggataagaccaaggcctccataaacaagctgcaatcactgattgttgttacctctcaggctgccacaactacatcatcagccatcgttagagtccgtgacaatgagcttgcaccacagcttgttcagctctgttttgcgctattgggcatgtggaggtcaatgaaccatttccatgagatacagaatgagattgttcagcaagtccgtggtctggtggacagctccatggctgagtcaacatctgacctccacaggcttgcaactcgtgaccttgaggctgctgttgcggcgtggcactccaacttcgaccgcctcatcaagtatcagcgcgactacatccgctctctgtatggctggctgaagctcacactctgccaggtggacagcagcgtgccccaggaagcccatgcctcgatgatctcgcgcgagctcaccagcttctgtgacgagtggaagcaggcgctggaccgcctcccggacgccgtcgcctcggaggcgatcaagagcttcgtgaacgtggtccacgtcatctacgccaagcaggccgaggagatgaagatcaagaagcgggcggagacatactccaaggagctggagaagaaggccaactcgctcaggtccatcgagaagaagtactaccagtcctactccatggtcggccttggcctccccggcagcgggcgcgatggcatcgacagccacgctgcgtacgatgcccgcgatcctctcgcggagaagaagaccgagatcgcccagtgccgccggaaggtggaggacgagatgacgaggcacgccaaggnngtngaggtcacgcggtccacgacgctgaacaacatacagaccggcctgccgggtatattccaagccatagctgggttctcggggacagtggtcgaagctcttgatgtggtctgccgcngagctgggtctgtgcgntagnagaagctcttngccatcaggattaccaagagaccatttgctgcctctctttttctctttnngggtcattcagtagtttatttatatagggaaactgcaatatattatatatatagctcaaagtagagtggtcaagtatngaaaatggctcccccggatgttttgccctgtnnggatggtatcagttgtaaataatttgggtttgcccaggatttgttttttctgggtgattcagtagtttatttatataggaaactgcaatatattatatatatagctcaaagtagagtggtcaagtatagaagatggctccccgtatgttttgccctgtcaggatggtttcagttgtagataatgtgattttgcccaggatttgttggtctcctttttctgtagggagtgcgaggggagagatttataatgtacagacattaaggtagccttgcactctagcctcatgatcaagccctgtgtttctgtttagcnnnnnnnnnnnnnnnnnn

SEQ ID NO: 5975 - DNA, 1235 bp, Zea mays
  misc_feature (1)..(609): n is a, c, g, or t
  misc_feature (634)..(638): n is a, c, g, or t
  misc_feature (895)..(896): n is a, c, g, or t
  misc_feature (900)..(900): n is a, c, g, or t
  misc_feature (944)..(944): n is a, c, g, or t
  misc_feature (1210)..(1235): n is a, c, g, or t
  Peptide Sequence Number=SeqID_11488
  Probeset Number=SeqID_20378
nnnnnnnnnnnnnnnnnnnnnnnnnnnnnnnnnnnnnnnnnnnnnnnnnnnnnnnnnnnnnnnnnnnnnnnnnnnnnnnnnnnnnnnnnnnnnnnnnnnnnnnnnnnnnnnnnnnnnnnnnnnnnnnnnnnnnnnnnnnnnnnnnnnnnnnnnnnnnnnnnnnnnnnnnnnnnnnnnnnnnnnnnnnnnnnnnnnnnnnnnnnnnnnnnnnnnnnnnnnnnnnnnnnnnnnnnnnnnnnnnnnnnnnnnnnnnnnnnnnnnnnnnnnnnnnnnnnnnnnnnnnnnnnnnnnnnnnnnnnnnnnnnnnnnnnnnnnnnnnnnnnnnnnnnnnnnnnnnnnnnnnnnnnnnnnnnnnnnnnnnnnnnnnnnnnnnnnnnnnnnnnnnnnnnnnnnnnnnnnnnnnnnnnnnnnnnnnnnnnnnnnnnnnnnnnnnnnnnnnnnnnnnnnnnnnnnnnnnnnnnnnnnnnnnnnnnnnnnnnnnnnnnnnnnnnnnnnnnnnnnnnnnnnnnnnnnnnnnnnnnnnnnnnnnnnnnnnnnnnnnnnnnnnnnnnnnnnnnnnnnnnnnnnnnnnnnnnnnnnnnnnnnnnnnnnnnnnnnnnnnnnnnnnnnggacctgatagctcaccagcatggnnnnngttttgattttaagcgagcgtctccactcagtaactgcacaatttgatcgccttaggtccctgcgctttcaagaagctattaatagggtgatgccaagaaagaagatcaagaggaagccagatataaaacctactgaaccatccaagtcaaaccttgtattgaaatctgatgtctcgaaggttgaagaccgggaggtatcaactgcgcccttaagagttcaagaacaactcttggacgatgaaacacgagctctccnngatngagttgaccaatcttcttgatactgtccaagaaacggagacaangatgatagaaatgtcagcacttaatcatcttatgtcaacacatgttctacaacaagcgcaacaaattcagtatttatatgatcaggctgttgaagctacaaataatgtggagcgtgggaacaaggagctatcccaggcaatccagcgcaacagcagcagtagaacctttctcctactcttcttctttgttcttactttctcgattctttttcttgactggtacaacaactgaattagtctataaagacgtcgtattgttttgctcnnnnnnnnnnnnnnnnnnnnnnnnnn

SEQ ID NO: 5976 - DNA, 331 bp, Zea mays
  Peptide Sequence Number=SeqID_11489
  Probeset Number=SeqID_20379
taatttgctaacatctgtgattacactcatgaaagctgtacgaaggagtccaatttccactttataagcttcggcaaacagtctcgttgctgcaaacataaggcacatatttcccggttgtaataagcgccggtagatccatcactaggactcaatattgtattttctagcgtcatcatatcgattaactgctggttcctaggaatccatgatactgattatctcaggacgaattccacattcaatcaagatcttcttaaatctgagagcactttcaactttgccgcatttgatttcaactatttttaagtgctcagtggggaaaagttgt

SEQ ID NO: 5977 - DNA, 331 bp, Zea mays
  Probeset Number=SeqID_20380
acaacttttccccactgagcacttaaaaatagttgaaatcaaatgcggcaaagttgaaagtgctctcagatttaagaagatcttgattgaatgtggaattcgtcctgagataatcagtatcatggattcctaggaaccagcagttaatcgatatgatgacgctagaaaatacaatattgagtcctagtgatggatctaccggcgcttattacaaccgggaaatatgtgccttatgtttgcagcaacgagactgtttgccgaagcttataaagtggaaattggactccttcgtacagctttcatgagtgtaatcacagatgttagcaaatta

SEQ ID NO: 5978 - DNA, 534 bp, Zea mays
  Peptide Sequence Number=SeqID_11490
  Probeset Number=SeqID_20381
tagcgaggacgcggccgaggacaggcagctgcgactgacgccgccaggaagcaagcagagagagatcgaccagaagaaaggacgcgcagagggaaaaagaaagatagtaaggggtgaagccagcccagccgtggcagcaccagagcgagagaagaagcagcctcggcaaaggaatctggaaagaaaaaaacagagagagagcagatcgggcaaagaaagaaagggagagagaggccagagaaagcagcacgcaaaagaaaaagtagatcaaaaaagcaaccttcagccaccagttgctagcagatcaagaccagccactcgcagatcaagaaattttgcagccaccacagaaacaagcagccctcgtcgcatatcatagcaccagcacagtagtgaaacaccaacagcaacgcagatcgtcgccagatcagcctacaatcatatggcgtttacaatatctatgggtgagatcaatatttaatattttattgtctgcgcttgttatgtcaaagtgcgcacaagacttgtgtatgt

SEQ ID NO: 5979 - DNA, 534 bp, Zea mays
  Probeset Number=SeqID_20382
acatacacaagtcttgtgcgcactttgacataacaagcgcagacaataaaatattaaatattgatctcacccatagatattgtaaacgccatatgattgtaggctgatctggcgacgatctgcgttgctgttggtgtttcactactgtgctggtgctatgatatgcgacgagggctgcttgtttctgtggtggctgcaaaatttcttgatctgcgagtggctggtcttgatctgctagcaactggtggctgaaggttgcttttttgatctactttttcttttgcgtgctgctttctctggcctctctctccctttctttctttgcccgatctgctctctctctgtttttttctttccagattcctttgccgaggctgcttcttctctcgctctggtgctgccacggctgggctggcttcaccccttactatctttctttttccctctgcgcgtcctttcttctggtcgatctctctctgcttgcttcctggcggcgtcagtcgcagctgcctgtcctcggccgcgtcctcgcta

SEQ ID NO: 5980 - DNA, 303 bp, Zea mays
  Peptide Sequence Number=SeqID_11491
  Probeset Number=SeqID_20383
tggggcaacttcgagcggccgcccgggcaggtacggggcgctttgcgccaacggcgggaggggccagcaggcaggcaggcagcaggttgcgggattcggagcgcgatcgaagtaaaggcaactttctgagtttggaggcaaatcacccgttgccaatactgctttcgatactgcagaaatcaatggtatttgttcagaggcgcccgctatggcagagagttgcgcggcttgttgaggccttcttttagttgtgtttcgaggttgaacaatctaatggcgtgtacctcggccgcgaccacgcta

SEQ ID NO: 5981 - DNA, 303 bp, Zea mays
  Probeset Number=SeqID_20384
tagcgtggtcgcggccgaggtacacgccattagattgttcaacctcgaaacacaactaaaagaaggcctcaacaagccgcgcaactctctgccatagcgggcgcctctgaacaaataccattgatttctgcagtatcgaaagcagtattggcaacgggtgatttgcctccaaactcagaaagttgcctttacttcgatcgcgctccgaatcccgcaacctgctgcctgcctgcctgctggcccctcccgccgttggcgcaaagcgccccgtacctgcccgggcggccgctcgaagttgcccca

SEQ ID NO: 5982 - DNA, 304 bp, Zea mays
  Peptide Sequence Number=SeqID_11492
  Probeset Number=SeqID_20385
gtgtcgagcggccgcccgggcaagagagagatagagagcgattactcgtcttcagtaatataaaaggcaggccgcgggcctcttaccctgagactgtcttggaaggcgtctggttctcactcctctgtagctcaagacagtctggcttccgtatcctctggttgagtttaaaaaggctcttgattgcctgattgattgagtgcacctgggagggacaaccagagacacctgggtggggaggagttccctatgagaatcctctggggtagtcgcgcccgtcgcccccccgctaatcactaccccc

SEQ ID NO: 5983 - DNA, 304 bp, Zea mays
  Probeset Number=SeqID_20386
gggggtagtgattagcgggggggcgacgggcgcgactaccccagaggattctcatagggaactcctccccacccaggtgtctctggttgtccctcccaggtgcactcaatcaatcaggcaatcaagagcctttttaaactcaaccagaggatacggaagccagactgtcttgagctacagaggagtgagaaccagacgccttccaagacagtctcagggtaagaggcccgcggcctgccttttatattactgaagacgagtaatcgctctctatctctctcttgcccgggcggccgctcgacac

SEQ ID NO: 5984 - DNA, 210 bp, Zea mays
  misc_feature (11)..(11): n is a, c, g, or t
  Peptide Sequence Number=SeqID_11493
  Probeset Number=SeqID_20387
cgagcgccgcnccgggctagcccttcaagttccactgcttccagtgcccgttcacctgcaacgagaagacccacctgttcaaccacatgaagtacaacctctgcaaggactccatctctctcatggccaaactagggagagacaccggaccagctaaagccaccaccaccaccaccactcactcacctcctcactcactcactcactata

SEQ ID NO: 5985 - DNA, 210 bp, Zea mays
  misc_feature (200)..(200): n is a, c, g, or t
  Peptide Sequence Number=SeqID_11494
  Probeset Number=SeqID_20388
tatagtgagtgagtgagtgaggaggtgagtgagtggtggtggtggtggtggctttagctggtccggtgtctctccctagtttggccatgagagagatggagtccttgcagaggttgtacttcatgtggttgaacaggtgggtcttctcgttgcaggtgaacgggcactggaagcagtggaacttgaagggctagcccggngcggcgctcg

SEQ ID NO: 5986 - DNA, 508 bp, Zea mays
  misc_feature (251)..(251): n is a, c, g, or t
  misc_feature (296)..(296): n is a, c, g, or t
  misc_feature (508)..(508): n is a, c, g, or t
  Peptide Sequence Number=SeqID_11495
  Probeset Number=SeqID_20389
accagagagtcagagtgcggaggtgaacgtgacgtgacgctcctcctctataaaaggagacgcctgtgctgcagtgtgcacagcacagcccgtcgcgcgccgctgcgttgaggttgagccaaggcgcaatggcaacctccacctcagttcccgtcctcctgctcctcgccgccgccgccggcctcctcctgctccccggctcgctggcgtggcagagcagccactgtgcaccgggcgcgcccggcagtggnctcgccgacgtggccttcacccggctccggctccggcggcggccnacagcccgccccaccatagcaagccgcccaagcaccaccatggcaagccgcccaagtgcccgccgtgcaccctccgtacgtgcctcgacgctcgcccgtaccggcgtaagtgccacatatggcccggcgaagccttgggcataacaaccaccggagggcccacattaggtcccgtcccggcaaagcctcgggccctaaccgcccagggggcn

SEQ ID NO: 5987 - DNA, 508 bp, Zea mays
  misc_feature (1)..(1): n is a, c, g, or t
  misc_feature (213)..(213): n is a, c, g, or t
  misc_feature (258)..(258): n is a, c, g, or t
  Probeset Number=SeqID_20390
ngccccctgggcggttagggcccgaggctttgccgggacgggacctaatgtgggccctccggtggttgttatgcccaaggcttcgccgggccatatgtggcacttacgccggtacgggcgagcgtcgaggcacgtacggagggtgcacggcgggcacttgggcggcttgccatggtggtgcttgggcggcttgctatggtggggcgggctgtnggccgccgccggagccggagccgggtgaaggccacgtcggcgagnccactgccgggcgcgcccggtgcacagtggctgctctgccacgccagcgagccggggagcaggaggaggccggcggcggcggcgaggagcaggaggacgggaactgaggtggaggttgccattgcgccttggctcaacctcaacgcagcggcgcgcgacgggctgtgctgtgcacactgcagcacaggcgtctccttttatagaggaggagcgtcacgtcacgttcacctccgcactctgactctctggt

SEQ ID NO: 5988 - DNA, 775 bp, Zea mays
  misc_feature (775)..(775): n is a, c, g, or t
  Peptide Sequence Number=SeqID_11496
  Probeset Number=SeqID_20391
ggccgcctgcactctgcggttgcgcacccgcgtgccaccatcgcggggattgggccgtgaccgctccacaccaccgcaccgaacgtggcgcgccgccgcgctcttatctcgcatacaccggcacccgacagtccaagtgtggtcggtagtgttcatcgtccatcggggatcgcgctcggaccaactaatccaacctcaagacatccggcccggaggaatttctcaacggagagtggcggtcactgtgacccacacctcgtcgtggtcggagcctagtaccccgaaatttgtgacacaatggttcgccaagctgcaatggctgtcaagtgcatgctgcttctgtactacaagaactgcagaggtcgtaactaccgtagacagggccaaatgttaacccttgtggagtaccttctgcttctttattcgtgctttgttgccaacttctgtttggtatcgtttctttctgaacaaggaatatgggagtctcttctcatctttagccactgggctgtatctgactttcaagttgacttcggtagttgaaaaggttcagtcattcttggccgcggtgaaagcactgtcacgtaaagatgtgcattatgggtcttatgcgactgcagaacaggtctctctacatgaacgatcctcgggagtcgcacctgagcatggtcaagcggattcttcggtacctctagggtattgtcgactacgggcttcatcttcagcactcctccacacatgaactgattgtctacaccgatgttgactgggccgn

SEQ ID NO: 5989 - DNA, 971 bp, Zea mays
  misc_feature (622)..(624): n is a, c, g, or t
  misc_feature (656)..(656): n is a, c, g, or t
  misc_feature (658)..(658): n is a, c, g, or t
  misc_feature (735)..(735): n is a, c, g, or t
  misc_feature (743)..(743): n is a, c, g, or t
  misc_feature (756)..(758): n is a, c, g, or t
  misc_feature (773)..(775): n is a, c, g, or t
  misc_feature (787)..(788): n is a, c, g, or t
  misc_feature (833)..(833): n is a, c, g, or t
  misc_feature (939)..(939): n is a, c, g, or t
  misc_feature (971)..(971): n is a, c, g, or t
  Peptide Sequence Number=SeqID_11497
  Probeset Number=SeqID_20392
cgttgctgtcgggcaattttgggagggacagttcaagtcccaactctcagtggagacgttgttctaaaggtatatatgtcagatagctcatttccatcatgcttctctttatatatctgataattgaccttctcacaggtcaagcccggtactcaacctggtcagaaggtagttctgagaggaaaaggtaatctactgtgcacgcttttgttcttttttggcggtgcattatctctttaattacggattgtaacacggctatgatgcgtctgtgaaatgattagtccaaaaggtttctggaacatagccatgtcagagattgttttcttgtgtggaagtaacaaaattatgaatcgatcgaacaatcaaattctactgcatgtgtcaagactggaaaatttatctggcgtctaggtgaactgccaatttgaactgaagaagctggtggaaacttgcatgctttatctaaaccctgatgcatctatcctgcagggatcaagacaagaaactcaccgtactacggagatcaatatgtccatttcaatgtcaacatccctatgaatttgacgtcaagacagcgggagctgatcgaggaattcgcgaaggaggagcaaggcgaagnnnagaaggacgcgaaggcagccggggcatcaggntngcctattttaggagccaatccacattccaatagtgccttagctgatctttataccgtgaggtagaataggctgctgnctgaaatncgcaggcaacatnnngctggttgcatggannnctggaatttccnncgcaacatatagatctttgtttgggattttgtagctggaataatnctagatcgcccgtgcctgatatgttcaatcctaagcctaatgctagcagggcgtgcaaggactcttgtacaattttgttgatcagggtgaccagatgtaaaaacanacggtaccaatgccaattcatgttttctgtcn

SEQ ID NO: 5990 - DNA, 283 bp, Zea mays
  Peptide Sequence Number=SeqID_11498
  Probeset Number=SeqID_20393
ttttgtgggggggggcccgcctgaaccgtccacctccgtgaacgtccatagcgattgggcgcgtcctctccggcgccagcgggaaatttcgattacacgccggcgcggctgccaagttattttattttagcaaagcaaagcaaagcaaaccaaaccaaagcaaagccaagcaagcaccctcgactcccacacaatatgaaaagaaacaccacacacacacaggtcttggccgtcgtcagtcgacacaacggcgccggagtgcaagtgcaatgcatgtctaggt

SEQ ID NO: 5991 - DNA, 283 bp, Zea mays
  Probeset Number=SeqID_20394
acctagacatgcattgcacttgcactccggcgccgttgtgtcgactgacgacggccaagacctgtgtgtgtgtggtgtttcttttcatattgtgtgggagtcgagggtgcttgcttggctttgctttggtttggtttgctttgctttgctttgctaaaataaaataacttggcagccgcgccggcgtgtaatcgaaatttcccgctggcgccggagaggacgcgcccaatcgctatggacgttcacggaggtggacggttcaggcgggcccccccccacaaaa

SEQ ID NO: 5992 - DNA, 608 bp, Zea mays
  misc_feature (1)..(7): n is a, c, g, or t
  misc_feature (608)..(608): n is a, c, g, or t
  Peptide Sequence Number=SeqID_11499
  Probeset Number=SeqID_20395
nnnnnnntcggatggtcccgggcggcatggcgcgcgggaaatccgcgtttcccgggccccgcccgaggtcgagcgtgaggagcgctgctactgctgctgcttggagagtaggcgagcgcaagacgaggctgtgcagcgagtagcgaggacatagggcaccaccatggcgctgtccacgacacaatgctcacccgggcattttgtcgaacagccgatgggcaccacggagaacagcgaggagggttcactgttgtgcgcaaggaagggcgccatggagaaagatgaggctagcattggcttgagggtgagcctgtcggcgatgcagtgggcggagggggcgctggacggtgcccaaaatagagatgaacagagggaggagtcggtagaggagggcgcagggaactagtgaccatggacggggaaaagaccacaccatggggggggtgttcaccggcgcgagctcagaccagagggggccctgcgccgaccaagggagagtggaggtcggccatggccacactcaaggtgcgcagggcactgagaggagtagccatggccatggaggcccttgctgctagaggtgcaagaaagggggggctgagctaatn

SEQ ID NO: 5993 - DNA, 608 bp, Zea mays
  misc_feature (601)..(608): n is a, c, g, or t
  Probeset Number=SeqID_20396
tattagctcagccccccctttcttgcacctctagcagcaagggcctccatggccatggctactcctctcagtgccctgcgcaccttgagtgtggccatggccgacctccactctcccttggtcggcgcagggccccctctggtctgagctcgcgccggtgaacaccccccccatggtgtggtcttttccccgtccatggtcactagttccctgcgccctcctctaccgactcctccctctgttcatctctattttgggcaccgtccagcgccccctccgcccactgcatcgccgacaggctcaccctcaagccaatgctagcctcatctttctccatggcgcccttccttgcgcacaacagtgaaccctcctcgctgttctccgtggtgcccatcggctgttcgacaaaatgcccgggtgagcattgtgtcgtggacagcgccatggtggtgccctatgtcctcgctactcgctgcacagcctcgtcttgcgctcgcctactctccaagcagcagcagtagcagcgctcctcacgctcgacctcgggcggggcccgggaaacgcggatttcccgcgcgccatgccgcccgggaccatccgnnnnnnnn

SEQ ID NO: 5994 - DNA, 155 bp, Zea mays
  Peptide Sequence Number=SeqID_11510
  Probeset Number=SeqID_20397
ctagggggcgcggggctgctcgccgtgccgccgccttcgtccgctccgtggatcttcacggcctttgtcatctggatcctgggggagggactgctcttcctttcgttcatgaactgacgtgtgcacgtggcacgccggcgtatatgtgtatcctc

SEQ ID NO: 5995 - DNA, 155 bp, Zea mays
  Probeset Number=SeqID_20398
gaggatacacatatacgccggcgtgccacgtgcacacgtcagttcatgaacgaaaggaagagcagtccctcccccaggatccagatgacaaaggccgtgaagatccacggagcggacgaaggcggcggcacggcgagcagccccgcgccccctag

SEQ ID NO: 5996 - DNA, 211 bp, Zea mays
  Peptide Sequence Number=SeqID_11511
  Probeset Number=SeqID_20399
gttaggtgctgctgtgtctggtctccttctgtagcaagacacgcgaacatactagagaggcctgcaagcggcggccgcgcacctaggacgaggtgaacttggtgacggccttggtgccctcggagacggcgtgcttggcgagctctccggggaggactaggcgcacggaggtctggatctcgcgggacgtgatggtgggcttcttgttgta

SEQ ID NO: 5997 - DNA, 300 bp, Zea mays
  Peptide Sequence Number=SeqID_11512
  Probeset Number=SeqID_20400
atgcgcgaggccaagattcagactgatccatgtggacaacgatcgtagttgcccgggcactaagaggttttcttcttctcgtcgtatgtttttaagagagctatagattgccagagacaagagtctatatagtttattttttgtatatgggtagcgagacatgcttggtgaagtttattagcacgtctatatctctcagagtaaacgtgaactcctatgttgccgtgtcatgaatcaggattccttttttttcaaactactaatacttaatttaaatgctattcagctattgtccgtgcc

SEQ ID NO: 5998 - DNA, 300 bp, Zea mays
  Probeset Number=SeqID_20401
ggcacggacaatagctgaatagcatttaaattaagtattagtagtttgaaaaaaaaggaatcctgattcatgacacggcaacataggagttcacgtttactctgagagatatagacgtgctaataaacttcaccaagcatgtctcgctacccatatacaaaaaataaactatatagactcttgtctctggcaatctatagctctcttaaaaacatacgacgagaagaagaaaacctcttagtgcccgggcaactacgatcgttgtccacatggatcagtctgaatcttggcctcgcgcat

SEQ ID NO: 5999 - DNA, 499 bp, Zea mays
  Peptide Sequence Number=SeqID_11513
  Probeset Number=SeqID_20402
attcgcatgatcctagccggctaactaaacccatatatatccatgtacatatatatcctgtcctgtcctgtagcatgcccatatacgataactggacgacgtacgatcccatcgtttccatgctgcccatctacaaggagctcattggagctggcctcaagatctgggttttcagtggtgacacggacactgcggtgccgctgaagcgcgaccaggcgctctctcgccgccctgggccttcccgtaaagaccagctggtacccctggtacatcgtgccgaccgaaggttggcggcggctggagcatggagtacgacgaagggctgaacttggtcaccgtccgcggcgccgggcacgaggtcccgctgcaccgcccgccggagcaggcgctcttcgtgttccagcaattcctgctgggcgaacccatgccggccgaggtgatcgctcggggttgatttggtgacaagggaatcacgggaggattggagatgattgagggg

SEQ ID NO: 6000 - DNA, 912 bp, Zea mays
  misc_feature (1)..(6): n is a, c, g, or t
  misc_feature (9)..(14): n is a, c, g, or t
  misc_feature (19)..(21): n is a, c, g, or t
  misc_feature (24)..(28): n is a, c, g, or t
  misc_feature (32)..(35): n is a, c, g, or t
  misc_feature (901)..(912): n is a, c, g, or t
  Peptide Sequence Number=SeqID_11514
  Probeset Number=SeqID_20403
nnnnnncannnnnnggaannntcnnnnntctnnnncggtacattcccagacttgagcaggagcttgaagatcttcatgcgcagatgaagttagctggagagcatcaaggacaaaatgcagggaaacatgttgcttcaatttcacataatacaaacagtatgccagcgagaaaagaaccttgtggttcaattcgcaacaaaacagtatctgatctcctatcagaaactgtagagggatccaagaggttagaggatgaaagttctgcgattgaagacgactcagcttcagagtctctgtcatttacagagtctgaggatctctctgacatttttgagacagaatcagaggagcaggaagaggacaacaaggatcgccccttatatctcgataggctggataagtttccctcaggaaaaaatgataatgaaccagatgattttgaggagcatctgcggaggatcgcttcactttcagataagactgattcaccttcaaaagaactgaaagtgtcagagctcgatgagattgataaaatctttctgagagcaagttcattgttgaagaaaaggtgaacctttgggatttgtatatgacaatcgtcatatttatatgcactgtgaaaagtattttgtgcagttttaatggcatcttcagaaaaaagtttatgatcgtctagtgatagggccaaccctcaaagtttgtggtcaccattgttttccagtgattataatatacctggaattctgtggggttgtttgaatttgttgcctgataacttcgatgtgtcatccagcagattcttgttgtttcatgcttttgttcgcagttcctgatgttagttgtagccatcctttgtaagtgctatttttttttctaaaaccttgaacaaaaaccctgccgnnnnnnnnnnnn

SEQ ID NO: 6001 - DNA, 324 bp, Zea mays
  Peptide Sequence Number=SeqID_11515
  Probeset Number=SeqID_20404
tagcgtggtcgcggccgaggtactgatgtgtgccaaatgatttcagtcgactgtcctatatgcttcaacattctccaattttagagaagctcactctggagcagcatgacgagggtttgtcgctggggacggcatcaggaagaccagcgaggtgctctctcccaagctgaggaggagccgccgccctgtcaccagaagcagaggagccgccgccctgtcacccagaagaaccgagcagacacagagaaaatgggcctttttgcaattgtgagggcgtcgaggcggtttactaggaggttcagtacctgcccgggcgccgctcga

SEQ ID NO: 6002 - DNA, 324 bp, Zea mays
  Probeset Number=SeqID_20405
tcgagcggcgcccgggcaggtactgaacctcctagtaaaccgcctcgacgccctcacaattgcaaaaaggcccattttctctgtgtctgctcggttcttctgggtgacagggcggcggctcctctgcttctggtgacagggcggcggctcctcctcagcttgggagagagcacctcgctggtcttcctgatgccgtccccagcgacaaaccctcgtcatgctgctccagagtgagcttctctaaaattggagaatgttgaagcatataggacagtcgactgaaatcatttggcacacatcagtacctcggccgcgaccacgcta

SEQ ID NO: 6003 - DNA, 800 bp, Zea mays
  misc_feature (679)..(800): n is a, c, g, or t
  Peptide Sequence Number=SeqID_11516
  Probeset Number=SeqID_20406
gcgtggtcgcggcgagtccactgcacacagcgatacagcagcatcagcacaaactgtataacagcaggcgcagcagcgactccaagcatccaacgccaggttcaagccactgaggctatgtaatttacaatagagggtcatggtcttttaatcgttctgccgtagcttaataggcagaccctcagtagtgtaacctccaagtgcatttcgtgaatgattagtcaactataatttatttactagattcaaaacatagcatggtatgcccccctttcgaattcttttggtccccggacatgtcttccattattgccgtccgcagcagccccgggtcccccccgcgttgacgctctagcagatcttccctccgggcctcggagttgctccatatcttccctccgggcctgttatataagaaacacaaacatttaagataagttcatttctaatgctacaaaattctgagatacagcacacatactgaggagaaaattcaaaagatatgtacccttcaagagcatatcgagcataatttgggaatgtatagcgaagtaggcgaatgacttcctccctggtgtacgtgtcaagtaaagggtccttaacacctttgaagcttgccttacaaatatcgttgatcaacttgttttcaatggaatgcatgcaaccaattcgcatagtnnnnnnnnnnnnnnnnnnnnnnnnnnnnnnnnnnnnnnnnnnnnnnnnnnnnnnnnnnnnnnnnnnnnnnnnnnnnnnnnnnnnnnnnnnnnnnnnnnnnnnnnnnnnnnnnnnnnnnnnnn

SEQ ID NO: 6004 - DNA, 800 bp, Zea mays
  misc_feature (1)..(122): n is a, c, g, or t
  Probeset Number=SeqID_20407
nnnnnnnnnnnnnnnnnnnnnnnnnnnnnnnnnnnnnnnnnnnnnnnnnnnnnnnnnnnnnnnnnnnnnnnnnnnnnnnnnnnnnnnnnnnnnnnnnnnnnnnnnnnnnnnnnnnnnnnnnnactatgcgaattggttgcatgcattccattgaaaacaagttgatcaacgatatttgtaaggcaagcttcaaaggtgttaaggaccctttacttgacacgtacaccagggaggaagtcattcgcctacttcgctatacattcccaaattatgctcgatatgctcttgaagggtacatatcttttgaattttctcctcagtatgtgtgctgtatctcagaattttgtagcattagaaatgaacttatcttaaatgtttgtgtttcttatataacaggcccggagggaagatatggagcaactccgaggcccggagggaagatctgctagagcgtcaacgcgggggggacccggggctgctgcggacggcaataatggaagacatgtccggggaccaaaagaattcgaaaggggggcataccatgctatgttttgaatctagtaaataaattatagttgactaatcattcacgaaatgcacttggaggttacactactgagggtctgcctattaagctacggcagaacgattaaaagaccatgaccctctattgtaaattacatagcctcagtggcttgaacctggcgttggatgcttggagtcgctgctgcgcctgctgttatacagtttgtgctgatgctgctgtatcgctgtgtgcagtggactcgccgcgaccacgc

SEQ ID NO: 6005 - DNA, 763 bp, Zea mays
  misc_feature (1)..(50): n is a, c, g, or t
  misc_feature (753)..(763): n is a, c, g, or t
  Peptide Sequence Number=SeqID_11517
  Probeset Number=SeqID_20408
nnnnnnnnnnnnnnnnnnnnnnnnnnnnnnnnnnnnnnnnnnnnnnnnnntgcaaatctcaacactatttggccgtggcatttagatctcaattggcttttgttctgtgagcacaggctctgcaggccgtcacaatggaattaacttattactgtaatggctcctctccctctatgccctgttgtcatttttacccagtaattaaatctatttgccgaatattcgcatgaaatgcgacccagcgtttatttcctgacttttaaaacccaacaatgtggcggcaactgattggaaaacaaggacgagctatgactgacacaacaacaacaagaagaatagtctgagggaaatatgagagaaacaacataataagaatgactggcatatccaccagacaaccccattttaaagttctgaattataatgaacaagcatagtcatttacacagtatttatggtgtgtctttggcatattaaggcctcagagagttcccatactggcgtctaaccgaggatattacagtgctgttgctttagccttatgatcctggtgctaaccttgagatatgaggaaaaacaaactccatctcccagactcataaagcagcaccaagtagacgagctgattcagtccgtgacctttcagttttaataaacagggctttgtgtatggacaaggaggaggctggcttgacccctagcttgacccctaggtcattagtactggtcacagacgcctctggagttgcagtnnnnnnnnnnn

SEQ ID NO: 6006 - DNA, 763 bp, Zea mays
  misc_feature (1)..(11): n is a, c, g, or t
  misc_feature (714)..(763): n is a, c, g, or t
  Probeset Number=SeqID_20409
nnnnnnnnnnnactgcaactccagaggcgtctgtgaccagtactaatgacctaggggtcaagctaggggtcaagccagcctcctccttgtccatacacaaagccctgtttattaaaactgaaaggtcacggactgaatcagctcgtctacttggtgctgctttatgagtctgggagatggagtttgtttttcctcatatctcaaggttagcaccaggatcataaggctaaagcaacagcactgtaatatcctcggttagacgccagtatgggaactctctgaggccttaatatgccaaagacacaccataaatactgtgtaaatgactatgcttgttcattataattcagaactttaaaatggggttgtctggtggatatgccagtcattcttattatgttgtttctctcatatttccctcagactattcttcttgttgttgttgtgtcagtcatagctcgtccttgttttccaatcagttgccgccacattgttgggttttaaaagtcaggaaataaacgctgggtcgcatttcatgcgaatattcggcaaatagatttaattactgggtaaaaatgacaacagggcatagagggagaggagccattacagtaataagttaattccattgtgacggcctgcagagcctgtgctcacagaacaaaagccaattgagatctaaatgccacggccaaatagtgttgagatttgcannnnnnnnnnnnnnnnnnnnnnnnnnnnnnnnnnnnnnnnnnnnnnnnnn

SEQ ID NO: 6007 - DNA, 472 bp, Zea mays
  misc_feature (441)..(443): n is a, c, g, or t
  misc_feature (446)..(449): n is a, c, g, or t
  misc_feature (465)..(465): n is a, c, g, or t
  misc_feature (472)..(472): n is a, c, g, or t
  Peptide Sequence Number=SeqID_11518
  Probeset Number=SeqID_20410
gggttcaagtgcggcatcaactaccaggccccaccagtggtcccgggtcccgccctccccaaggtgcagcgcccggtgtgcatgatctccaactcccccagcgtcgtggaggtgttctcccgcatcaacagcaagttcgccctcatgtcccccaagcgcgcgttcgtccactggtacgtcggcgaggccatgaagcagggggagttctccaagccacgcaaggacctgccccccctggagaaggactacgaggaggtccccccaaaggccgccagtgatgccgccccccaggagaagaaatcctgatctgcttgcatgaatttgtttggctgtcgagccaggttgtggtgttgaaaaccctttgtttgtgtcctgggtaatgtttgggtgtttccttccatcatcgcttggtgaactgctatagtatttgcatttgtaatnnnagnnnntcgctttaagcacttntggtttn

SEQ ID NO: 6008 - DNA, 563 bp, Zea mays
  misc_feature (1)..(44): n is a, c, g, or t
  misc_feature (121)..(121): n is a, c, g, or t
  misc_feature (199)..(199): n is a, c, g, or t
  misc_feature (282)..(282): n is a, c, g, or t
  misc_feature (284)..(285): n is a, c, g, or t
  misc_feature (325)..(325): n is a, c, g, or t
  misc_feature (368)..(371): n is a, c, g, or t
  misc_feature (393)..(394): n is a, c, g, or t
  misc_feature (438)..(438): n is a, c, g, or t
  misc_feature (461)..(464): n is a, c, g, or t
  misc_feature (561)..(563): n is a, c, g, or t
  Peptide Sequence Number=SeqID_11519
  Probeset Number=SeqID_20411
nnnnnnnnnnnnnnnnnnnnnnnnnnnnnnnnnnnnnnnnnnnnaagctcgaagatattgttccttcgtcccccaactgtgatattccccatgttaaccgtactgaggaccagctgatttntatatcaaaggatggatttgtgagccttcttacttcagatggcaaccctaaggatgattttagactccccactgattnaactcttgtggcccagatcaaagaagggttttaaaacggcaaggatctttttgtggctgtccagtctgctatgggggaggaananntttgcgcccttaaagatgttggccccaagtaacttccccnccctggaaaactgtatctccaaaccttaatcgaaaaaaaaagnnnntccaggattggtacaaagacanncctctggcttgagctggcttttgctatggccaacccaaatgcangggtccctgggtgttgccccggnnnngccttatctgtgggtacattctgggccccggattttttatgcttttatgcccccccctgtttagtattaattatccataaatttgtttggggcggtnnn

SEQ ID NO: 6009 - DNA, 547 bp, Zea mays
  misc_feature (469)..(470): n is a, c, g, or t
  misc_feature (475)..(475): n is a, c, g, or t
  misc_feature (500)..(508): n is a, c, g, or t
  misc_feature (512)..(513): n is a, c, g, or t
  misc_feature (515)..(516): n is a, c, g, or t
  misc_feature (527)..(531): n is a, c, g, or t
  misc_feature (533)..(537): n is a, c, g, or t
  misc_feature (539)..(541): n is a, c, g, or t
  misc_feature (547)..(547): n is a, c, g, or t
  Peptide Sequence Number=SeqID_11520
  Probeset Number=SeqID_20412
accaatgatctttttagatctcgtgtcctcgctctagtcgtagcaatacaaacatacatggtatagataaaattaacatcacaccaaacataagaacatactgcataataatgatatactcgttgctacgagagaaacgcaacttgaacggatcaaatctcagttaaaacacgaaagatacgaatttccaagggttttatgtatttgatacgtaagaatataagaaataaactttagtgtctttttcatgttaaaacagagacacagtgtgataaacaacattattacaaaggtttaggaactagaaagaggattattggtcgcaatatgaattttccagagattaaatacaattctgaaatttatttcatatttaaaactatatcttcctttcctttttatttaattcacacggctctggaactgtcgcatgaaatctgagaaacgcaggggcctctgcgggacgttnntaagncacagtgcacatcgacaagggatgnnnnnnnnngatnntnntgaattatagnnnnncnnnnntnnntaatgn

SEQ ID NO: 6010 - DNA, 1271 bp, Zea mays
  misc_feature (391)..(391): n is a, c, g, or t
  misc_feature (1271)..(1271): n is a, c, g, or t
  Peptide Sequence Number=SeqID_11521
  Probeset Number=SeqID_20413
acacgccgcgatgcctgccctcgcccctgcgaatctcgcctacctcgcccctgcccccgccaatctcgccgccaccgttatctcaacccctgcaccgcctcctatccagcagcaagcgccgccgccgcctcgccgcgcgggagcgggagctgaactcgactgacgatgtacctgccatcgttgtcgtgtcagtccatggaccccgccgccgtcgtgcgcagcaagtaccatcgccgtccacaccaagtcgtgcccccgctcccgtaaccacagtcgtgccctcgccccgaccccggatcttgtgattgtcgctgtgccctcgccctagctcatcatccccctttgcctccctcccagcgctgtgctctcgtctcgtgactaccgccgggcncgggtggcagagacgacactgggaggggagcgttttgcgtcccctttctcctcaccctctccgtcgtcgtctacgcttccatctcagcgtcgtctctgccaccctcaccctttgcctccctcccggcgtcgtgtttgccgccctccccctctgcctctacgctgtctccgtcgcccggccagtcccgccgctctcatctcgacagtcctccgctcgtctgacgtaccaatcgatgaagttgttggagaggcagtccaagaagtccccggagaagttgcgactgtcacagcccatgcagcgcgcgggctcgctgatggccaccagcgtccttccaagcatggccggcaccaccmccgtbgtccttgtcccgtctcgcggctgctggtccagtgcgccgcccttggaagcccatacctcttacaccmcggacacggaaaggacgctgtaatcaaggtgacacctcatcgaggccgcaggagcctatcagattcaaccttctgcaagtatcgaagtggggcgcaaaatatctccaatytagaaatcagcaactttttatagttgcttccttcaaacatcagcaaacctgcaatatcaggtagtttgccaagagcatctatctgtttactcaagtgatgttagttataagaaactattatgtcggtagttgcatatattaggacatatgtcggtcatgattaaagtatgttgtaataatattacatgctcataatgaaagccggtaacatcaaaattaggccttgcagctgcagctccaatcagtaactcactgatgcattggattctccaagtaaatgcaaattctgctatgtttgcacttttgtattagcatgataatgttttggcaaaaaaaaaaaaaaan

SEQ ID NO: 6011 - DNA, 483 bp, Zea mays
  misc_feature (2)..(2): n is a, c, g, or t
  misc_feature (5)..(29): n is a, c, g, or t
  misc_feature (32)..(36): n is a, c, g, or t
  misc_feature (39)..(69): n is a, c, g, or t
  misc_feature (71)..(73): n is a, c, g, or t
  misc_feature (76)..(78): n is a, c, g, or t
  misc_feature (90)..(112): n is a, c, g, or t
  misc_feature (114)..(116): n is a, c, g, or t
  misc_feature (118)..(123): n is a, c, g, or t
  misc_feature (125)..(127): n is a, c, g, or t
  misc_feature (132)..(137): n is a, c, g, or t
  misc_feature (152)..(155): n is a, c, g, or t
  misc_feature (158)..(160): n is a, c, g, or t
  misc_feature (162)..(164): n is a, c, g, or t
  misc_feature (167)..(170): n is a, c, g, or t
  misc_feature (172)..(173): n is a, c, g, or t
  misc_feature (179)..(186): n is a, c, g, or t
  misc_feature (193)..(200): n is a, c, g, or t
  misc_feature (210)..(210): n is a, c, g, or t
  misc_feature (212)..(222): n is a, c, g, or t
  misc_feature (227)..(243): n is a, c, g, or t
  misc_feature (248)..(250): n is a, c, g, or t
  misc_feature (257)..(262): n is a, c, g, or t
  misc_feature (264)..(268): n is a, c, g, or t
  misc_feature (271)..(271): n is a, c, g, or t
  misc_feature (273)..(273): n is a, c, g, or t
  misc_feature (275)..(275): n is a, c, g, or t
  misc_feature (277)..(277): n is a, c, g, or t
  misc_feature (279)..(291): n is a, c, g, or t
  misc_feature (293)..(295): n is a, c, g, or t
  misc_feature (297)..(300): n is a, c, g, or t
  misc_feature (306)..(308): n is a, c, g, or t
  misc_feature (315)..(315): n is a, c, g, or t
  misc_feature (317)..(317): n is a, c, g, or t
  misc_feature (321)..(323): n is a, c, g, or t
  Probeset Number=SeqID_20414
gnggnnnnnnnnnnnnnnnnnnnnnnnnnccnnnnnctnnnnnnnnnnnnnnnnnnnnnnnnnnnnnnngnnngcnnnaaaggagaaaannnnnnnnnnnnnnnnnnnnnnngnnngnnnnnncnnnccggnnnnnngcggcggcggcggcnnnngcnnncnnnccnnnngnngggggnnnnnnnnccccggnnnnnnnnggcggctgcngnnnnnnnnnnnccccnnnnnnnnnnnnnnnnnccctnnnccgtccnnnnnntnnnnnggncncncncnnnnnnnnnnnnngnnncnnnngccccnnngggaatnantggnnngcctgggccccccccaggttccctccttgtagtagtccattaaagtttggttccctccccgtccttaaattaaagtaaggaggttgccccctttgtgtgggggcttggaaacgtcggctgtttttcctgcctcgaattaattgattttgacgcccggttt

SEQ ID NO: 6012 - DNA, 454 bp, Zea mays
  Peptide Sequence Number=SeqID_11522
  Probeset Number=SeqID_20415
cctggctcggacccagctcggcgccatcccatcaccctgccatgccgcgcgcttcctccctgctcggccagaccatcggtctccctctgcttggagctcgtcgccatggccgttgccttctgcctgctcggatcccagcgcgcggagcttttcccctagccgagcccctccatcgcaccgtgctcgtccggcgagtcgcgccctggccgcgtcgagctcccttgtcgtggtttgcttctccccctaccatggctgccgagttctttccccagccatggaactccctgcgcgcgctctgctcaccatcgcaaaccgtggctccctccaactcggcctctgctcgatgcccagcgcgccgtccctgctcctagcgctgtggctttctcctccccgagctccctcaccatggcgtgcgtctgtcccctggatccctccctagccacgccctgcccgg

SEQ ID NO: 6013 - DNA, 628 bp, Zea mays
  Probeset Number=SeqID_20416
gcaaatattgctacatggtgatcttttgaatctttgcacgtgagaacacgcagtgatatgaacagattatgctacgagagaagaggttgtttgttcgccaataattttagtggactttcagatagaagcaccagaaaattcgcaagttagcttacatatgctaaaaggtagaaaggaccttgaaaccttcgagaactctctcgtcaacatcttcacactttcggactttcagatagaagcaccagaaaattcgcaagttagcccttgaaaagctgttcatcgttagctgcccggggatcaaaatccttgtctcaagacacaaaaggcctcaccggtctgatgagactgtggatccgtaggtgccctgatctggagaggcgttgcgagacaggggaaggggaggactggcgcctcatctcccacgtccctaagttgagtattggccggtgaaatcacctctcctaagttgtgccggtgcttctcatcgtcttgatgtcaggactcacctcccttcaaatactccagatcagcgagtgcccgggcttcgcgtccttacccacaggggatgatgagcagcctcgcctcccttgaaaaactgcatcgtctggtacctcggccgcgcccacgc

SEQ ID NO: 6014 - DNA, 628 bp, Zea mays
  Peptide Sequence Number=SeqID_11523
  Probeset Number=SeqID_20417
gcgtgggcgcggccgaggtaccagacgatgcagtttttcaagggaggcgaggctgctcatcatcccctgtgggtaaggacgcgaagcccgggcactcgctgatctggagtatttgaagggaggtgagtcctgacatcaagacgatgagaagcaccggcacaacttaggagaggtgatttcaccggccaatactcaacttagggacgtgggagatgaggcgccagtcctccccttcccctgtctcgcaacgcctctccagatcagggcacctacggatccacagtctcatcagaccggtgaggccttttgtgtcttgagacaaggattttgatccccgggcagctaacgatgaacagcttttcaagggctaacttgcgaattttctggtgcttctatctgaaagtccgaaagtgtgaagatgttgacgagagagttctcgaaggtttcaaggtcctttctaccttttagcatatgtaagctaacttgcgaattttctggtgcttctatctgaaagtccactaaaattattggcgaacaaacaacctcttctctcgtagcataatctgttcatatcactgcgtgttctcacgtgcaaagattcaaaagatcaccatgtagcaatatttgc

SEQ ID NO: 6015 - DNA, 376 bp, Zea mays
  Peptide Sequence Number=SeqID_11524
  Probeset Number=SeqID_20418
ggaattgcggaaaaacttgcagcttttaagacgtatgggctaagcacacccgatgatagtattcagcgcaggcaacacatatatggagtacacaggttcacagaaagtgaggtccgtagattgtgggtgtttgtatggtaagcgcttcaagatgcagctcttataattcttgctgtctgtgcgttcgtatcgctggatgttggcattgtggtggaagggtggccaaaaggtgctcatgatggtcttggaattgttgcaagtatcctcttggatgtgtttgtcgctgcaacaagtgactaccggcagtcactgcagttcaaggacctggccaaggagaaaaagagaatccatgtgcctgcgcgggcgggggctccaa

SEQ ID NO: 6016 - DNA, 453 bp, Zea mays
  misc_feature (405)..(405): n is a, c, g, or t
  Peptide Sequence Number=SeqID_11525
  Probeset Number=SeqID_20419
ggttattagagattagagcgccccgcccggccaggtgcggtcagtggctcgagggagcggttcgctcacgacgatgctagacgagggtggggtctacgaagcgggccagatagggggctggcatagacgcgagcagagatgggagcgatggcatctgggccacgcgtggcacaggtagaggtgcaatcaaaggcgatcggggtggaggggaaacaagatcgaactcaaggagagagttgagatcggtaggtgaggagccagcacggggaaagacaactttataaaatacaacctgacgagagatgaggatgcaatgagtgaggaggtcaagacaacaataacccttgtggtcggaggagtaaccgaggaaaagataacgagtggagcgatgggagagcttgtggngagcagtgacagaggtgatgggatagtagtcacaaccaaagacacgaa

SEQ ID NO: 6017 - DNA, 223 bp, Zea mays
  Peptide Sequence Number=SeqID_11526
  Probeset Number=SeqID_20420
cccgcgggaatttcgatagtcgagcgaccgtgccgggggcgggccgggcgcttatgcgggaggcacggcacggcacggcatgacgagatgactgccactggtgtggtgggttgtgggcgcgaaacgggacaatgagtcacatgatggcgcaggcgtaggaggggtcctcctcgcagacgatccggtagccgccgccgccgccgcaggggttgcacgggtacgt

SEQ ID NO: 6018 - DNA, 651 bp, Zea mays
  misc_feature (461)..(461): n is a, c, g, or t
  misc_feature (544)..(544): n is a, c, g, or t
  misc_feature (546)..(550): n is a, c, g, or t
  misc_feature (567)..(651): n is a, c, g, or t
  Probeset Number=SeqID_20421
atcgtcgatccagtgcaaacaagctcgctcgcaggcgcaacccacccacgtctaccacacgaagcatcgtagccagccacccatccagccagctaaacccacacatggccgggatcgtggtggtgttcgacttcgacaagacgatcatcgacgtgcacagcgacaactgggtggtggacagcctcggcctcaccgacctgttcgagcgcctcctccccaccacgccctgtaacacgctcatggacactatgatggaggagctgcacgcgcgggtcaccacgctggccgaggtgaccgaggtgctcatgacggcgcccatcgacccgcgcgtgcacgccgccgtcaggaccgcgacgcgctcggctgcgactgcgcgtgatcacgacgccaagccttcttatctgaccgtcctggacagcacgggctgctcgactgttctccagataacaccacccagccgngtgacgcacgcatcgatgcctgacacggggtgcgagtgggcacctgctcaaatggagcctgtgacttctcgagcagcactccnannnnntcggtccgaaaatcggnnnnnnnnnnnnnnnnnnnnnnnnnnnnnnnnnnnnnnnnnnnnnnnnnnnnnnnnnnnnnnnnnnnnnnnnnnnnnnnnnnnnn

SEQ ID NO: 6019 - DNA, 651 bp, Zea mays
  misc_feature (1)..(85): n is a, c, g, or t
  misc_feature (102)..(106): n is a, c, g, or t
  misc_feature (108)..(108): n is a, c, g, or t
  misc_feature (191)..(191): n is a, c, g, or t
  misc_feature (649)..(651): n is a, c, g, or t
  Peptide Sequence Number=SeqID_11527
  Probeset Number=SeqID_20422
nnnnnnnnnnnnnnnnnnnnnnnnnnnnnnnnnnnnnnnnnnnnnnnnnnnnnnnnnnnnnnnnnnnnnnnnnnnnnnnnnnnnnccgattttcggaccgannnnntnggagtgctgctcgagaagtcacaggctccatttgagcaggtgcccactcgcaccccgtgtcaggcatcgatgcgtgcgtcacncggctgggtggtgttatctggagaacagtcgagcagcccgtgctgtccaggacggtcagataagaaggcttggcgtcgtgatcacgcgcagtcgcagccgagcgcgtcgcggtcctgacggcggcgtgcacgcgcgggtcgatgggcgccgtcatgagcacctcggtcacctcggccagcgtggtgacccgcgcgtgcagctcctccatcatagtgtccatgagcgtgttacagggcgtggtggggaggaggcgctcgaacaggtcggtgaggccgaggctgtccaccacccagttgtcgctgtgcacgtcgatgatcgtcttgtcgaagtcgaacaccaccacgatcccggccatgtgtgggtttagctggctggatgggtggctggctacgatgcttcgtgtggtagacgtgggtgggttgcgcctgcgagcgagcttgtttgcactggatcgacnnn

SEQ ID NO: 6020 - DNA, 440 bp, Zea mays
  misc_feature (413)..(413): n is a, c, g, or t
  Peptide Sequence Number=SeqID_11528
  Probeset Number=SeqID_20423
ctaaatattctcttggtggtggtggaaaccctagctgtcgaatccgccgccggcgagacggctgccgcccaggcgcctcagcggaagaaagagacgctccatgagctgctctcgaggcacaattcaatgtatctgagacaggaaagagggactcaaaagtccaggataaggaaacgagcctcaaggaagctgctgcagaaggcgtagaaacagcaggtagtggaagagattacgcgcctctcacctgagctagaggcgaatcatgctgcagagcttgcttcctctgggtccgtctgggtacaaaccctctggcatctcagagaagggaaaatttggcgacttggtgaaggccatagctggtgtgtcagtttccagcaacagcaaggaagcacgcgggcgagagaagaaggccntagctagaggggaaccactgctgctgg

SEQ ID NO: 6021 - DNA, 437 bp, Zea mays
  Peptide Sequence Number=SeqID_11529
  Probeset Number=SeqID_20424
aattccagtcgccgccacccaaaaatttctgccgccgcaccaatcgccgtccatagccgcgtgccctagccggccgaccgtaatcgccgtcccagccgtgcgcccaagccagccggcccccaacgtcgtccccacccgcgctcccaagcaggccggcccccagccgcgcgccctgctacgccaaacgtcgtcccctaccgcgcgccctgcttgcttcatccgaccggccgccaacagccgtccccagccgtgcgccctgctagagccgtgctccaaaccaccggcgccctgctataacgtggtagcttcagagtggagaagcgtccgcacaagaaaaggtttgatcacaaaccaaggcacgaaggcttgtcttagcattgctggatcttatgcaaagacatttgctgctcttgctggtgtccaaagtttcatcatgt

SEQ ID NO: 6022 - DNA, 1055 bp, Zea mays
  misc_feature (1)..(3): n is a, c, g, or t
  misc_feature (7)..(11): n is a, c, g, or t
  Probeset Number=SeqID_20425
nnnactnnnnnctctcctataattaagcccatcaggtcgccctcctcctccgacctcgtcccgcagcaacgcagcagcagcgtcagcggtaccgccggcacggctcctcctccctcctagccattcggccatgtccggcggcgggtgcagcatacgcgccatctggatccttacgcccaacgacacagtagccttctccaggcggttcgctgtggtggagaagcggtggcgtgccgcgtgggaggaggaagaaggagacggagagagacaccgttggggcaccggggcggcgaagatgccgctgcccgccgaccacgaggtcgccgccgcattcgccgagcgccggagaagggagggcactgcacgcagttcaggcatccgaacaaacgtatcatctgtgggactggattcttgggttgatgatccaattacccgccacattatctcattacacatggataaagaggaaggagatccctttatgctgtggcctgtggtcctacaaaagcgtggagggtactatgtccttgtgttgcctctggtggatcctcagccatttagagcatatgagaatctcttgaaaaggtctgattgtgggggttcggccaaggagaacaacaatctttcttcaatcctgttcaatcttccatgcataacaggagcatttatggttgcacaagttgttggggacataattactggtgatattgctgaacctgaggtgattgttagctctgggccatctgttggtggactcttggattcattgactggaagtataggtatttcagcacgagcgaagcctattgccgcacctgttgcagcaccaactgcatcagtctcttcccctgttggtgctgctcaatcagactccttaaaagggggtgtaaggccttttgacaaggatttactgcagaacttcatcattggtgcaatgccttttggcacacctcaagatctcaattatgccaatgttacttcgattagaactactggattttctggtgaccctcttccaacagaccagaaacaacctgcctggaagccctacctgt

SEQ ID NO: 6023 - DNA, 653 bp, Zea mays
  misc_feature (653)..(653): n is a, c, g, or t
  Peptide Sequence Number=SeqID_11530
  Probeset Number=SeqID_20426
aaacaacgccgcgacgagaagagagaagagggcgggcatcggccagtgggggctcggaggccgagggaggcgaggaaagcggcgggtgccgggccgcccgcgccggtgccgaggccctcaccagtcaccaccccctcccctcttccgtctgtcccccgcttgccgccaccgccgctgcctgctcgcgacccttcccccttttaacgctcccgcggccccgcgtcgtgctcccttttgtcgccgctgccttcgtgcccgtactcgcgggttctcctcgctcctcaatctccgcgcctgggcgcggcgttcgccgccggatctgggcgcgggacggtgccccggacggtcgatggcgcgggtggcgctccggttgggcgcccgcgcgctcgcggttctcgtcctcgtgtcagtggctctgcttccacttgtcagttccgacgatggacacaaacactgccgagggtgttgtcaggggctgggcggattcctccacggggcgcgtgaaggacggggacaaactgagcctcaaggatttgctcttcttcctccacattcctaggactggagggcgcacctactttcactggaatgcccgcggttcttatggcaaactacgggtccgacccaagccctccgtggggggccagctggtn

SEQ ID NO: 6024 - DNA, 795 bp, Zea mays
  misc_feature (3)..(10): n is a, c, g, or t
  misc_feature (12)..(19): n is a, c, g, or t
  misc_feature (23)..(33): n is a, c, g, or t
  misc_feature (35)..(42): n is a, c, g, or t
  misc_feature (46)..(51): n is a, c, g, or t
  misc_feature (56)..(57): n is a, c, g, or t
  misc_feature (78)..(79): n is a, c, g, or t
  misc_feature (81)..(81): n is a, c, g, or t
  misc_feature (84)..(87): n is a, c, g, or t
  misc_feature (101)..(103): n is a, c, g, or t
  misc_feature (127)..(128): n is a, c, g, or t
  misc_feature (131)..(138): n is a, c, g, or t
  misc_feature (140)..(140): n is a, c, g, or t
  misc_feature (155)..(157): n is a, c, g, or t
  misc_feature (207)..(207): n is a, c, g, or t
  misc_feature (209)..(209): n is a, c, g, or t
  misc_feature (217)..(219): n is a, c, g, or t
  misc_feature (231)..(231): n is a, c, g, or t
  misc_feature (233)..(236): n is a, c, g, or t
  misc_feature (795)..(795): n is a, c, g, or t
  Probeset Number=SeqID_20427
agnnnnnnnncnnnnnnnngcannnnnnnnnnngnnnnnnnngctnnnnnngcgcnntgtgcatggcgtccatctcgnngnggnnnnacgtgagcatcatnnnggtgagcgtagtcacgagcctcanngcnnnnnnnnancgtccggggtggatnnntgggaaccttaactccggccacctcgacaggttatacttcctcctcgccncnctctcgcnnntggacctcgccntnnnngtcgcctgtgccatgtggtacaagggcatcaagcttgacggcggcgacggcgataacaggagaaaggtctctgcgcacgtctagctagccactgcatactggacctcgggccttcagttttcaggttcagagacgtgccgggctggcccctggccgtatgcccgtatagtcttatagagagaggagagagagagagaggaaataaaatgtcaaagaatatgtaaccatccgctcggcgttggatggcccatgttgttatgtatctttggtcgggcatcaagagtaaccacgggtgaagtactaatgcaataattatatatgcgcagtacacgctagctgccgcataacggcacgtaattatatttaatgatgagtgattttagtgccgggctgatctataaccgtatgcccgtatagtcttagagagagagagagagagagagagagagagagagaaataaaatgtcaaaggagtggtatgtaaccatccgctcggcgttggatggcccatgctgttatgtgtctttggtcagatgatccaagtaacctcatgtgaagn

SEQ ID NO: 6025 - DNA, 538 bp, Zea mays
  misc_feature (1)..(2): n is a, c, g, or t
  misc_feature (4)..(7): n is a, c, g, or t
  misc_feature (9)..(9): n is a, c, g, or t
  misc_feature (11)..(13): n is a, c, g, or t
  misc_feature (30)..(33): n is a, c, g, or t
  misc_feature (47)..(48): n is a, c, g, or t
  misc_feature (50)..(52): n is a, c, g, or t
  misc_feature (55)..(56): n is a, c, g, or t
  misc_feature (59)..(59): n is a, c, g, or t
  misc_feature (63)..(69): n is a, c, g, or t
  misc_feature (90)..(92): n is a, c, g, or t
  misc_feature (99)..(100): n is a, c, g, or t
  misc_feature (104)..(105): n is a, c, g, or t
  misc_feature (108)..(108): n is a, c, g, or t
  Peptide Sequence Number=SeqID_11531
  Probeset Number=SeqID_20428
nngnnnngntnnngtcaagatcgacgtcgnnnngtctgttcttgtgnncnnngcnncanacannnnnnncacgtttcaggtgaacttatnnnctctctnnaggnnacnaggggactacacgttttggtcgcttacttggtacaacggcccgaagacggtgcggattccaatagcggtccgaatgacagtttatgatttctatgcagatgttgcataaataagttgaaacatacaggacgtatcgtttgggttattttcgtttctgaagggaataaagaagtgtttttagaaaatttcgagaatctggtgcctctatatatattatggatcttttctgaagccgttgacttggcaatcggatcatggactacctatagagttcattcacttgatctaacaatgtggacagctgattgtagtcctgatggcacacatgcagatttcggtgcgttgagcaagagcttaaatatttaaacatgcactattttttgcaacttgtttctgtttgaactttgtcaagttggatgcattcgctacc

SEQ ID NO: 6026 - DNA, 218 bp, Zea mays
  Peptide Sequence Number=SeqID_11532
  Probeset Number=SeqID_20429
gcgggcgcccgggcaggtcaagaacctgcctttgcagagaaaccaattgccagcagcaacagcagcagcaacaacaacaacaacagcaacagcagttgcttcgtcaacaaagtctaaatatgagaaccggtaaatcacctgcttatgaacctggaacctgggcgggcagggcagcggggacgtcctgggccacgagctccggctgcacgcgtcgcggt

SEQ ID NO: 6027 - DNA, 218 bp, Zea mays
  Probeset Number=SeqID_20430
accgcgacgcgtgcagccggagctcgtggcccaggacgtccccgctgccctgcccgcccaggttccaggttcataagcaggtgatttaccggttctcatatttagactttgttgacgaagcaactgctgttgctgttgttgttgttgttgctgctgctgttgctgctggcaattggtttctctgcaaaggcaggttcttgacctgcccgggcgcccgc

SEQ ID NO: 6028 - DNA, 547 bp, Zea mays
  misc_feature (53)..(53): n is a, c, g, or t
  misc_feature (55)..(56): n is a, c, g, or t
  misc_feature (58)..(58): n is a, c, g, or t
  Peptide Sequence Number=SeqID_11533
  Probeset Number=SeqID_20431
cccacgcgtccgcccacgcgtccgcccacgcgtccgagggcggatggcgcgcngnntncgcggcgtccgcgacgacctatccgagctggggcgccacctgctcgacatcgcctgcttcctgcacccgctcctcaacccggcccacaacgactccccgccgcccacccccacgggccgccgccgcgcgcgccgctccccgcaccccgccgcgccgcggtccccgtcgctcctcgcgggcatcctctccgacctcgccgagatcggcggctccctccgcgttggcttctcctgcgccgcggcgcccgaccgccacgcctccgccgtgctcgagtcacagccagccgccgcgtccccgccagcttccccgcctcctcttgtcgccgccgccgccaaggaaattgcagatgatgtcgtgggagcagcgcgtgccctcgccgtgcatctcgaagcgtggatcgacttcaccgtgctcgccctagatgacgtaatttttatctcctcgattctcacaccaacacgatgggtgggagctgacatttttggtaat

SEQ ID NO: 6029 - DNA, 330 bp, Zea mays
  Peptide Sequence Number=SeqID_11534
  Probeset Number=SeqID_20432
tggccgcccgggcaggtactgcttcgggttcgtcgtctcaacgctgaatgcgaaatagtcattcgtatcgttggtcagacggactgagcaggatatcgtctgcttgttaggatccacaaggaaatgcagatcaagaggctcgatccctagcatgtcctccaagcaactgacttcctcgtccacttgttgaccactgcaatccatgccttccatcttgcctagggcagcaagtatatcacatacagaaggccttcgtattggttcgacttccttgcatctctgagccagatctatgcatttaatcacttgctggcgttgaaacgatcgtgt

SEQ ID NO: 6030 - DNA, 330 bp, Zea mays
  Peptide Sequence Number=SeqID_11535
  Probeset Number=SeqID_20433
acacgatcgtttcaacgccagcaagtgattaaatgcatagatctggctcagagatgcaaggaagtcgaaccaatacgaaggccttctgtatgtgatatacttgctgccctaggcaagatggaaggcatggattgcagtggtcaacaagtggacgaggaagtcagttgcttggaggacatgctagggatcgagcctcttgatctgcatttccttgtggatcctaacaagcagacgatatcctgctcagtccgtctgaccaacgatacgaatgactatttcgcattcagcgttgagacgacgaacccgaagcagtacctgcccgggcggcca

SEQ ID NO: 6031 - DNA, 830 bp, Zea mays
  misc_feature (275)..(275): n is a, c, g, or t
  misc_feature (309)..(309): n is a, c, g, or t
  misc_feature (343)..(343): n is a, c, g, or t
  misc_feature (345)..(345): n is a, c, g, or t
  misc_feature (368)..(369): n is a, c, g, or t
  misc_feature (373)..(373): n is a, c, g, or t
  misc_feature (377)..(377): n is a, c, g, or t
  misc_feature (387)..(387): n is a, c, g, or t
  misc_feature (396)..(396): n is a, c, g, or t
  misc_feature (399)..(400): n is a, c, g, or t
  misc_feature (475)..(475): n is a, c, g, or t
  misc_feature (531)..(531): n is a, c, g, or t
  misc_feature (583)..(583): n is a, c, g, or t
  misc_feature (597)..(597): n is a, c, g, or t
  misc_feature (647)..(647): n is a, c, g, or t
  misc_feature (652)..(652): n is a, c, g, or t
  misc_feature (659)..(659): n is a, c, g, or t
  misc_feature (683)..(830): n is a, c, g, or t
  Peptide Sequence Number=SeqID_11536
  Probeset Number=SeqID_20434
ggcagaggctgcagaagcagaagcccaagccgcacaagcatttgctgaagcagcgtttttgacattgaagaacagaaatgctggaaaattggtaatagctctaattcatgcatccctttgttacatactaccatgttttatatcctatcacatttagaaccaggttttataaccccttatgcaactgattggttagttttgtatactgcaaaaacaaaatcccatcatgagcacgtttgcttagtctatccccccacccccatgaaggtagtganttccaaaggcacccttatgccaacaatagcgtcngatagaacagcaaagcttttagaccccagaaacncnctagatccgccctccgtcgaganntcangacnggttgcttanttaaccacncanntagcttacatgttgccacctgcacacacgtggagcggagatctatccgaacacgggaattgattcatctggtggngttacaacatagggtttttgatatagcaatgggattactcatgtataaatgaacanaggttggagacagttggacctgacaattgccactttttacatgttttaactnattttttttctggnaaacaagtaattgtgaagccccttggaagtcctttgcgcttttgactggncgggntgcatangccattgttgagaggtgatttggnnnnnnnnnnnnnnnnnnnnnnnnnnnnnnnnnnnnnnnnnnnnnnnnnnnnnnnnnnnnnnnnnnnnnnnnnnnnnnnnnnnnnnnnnnnnnnnnnnnnnnnnnnnnnnnnnnnnnnnnnnnnnnnnnnnnnnnnnnnnnnnnnnnn

SEQ ID NO: 6032 - DNA, 643 bp, Zea mays
  misc_feature (224)..(224): n is a, c, g, or t
  misc_feature (617)..(617): n is a, c, g, or t
  misc_feature (632)..(632): n is a, c, g, or t
  misc_feature (643)..(643): n is a, c, g, or t
  Probeset Number=SeqID_20435
cccaatctcctctccatcgaaaccctagcacgacgcaattcccgtcttcccacgccgtgtcgccgttgctatgggcaagaagcggaagctcgagcccaaatcggcggcagggttcacgccggttaaggcctccccgaccaccaggtctgccaccgctaaggccgctggtcctatccgaggtcctcgcccccgtcgaggctacgatggagaagctgccgccaggnggcaggcgggcgagggatgtagaggaaaccgagggggaaggtgcggggcccaggagggaagtgggaaagtggaaaaaggaaagaagaaaggcgagagcggtccaggccttcgatccagggcgctggctgggattccgttcccccaagggccagcttcggccaagctgtgtacccgacccctgccatcgcctcacgggggacggtgcttaaccaccattcccgcgcgcgggggccgacgccccaccccgggttcaggggggaggatctttcctacacgggcctccggttggggaaccccacaaaccggacacccttcaccggaggcccttcgggcccaatacgggggggatagggggatctcccaggggccgtcccccgaaccgaaacacgggnaaagtggaagggggnaccgggttccn

SEQ ID NO: 6033 - DNA, 643 bp, Zea mays
  misc_feature (1)..(1): n is a, c, g, or t
  misc_feature (12)..(12): n is a, c, g, or t
  misc_feature (27)..(27): n is a, c, g, or t
  misc_feature (420)..(420): n is a, c, g, or t
  Peptide Sequence Number=SeqID_11537
  Probeset Number=SeqID_20436
nggaacccggtncccccttccactttncccgtgtttcggttcgggggacggcccctgggagatccccctatcccccccgtattgggcccgaagggcctccggtgaagggtgtccggtttgtggggttccccaaccggaggcccgtgtaggaaagatcctcccccctgaacccggggtggggcgtcggcccccgcgcgcgggaatggtggttaagcaccgtcccccgtgaggcgatggcaggggtcgggtacacagcttggccgaagctggcccttgggggaacggaatcccagccagcgccctggatcgaaggcctggaccgctctcgcctttcttctttcctttttccactttcccacttccctcctgggccccgcaccttccccctcggtttcctctacatccctcgcccgcctgccncctggcggcagcttctccatcgtagcctcgacgggggcgaggacctcggataggaccagcggccttagcggtggcagacctggtggtcggggaggccttaaccggcgtgaaccctgccgccgatttgggctcgagcttccgcttcttgcccatagcaacggcgacacggcgtgggaagacgggaattgcgtcgtgctagggtttcgatggagaggagattggg

SEQ ID NO: 6034 - DNA, 410 bp, Zea mays
  misc_feature (376)..(376): n is a, c, g, or t
  misc_feature (383)..(383): n is a, c, g, or t
  Probeset Number=SeqID_20437
aaaaaaaaaaaatccttaggtccctagccgtcgcgccgccgttcggcttcctaatctggcggcgccttccttcctcgccgctcatctcagttctcggcgcaaacgtggaaggcctcatccccggcggcggcggtttgtgctccagcctccagcgagcaagacttagagcactcggagggatcccacgccgctgggccaggcaagggcactggacgcgggcgtctgaaagaagccggctaggaggaccacgagtccacggctgggcagtggccgggcgctgcgcctgcgctgggcgtgtgggcggcccgtggtggggctggcctcggcccccggggtcgctagcggccggctgctgagaaccgtgaaccaataattnggcaacnagacgcccctgacccctgtggacggct

SEQ ID NO: 6035 - DNA, 497 bp, Zea mays
  misc_feature (178)..(178): n is a, c, g, or t
  misc_feature (272)..(272): n is a, c, g, or t
  misc_feature (375)..(375): n is a, c, g, or t
  misc_feature (418)..(418): n is a, c, g, or t
  misc_feature (424)..(424): n is a, c, g, or t
  misc_feature (476)..(476): n is a, c, g, or t
  misc_feature (490)..(490): n is a, c, g, or t
  Peptide Sequence Number=SeqID_11538
  Probeset Number=SeqID_20438
gaactattcagggttccctttttgttcaaagaacaattctatcctggcaaatggtagttcactcgtaggctacttaatgatcgggactttatcctatcccacattatttgatgaacgttcatgctggttgagtgttctaagttctcactaccaaatagatagttaccagaggggtggncctactgattgcaggtctctaggtgggatatttgcatgggcacagaaggaacccgatctattcaaacctacaaacgaactttaactctcattgnggttgctcagggggttctaccttgaagcacataaacttatcccattttccaaaatgctagtatatgaaccatgatgaaaaatttgggatacttctggcttaanctgcactgggcactgggatatgttttggggacgtagggagggntacagnctggtgatagggctataactaacaacctttgaatttccctccgacccttggnttcctgcctcttanccatggg

SEQ ID NO: 6036 - DNA, 497 bp, Zea mays
  misc_feature (8)..(8): n is a, c, g, or t
  misc_feature (22)..(22): n is a, c, g, or t
  misc_feature (74)..(74): n is a, c, g, or t
  misc_feature (80)..(80): n is a, c, g, or t
  misc_feature (123)..(123): n is a, c, g, or t
  misc_feature (226)..(226): n is a, c, g, or t
  misc_feature (320)..(320): n is a, c, g, or t
  Probeset Number=SeqID_20439
cccatggntaagaggcaggaanccaagggtcggagggaaattcaaaggttgttagttatagccctatcaccagnctgtanccctccctacgtccccaaaacatatcccagtgcccagtgcagnttaagccagaagtatcccaaatttttcatcatggttcatatactagcattttggaaaatgggataagtttatgtgcttcaaggtagaaccccctgagcaaccncaatgagagttaaagttcgtttgtaggtttgaatagatcgggttccttctgtgcccatgcaaatatcccacctagagacctgcaatcagtaggnccacccctctggtaactatctatttggtagtgagaacttagaacactcaaccagcatgaacgttcatcaaataatgtgggataggataaagtcccgatcattaagtagcctacgagtgaactaccatttgccaggatagaattgttctttgaacaaaaagggaaccctgaatagttc

SEQ ID NO: 6037 - DNA, 511 bp, Zea mays
  misc_feature (25)..(25): n is a, c, g, or t
  misc_feature (33)..(33): n is a, c, g, or t
  misc_feature (37)..(37): n is a, c, g, or t
  misc_feature (60)..(60): n is a, c, g, or t
  misc_feature (65)..(65): n is a, c, g, or t
  misc_feature (67)..(67): n is a, c, g, or t
  misc_feature (82)..(82): n is a, c, g, or t
  misc_feature (166)..(166): n is a, c, g, or t
  misc_feature (200)..(200): n is a, c, g, or t
  misc_feature (277)..(277): n is a, c, g, or t
  misc_feature (283)..(283): n is a, c, g, or t
  misc_feature (316)..(316): n is a, c, g, or t
  misc_feature (319)..(319): n is a, c, g, or t
  misc_feature (321)..(321): n is a, c, g, or t
  misc_feature (328)..(328): n is a, c, g, or t
  misc_feature (391)..(391): n is a, c, g, or t
  misc_feature (473)..(473): n is a, c, g, or t
  misc_feature (475)..(475): n is a, c, g, or t
  misc_feature (478)..(478): n is a, c, g, or t
  Peptide Sequence Number=SeqID_11539
  Probeset Number=SeqID_20440
ttttttttttttttttgaaactcanagcgggtnttgngaatattaacaagcaggatccanttgtnanattccaacatactcnacttgataactctgctaggttagactcaggggactactgttaaggatatataccaggtgtacccaagaggtttccataatgaanatgttggcctatgggccaggtccggggaatccanacttggtcgagggagtcatactcggatattagggtactcgacgcacatgtcaaaacagaatccacctgtgcgggtcnttgacnaactccatggcggcaccgtagtagtcggcgtanatnancttcacnccggggtgctgcgccctgagccggtcgacctcgccgcgcagcgcccggttgtgcctctggganaagtcgttgaaccaccggaggcacccgtgctcgtcgtagtccgcgcggttgccgctcctgtacccgctcaggtatgtcggtncncanccgatagggaagttgttcgggatcaggatcgcc

SEQ ID NO: 6038 - DNA, 1031 bp, Zea mays
  misc_feature (14)..(14): n is a, c, g, or t
  misc_feature (38)..(38): n is a, c, g, or t
  misc_feature (47)..(47): n is a, c, g, or t
  misc_feature (52)..(52): n is a, c, g, or t
  misc_feature (57)..(57): n is a, c, g, or t
  misc_feature (59)..(59): n is a, c, g, or t
  misc_feature (1030)..(1031): n is a, c, g, or t
  Peptide Sequence Number=SeqID_11540
  Probeset Number=SeqID_20441
tccaggggtttttnccatcttcaaagggggggctgagnttttccctncccanaaaangnagaacatcctaatcgaaaaaccacggcgacccctatgccgctgcggggcctcacgccgcggcttcactgtccacaccgtcatcgccattgcctcggtctcggactccgcctccgaccccaccgcggccgcggaggcgacgtccccatctccgcccccctcgctgccaacgcaaacgccttcctctaaaccaggacccccggctttgggcggcatcgcgaacacgaggtcttggtcgcagtactacggcagcggcttctccatccgcgtgcctccgtccttcgacgacatcctcgagcccgatgactacaacgccaggatgacatactacggtgacaaggccaagccccgggcgtacgcggcccgctttgcatctccagataggtagggatgagctcatcagtgtggtgattaagccgtcaaatcagctcaaaatcacattcctagaggcaaaagatataactgatttgggaaatctaaaagaggcatccaagatatttgtaccagctggtgcaaaaatattctcagctcgaacaattaaagttaaggaagaggaggatattaggacatattacttctatgaattcagtctggacaagcaacacgttgctctgatggctaccgtgaatagtgggaagacgtacattgccggcgctaccgctccagaaatgaaatggggtgatgatggcgtgaagttacgttcggctgccgtatctctatcgatttcatgatttattgtgcaaaatataacaactaaaaaaatgtgatacaactctcggattcagcggtacgcatagagggatctattactgttctagtcattgaaagaaggtaaatagttgggttagtcgacaaaagcgacaaaagcactggatgagactgcaaggtttcagtcaagtctgtaaacaattttggaagtggatatgtattgttatgaagactgcatcatgattgaaattttataattgagttnn

SEQ ID NO: 6039 - DNA, 309 bp, Zea mays
  Peptide Sequence Number=SeqID_11541
  Probeset Number=SeqID_20442
ataacaaggagtcctttatcattattcttattatcttagtgtaaatattattatatattattaggggcgtttacagcgtagcaagttcactcttgcaagctagggacttttacaagagcatgtagctagttagtagttcatttggagtgtgaacatgtcttatttgcacacttgcttttttcccccccccgttattttctccatcttcagggatggctattagctcctttgcatgcgttcatggaattgtggtgcagtcgaagttgagggtgagcgggaacggcagcggcgcgccgcactgcgcgggga

SEQ ID NO: 6040 - DNA, 218 bp, Zea mays
  Probeset Number=SeqID_20443
taccgggaggttcttgctcaagtcgtctcagaaaactagtgtcaacaaaaagtcaaaaactaacccatgatagagagtagtagatgattaggattagcgtccggagaactagggccgtgtgaatctagcatccgatcggtcgggcctcaagtccctgctaccgctgcctcaagtcccaatttgtatagtgcaattaatttatatgagtttccttaatt

SEQ ID NO: 6041 - DNA, 218 bp, Zea mays
  Peptide Sequence Number=SeqID_11542
  Probeset Number=SeqID_20444
aattaaggaaactcatataaattaattgcactatacaaattgggacttgaggcagcggtagcagggacttgaggcccgaccgatcggatgctagattcacacggccctagttctccggacgctaatcctaatcatctactactctctatcatgggttagtttttgactttttgttgacactagttttctgagacgacttgagcaagaacctcccggta

SEQ ID NO: 6042 - DNA, 1222 bp, Zea mays
  misc_feature (1)..(1): n is a, c, g, or t
  misc_feature (4)..(5): n is a, c, g, or t
  misc_feature (11)..(13): n is a, c, g, or t
  misc_feature (22)..(28): n is a, c, g, or t
  misc_feature (30)..(30): n is a, c, g, or t
  misc_feature (68)..(71): n is a, c, g, or t
  misc_feature (119)..(122): n is a, c, g, or t
  misc_feature (597)..(602): n is a, c, g, or t
  misc_feature (641)..(644): n is a, c, g, or t
  misc_feature (675)..(683): n is a, c, g, or t
  misc_feature (694)..(698): n is a, c, g, or t
  misc_feature (708)..(709): n is a, c, g, or t
  misc_feature (729)..(737): n is a, c, g, or t
  misc_feature (740)..(740): n is a, c, g, or t
  misc_feature (742)..(753): n is a, c, g, or t
  misc_feature (766)..(769): n is a, c, g, or t
  misc_feature (778)..(784): n is a, c, g, or t
  misc_feature (786)..(791): n is a, c, g, or t
  misc_feature (793)..(795): n is a, c, g, or t
  misc_feature (798)..(800): n is a, c, g, or t
  misc_feature (803)..(807): n is a, c, g, or t
  misc_feature (823)..(829): n is a, c, g, or t
  misc_feature (831)..(833): n is a, c, g, or t
  misc_feature (838)..(840): n is a, c, g, or t
  misc_feature (843)..(844): n is a, c, g, or t
  misc_feature (849)..(855): n is a, c, g, or t
  misc_feature (861)..(872): n is a, c, g, or t
  misc_feature (874)..(884): n is a, c, g, or t
  misc_feature (889)..(901): n is a, c, g, or t
  misc_feature (911)..(911): n is a, c, g, or t
  misc_feature (913)..(915): n is a, c, g, or t
  misc_feature (917)..(917): n is a, c, g, or t
  misc_feature (919)..(922): n is a, c, g, or t
  misc_feature (1222)..(1222): n is a, c, g, or t
  Peptide Sequence Number=SeqID_11543
  Probeset Number=SeqID_20445
ncgnncgggannnttgctcctnnnnnnncnaggaaatagccttgatatgttttgtttgattgtctttnnnnttaagataacatttttatattattttattgttaactatggtttatagnnnnattttatccactgtataaaatgaataactagctgcgctttttgcaggtaccattcagagtcaggttggcatacattggtagaagttattctcgagcattacggttttgaagctgatgaagcggcggtcacattttttgtttgtctggttccagttgctttggatgtgtacataaaattttgggtatgcctttttcatctaattaaacaatagcttctaaaagttaagtaacataacatagcttttttaaaaggaacctcttttttccccctgtcctacggtcctacctcaccattttatatgttctcaatacacattttagcaactccaatactactattttaatcaccttttatagaggagtaacttgcaactttcttttttgttggagacaaaattcaattttctattgactgcctgattttatggatctaaaacattgttcagtgttcctggtattatcagtttatatgaannnnnnagttcacattgtaacctgaataaggtcgagatacttagnnnnttttcatatgttgcaggtatacaaatacctnnnnnnnnnatcacccagtnnnnncaacgttctnnatgaaataaagcgtcattannnnnnnnntgncnnnnnnnnnnnnaggaactgcagcnnnnatttctcgnnnnnnngnnnnnnannngcnnngcnnnnnaagttttaaaaagcannnnnnntnnnggaannnaanngcatnnnnnnnatgtcnnnnnnnnnnnnannnnnnnnnnnaggcnnnnnnnnnnnnntgggaatttngnnnantnnnntaatggtagtccttattctaaaagaaaggttccattactcggaatcaacgtcaggcaaaaatctcttctctcttatttacatggggttatctacttgtaaaataagaaatcgaatgattttgcgcgaaatgagacagccgtgctgacggacgtctgttctgacccacaagcaattgtttttcctttgcttttgagatctgaactgacggttagcttcacgtttcaaatttgcttcgctaaaaaaagatagacccagtgttagcggcttccacataaatgaggtctagtgaaggaataatn

SEQ ID NO: 6043 - DNA, 1138 bp, Zea mays
  misc_feature (1)..(8): n is a, c, g, or t
  misc_feature (767)..(772): n is a, c, g, or t
  misc_feature (775)..(778): n is a, c, g, or t
  misc_feature (780)..(790): n is a, c, g, or t
  misc_feature (792)..(792): n is a, c, g, or t
  misc_feature (794)..(794): n is a, c, g, or t
  misc_feature (803)..(807): n is a, c, g, or t
  misc_feature (812)..(817): n is a, c, g, or t
  misc_feature (830)..(831): n is a, c, g, or t
  misc_feature (853)..(854): n is a, c, g, or t
  misc_feature (859)..(861): n is a, c, g, or t
  misc_feature (865)..(865): n is a, c, g, or t
  misc_feature (867)..(867): n is a, c, g, or t
  misc_feature (875)..(880): n is a, c, g, or t
  misc_feature (886)..(888): n is a, c, g, or t
  misc_feature (904)..(907): n is a, c, g, or t
  misc_feature (913)..(919): n is a, c, g, or t
  misc_feature (921)..(927): n is a, c, g, or t
  misc_feature (930)..(937): n is a, c, g, or t
  misc_feature (941)..(946): n is a, c, g, or t
  misc_feature (949)..(950): n is a, c, g, or t
  misc_feature (959)..(960): n is a, c, g, or t
  misc_feature (972)..(974): n is a, c, g, or t
  misc_feature (977)..(977): n is a, c, g, or t
  misc_feature (979)..(982): n is a, c, g, or t
  misc_feature (986)..(991): n is a, c, g, or t
  misc_feature (994)..(1002): n is a, c, g, or t
  misc_feature (1005)..(1015): n is a, c, g, or t
  misc_feature (1018)..(1022): n is a, c, g, or t
  misc_feature (1028)..(1035): n is a, c, g, or t
  misc_feature (1038)..(1040): n is a, c, g, or t
  misc_feature (1048)..(1049): n is a, c, g, or t
  misc_feature (1053)..(1056): n is a, c, g, or t
  misc_feature (1058)..(1060): n is a, c, g, or t
  misc_feature (1062)..(1068): n is a, c, g, or t
  misc_feature (1078)..(1078): n is a, c, g, or t
  misc_feature (1080)..(1081): n is a, c, g, or t
  misc_feature (1083)..(1087): n is a, c, g, or t
  misc_feature (1090)..(1090): n is a, c, g, or t
  misc_feature (1092)..(1094): n is a, c, g, or t
  misc_feature (1102)..(1112): n is a, c, g, or t
  misc_feature (1120)..(1132): n is a, c, g, or t
  misc_feature (1135)..(1138): n is a, c, g, or t
  Peptide Sequence Number=SeqID_11544
  Probeset Number=SeqID_20446
nnnnnnnncttggaactgagatgcctagacaacagttcatgcttcacttcttttagacttgctcatgagtcatgctgcccatacatctcatccagtatttcattatattgtcaacgaaacatgctagagttatatagtcctctgagaactggcgtgcactagatctctgtcgccaaagcagggctggtgaagaagttgtgtttccctcccggattgtcactgcttttatatttgtgtttctacctaggttcgaatggaaatgtcatactggattttgattactatatgcaaagtgcaatatacatcttatggaaggtctcaaaaaccgttcaatatgtatctaagctgctttgtttccattcaagtactccaatcaatacatgcatctatattttcccataattaagatgtgagctatcctacttgtcaccctaggttcctaactacctgctttgggctttgctattcattttgcagcttaaccattgtgtttctggcctttgatgtgtttttgctgtgttttgtgttgttgtgtcctgtttcattggaattgcactgtgttgctgcttgccttgtgtcgttgctattctgtatgctctggctggccagctgggagcatcggatgccgatctcaagataagtagaagaatctgaactctaacctaatgttcttacagaatttttaattcctttcatgtttaggagtgatctgagtgcatcagatgcccatattagcgttcttccgagatatagatatttctgatctnnnnnnacnnnnannnnnnnnnnnanancatggcatnnnnnttctnnnnnnttatatttccatnntttcaggacagggtccttttcnnacagnnntaanangcgcaagnnnnnnctcacnnnactgtggattacctannnnactggnnnnnnngnnnnnnnacnnnnnnnnactnnnnnnttnnctaccaaanngacttgatcatnnnatntnnnncaannnnnnggnnnnnnnnncgnnnnnnnnnnnaannnnntggatnnnnnnnnacnnngctatttnnctgnnnncnnntnnnnnnngaacattgcnannannnnnacntnnnctgatgcnnnnnnnnnnnatttatcnnnnnnnnnnnnntcnnnn

SEQ ID NO: 6044 - DNA, 474 bp, Zea mays
  Peptide Sequence Number=SeqID_11545
  Probeset Number=SeqID_20447
ggagccgagtgtgtttcttacgttagacacaacctgcccattctcgaacagcactttcttcttcagatacagacatccaaactgaggtggagagcaccgtctattcctacacctcgacgatcacggtgcctgcttccaagcgcttccttcgaggtgcagagggattgaaatttgatttcttcctcattcttactattcagttcaagctcatttgcgctacggtgtgtatatcgaatgattcgaatctaaaatgtgttttctttttccctctatatttagtctaggtattgtagttccgacttgccgtttcagattttttcttatacatttctctctgttaagaactacgtcaccacggatcactagatccgcttcctttccttccggcagcagattagacacgagaatatgtgaaagactcgtatcccttcccagaaacacgacacacgatacatgatgtaaggttggacctct

SEQ ID NO: 6045 - DNA, 474 bp, Zea mays
  Probeset Number=SeqID_20448
agaggtccaaccttacatcatgtatcgtgtgtcgtgtttctgggaagggatacgagtctttcacatattctcgtgtctaatctgctgccggaaggaaaggaagcggatctagtgatccgtggtgacgtagttcttaacagagagaaatgtataagaaaaaatctgaaacggcaagtcggaactacaatacctagactaaatatagagggaaaaagaaaacacattttagattcgaatcattcgatatacacaccgtagcgcaaatgagcttgaactgaatagtaagaatgaggaagaaatcaaatttcaatccctctgcacctcgaaggaagcgcttggaagcaggcaccgtgatcgtcgaggtgtaggaatagacggtgctctccacctcagtttggatgtctgtatctgaagaagaaagtgctgttcgagaatgggcaggttgtgtctaacgtaagaaacacactcggctcc

SEQ ID NO: 6046 - DNA, 473 bp, Zea mays
  misc_feature (18)..(18): n is a, c, g, or t
  misc_feature (23)..(23): n is a, c, g, or t
  misc_feature (37)..(37): n is a, c, g, or t
  misc_feature (48)..(49): n is a, c, g, or t
  misc_feature (57)..(57): n is a, c, g, or t
  misc_feature (59)..(59): n is a, c, g, or t
  misc_feature (63)..(63): n is a, c, g, or t
  misc_feature (66)..(67): n is a, c, g, or t
  misc_feature (69)..(69): n is a, c, g, or t
  misc_feature (75)..(75): n is a, c, g, or t
  misc_feature (78)..(78): n is a, c, g, or t
  misc_feature (80)..(81): n is a, c, g, or t
  misc_feature (94)..(95): n is a, c, g, or t
  misc_feature (140)..(140): n is a, c, g, or t
  misc_feature (151)..(151): n is a, c, g, or t
  misc_feature (159)..(160): n is a, c, g, or t
  misc_feature (163)..(163): n is a, c, g, or t
  misc_feature (168)..(170): n is a, c, g, or t
  misc_feature (185)..(185): n is a, c, g, or t
  misc_feature (192)..(192): n is a, c, g, or t
  misc_feature (198)..(198): n is a, c, g, or t
  misc_feature (201)..(201): n is a, c, g, or t
  misc_feature (212)..(213): n is a, c, g, or t
  misc_feature (217)..(217): n is a, c, g, or t
  misc_feature (222)..(223): n is a, c, g, or t
  misc_feature (227)..(227): n is a, c, g, or t
  misc_feature (230)..(230): n is a, c, g, or t
  misc_feature (232)..(232): n is a, c, g, or t
  misc_feature (234)..(234): n is a, c, g, or t
  misc_feature (239)..(239): n is a, c, g, or t
  misc_feature (243)..(243): n is a, c, g, or t
  misc_feature (247)..(248): n is a, c, g, or t
  misc_feature (250)..(251): n is a, c, g, or t
  misc_feature (253)..(253): n is a, c, g, or t
  misc_feature (259)..(259): n is a, c, g, or t
  misc_feature (261)..(261): n is a, c, g, or t
  misc_feature (266)..(266): n is a, c, g, or t
  misc_feature (279)..(280): n is a, c, g, or t
  misc_feature (283)..(284): n is a, c, g, or t
  misc_feature (309)..(309): n is a, c, g, or t
  misc_feature (321)..(321): n is a, c, g, or t
  misc_feature (323)..(323): n is a, c, g, or t
  misc_feature (326)..(326): n is a, c, g, or t
  misc_feature (329)..(329): n is a, c, g, or t
  misc_feature (333)..(334): n is a, c, g, or t
  misc_feature (345)..(345): n is a, c, g, or t
  misc_feature (350)..(350): n is a, c, g, or t
  misc_feature (354)..(358): n is a, c, g, or t
  misc_feature (364)..(364): n is a, c, g, or t
  misc_feature (378)..(378): n is a, c, g, or t
  misc_feature (383)..(383): n is a, c, g, or t
  misc_feature (389)..(389): n is a, c, g, or t
  misc_feature (432)..(432): n is a, c, g, or t
  Peptide Sequence Number=SeqID_11546
  Probeset Number=SeqID_20449
gagagagagagagagatngctanttaccccccccccncgatccattgnnacattccncncatntcnncntgtccnatntnnatgtccgcttccnntcgataagattcaacgctgtacgagagattgttccccttacgcantgtggctggcngatagttnnatngggannngtgcgatagtgagtnacaattntagacnacncctctctgacnngaangccanngatnatncncnccganattnagcnnanntnatgganangatgnctgatcgccatcnnggnnctgtgatgaatcagagtgagccgtntgtctagcctcnangantcnccanntgttcgacaanccaangaannnnntcctgntgataagacagganatcgntcatcncccaacagcaaaggtaggcgaagcccattgaggaggatgttanatccaatattaaagccaagacattctagtccaatacgacct

SEQ ID NO: 6047 - DNA, 315 bp, Zea mays
  Peptide Sequence Number=SeqID_11547
  Probeset Number=SeqID_20450
gggggggggtaatccagtgcttaacacaggataaacagctgagaaatcaaagggagtaatttattgatagagtgagttggtccgtgctgtcagtgtgctgcgcagatcgtgtaacattacttcgtgagttcgaaaggcgtgtgacaattttgtttgcaaaagtgcgatgggcaggctaactgagccagtcttcttcccagttggttgatctgattgttgacagttgagttagctgaacgctttgtatgattgtgtcgtcacttgcgaaggtactcgaatgtttgacgtttctgtttccgtctgtttggcataacg

SEQ ID NO: 6048 - DNA, 315 bp, Zea mays
  Probeset Number=SeqID_20451
cgttatgccaaacagacggaaacagaaacgtcaaacattcgagtaccttcgcaagtgacgacacaatcatacaaagcgttcagctaactcaactgtcaacaatcagatcaaccaactgggaagaagactggctcagttagcctgcccatcgcacttttgcaaacaaaattgtcacacgcctttcgaactcacgaagtaatgttacacgatctgcgcagcacactgacagcacggaccaactcactctatcaataaattactccctttgatttctcagctgtttatcctgtgttaagcactggattaccccccccc

SEQ ID NO: 6049 - DNA, 434 bp, Zea mays
  Peptide Sequence Number=SeqID_11548
  Probeset Number=SeqID_20452
gagcttcaaaacgatcgagtcactacctcaacatgtctgggcgaggaaaaggaggaaaaggtctgggaaaaggtggtgctaaacgtcaccgaaagatcctccgtgataacatccaaggaatcaccaaaccagccatcagaagaccagcaagaagaggaggtgtcaaacgtatctccggtcttatctacgaagaaaccagaaccgtcttaaaatccttccttgaaggtgtcatcagagacgctgttacctacaccgaacatgccaagagaaagaccgtcacttcccttgatgttgtttacgccctgaagagacaaggaagaaccctttatggtttcggtggttaatttcccgctgcccccctgtagtttgggcttcagcctcccacctccaccacccagcttcccccccacacccaataaacagtcaataccact

SEQ ID NO: 6050 - DNA, 275 bp, Zea mays
  Peptide Sequence Number=SeqID_11549
  Probeset Number=SeqID_20453
gggactgaaaagcaacaagcaacacgcaaatcgtgatgactatttcagataggattgttggatttggattgctggtggtgacccttgccgtatttacttattacacaatttgggttattggtacgccattcatcgagcctcatcattttattcaccagtactttcttccgcgtgaatatgccatcagtattccattgagtgcactcgtagttgcattatcttgtgtcttctcatttatttcatgggtgatgataaaaagcagataacagtcatat

SEQ ID NO: 6051 - DNA, 275 bp, Zea mays
  Peptide Sequence Number=SeqID_11550
  Probeset Number=SeqID_20454
atatgactgttatctgctttttatcatcacccatgaaataaatgagaagacacaagataatgcaactacgagtgcactcaatggaatactgatggcatattcacgcggaagaaagtactggtgaataaaatgatgaggctcgatgaatggcgtaccaataacccaaattgtgtaataagtaaatacggcaagggtcaccaccagcaatccaaatccaacaatcctatctgaaatagtcatcacgatttgcgtgttgcttgttgcttttcagtccc

SEQ ID NO: 6052 - DNA, 633 bp, Zea mays
  misc_feature (178)..(178): n is a, c, g, or t
  Peptide Sequence Number=SeqID_11551
  Probeset Number=SeqID_20455
ggcttattacaacttaccaagagatgggtcgtgtaaaacatcaaaattcacgtcgaaattattatcaaaataaaaatggaaataatttcaattctaattcttcgaataatatgattcaaataggacaacatggattttttgttacatttacatcaacaaaagaatcatttgttcgaanaatggaaatttataatttattaaatcgttttgctgatcaattatttggtgcagaatttactgaagaaaaacaacttgatacaactgatcttaatgatttagattcagcattagaaaatgaaacaatgaaattaaacgcctcgaaaaaaaacatccgtcgttttcgaattaattaaatctggtacttcaaacacttcactcttttgttacacacaacattatcactctacgtctatcaatcaatttaattgaatctatatttcaaactagtattgattcaaaagaacaacatagtcgttatattgaacgtttattaccaattgcattcgtatgtaaagcttatgatgatgatttaagaaaattaattattaaaaaagaatttctcgatcaaatcttatcagttattaatgcaaatgataatcaaacggataatataatttggtttgatgtacaagc

SEQ ID NO: 6053 - DNA, 633 bp, Zea mays
  misc_feature (456)..(456): n is a, c, g, or t
  Peptide Sequence Number=SeqID_11552
  Probeset Number=SeqID_20456
gcttgtacatcaaaccaaattatattatccgtttgattatcatttgcattaataactgataagatttgatcgagaaattcttttttaataattaattttcttaaatcatcatcataagctttacatacgaatgcaattggtaataaacgttcaatataacgactatgttgttcttttgaatcaatactagtttgaaatatagattcaattaaattgattgatagacgtagagtgataatgttgtgtgtaacaaaagagtgaagtgtttgaagtaccagatttaattaattcgaaaacgacggatgttttttttcgaggcgtttaatttcattgtttcattttctaatgctgaatctaaatcattaagatcagttgtatcaagttgtttttcttcagtaaattctgcaccaaataattgatcagcaaaacgatttaataaattataaatttccattnttcgaacaaatgattcttttgttgatgtaaatgtaacaaaaaatccatgttgtcctatttgaatcatattattcgaagaattagaattgaaattatttccatttttattttgataataatttcgacgtgaattttgatgttttacacgacccatctcttggtaagttgtaataagcc

SEQ ID NO: 6054 - DNA, 753 bp, Zea mays
  misc_feature (601)..(753): n is a, c, g, or t
  Peptide Sequence Number=SeqID_11553
  Probeset Number=SeqID_20457
aaaagagaaaaaaggaattctgtttcgggaccaagcaaaactggatgctgctcgtgccgaattcggcacgagttccaaacaactcttctcgccatttcaccaccgcctcgccgccccccatcctccccccctcccgtcgcgccagtcaacagcctgtctgcctcttccctcgccacccatggccaccgtagcgcgcacccctcgtcgccgcatgcccggcacgctctctcctccgcctccggtctcggcgcctcccgtcctcctcttccatccgtcccgcccggcaacgtgccggcgtcgggtctgtccgctgcatgggctcggcgaccggattccctcctattcccccgctgcgttccggggaaggggggggggccgggcaccgactgaaatgggcccccgctgttcccctgggtgcaaattacgagcactgggctcatcggcatggaacaaaaccggggggggggagggggccacccaaggaagcaaaatggattgattggctaaatcccagaaccctttggcccaggtggttaagggaagggaaaaaggaaggccaaaaaaaaaaagaaaataacaatgggggcccctggaaaagggnnnnnnnnnnnnnnnnnnnnnnnnnnnnnnnnnnnnnnnnnnnnnnnnnnnnnnnnnnnnnnnnnnnnnnnnnnnnnnnnnnnnnnnnnnnnnnnnnnnnnnnnnnnnnnnnnnnnnnnnnnnnnnnnnnnnnnnnnnnnnnnnnnnnnnnnn

SEQ ID NO: 6055 - DNA, 753 bp, Zea mays
  misc_feature (1)..(65): n is a, c, g, or t
  misc_feature (666)..(753): n is a, c, g, or t
  Probeset Number=SeqID_20458
nnnnnnnnnnnnnnnnnnnnnnnnnnnnnnnnnnnnnnnnnnnnnnnnnnnnnnnnnnnnnnnnnccccctgggagagccccctccggagcttttgtttgggggggtttttttccctcaaaatttcgcccccgccggaatccccaaaaataaccccttttccaggggcccccattgttattttctttttttttttggccttcctttttcccttcccttaaccacctgggccaaagggttctgggatttagccaatcaatccattttgcttccttgggtggccccctccccccccccggttttgttccatgccgatgagcccagtgctcgtaatttgcacccaggggaacagcgggggcccatttcagtcggtgcccggccccccccccttccccggaacgcagcgggggaataggagggaatccggtcgccgagcccatgcagcggacagacccgacgccggcacgttgccgggcgggacggatggaagaggaggacgggaggcgccgagaccggaggcggaggagagagcgtgccgggcatgcggcgacgaggggtgcgcgctacggtggccatgggtggcgagggaagaggcagacaggctgttgactggcgcgacgggagggggggaggatggggggcggcgaggcggtggtgaaatggcgannnnnnnnnnnnnnnnnnnnnnnnnnnnnnnnnnnnnnnnnnnnnnnnnnnnnnnnnnnnnnnnnnnnnnnnnnnnnnnnnnnnnnnn

SEQ ID NO: 6056 - DNA, 409 bp, Zea mays
  misc_feature (181)..(181): n is a, c, g, or t
  misc_feature (183)..(183): n is a, c, g, or t
  Peptide Sequence Number=SeqID_11554
  Probeset Number=SeqID_20459
ggagcaccgagagcactctcgccgaagccacacagagaaaagagaaagatagagagagagacggggaagaagtatacaccgtcgtaaggcattcacagagggtttggaagaatttgttgaaccgcaccgcgtgtattcgaggagctgaggaagaaagaagagccagtggctgaggatcccncnggtggttcagcggatagaagttgatgagcaggaactcgttgaaggtcaagaacaggtaccgtaggatgaggtgcatgaaggatgctgcgatgcggtcgtgagaggtctaggtcgtcgtctcccagtcaactttgggttgctggatcgttgtctccttatgatgtaattatttatttattttgtacagaactcctattatatagtaaagttgtaacattcgttctac

SEQ ID NO: 6057 - DNA, 1004 bp, Zea mays
  misc_feature (1)..(1): n is a, c, g, or t
  misc_feature (945)..(1004): n is a, c, g, or t
  Probeset Number=SeqID_20460
ncggccgggaaaaaccctgacgttaaaaaaaaaaaagttgtcccaaacaagcgtcaatctacagctcacgcccgcgaccaccgcccaatccaccaatttccctacagtcgcaacaatggacgcctccaagcagcccgtcaagctcgtcaaggtcacccgagtcctcggccgaaccggttctcgtggtggtgtcacccaggtccgcgttgagttcatggacgaccagacccgatccatcatccgaaacgtcaagggcccagtccgtgaggacgacatcctttgcctcctcgagtccgagcgtgaggcccgacgactacgataaatgtgcattctggggagcatggggttcttggaagacggtcaacgacggatggtctatgcatgctgaggcgtgcgcgccttgtattgggacattgacctggagctgcacattacccttttggcactccagtttcatttgttagaggaggcacacggacgggtctgggataacgaaaaattccagaacagttcttcttctgcaaaaaaaaaaaaaaaaaacccgcggccgcgggttttttttttttttttttgctaaacatttcagaataattcggcatgccaaaccaaaaaaaggactgcggatattcaaacaagatttcagaaaacgctttaactgtttgataactgaccgatgctaaactcgccataagttaaagaaaagacctcttaataataagactcatacttcagatgtttgctgaaacagcaaaacattatcttctttgctgcaagaagactatacactagatatcctatgaaccatgatattttaacaatatcttctgaagaccaggagcagacaccagccaccccgtggtagatctactcttccttgaggcgcttctcggtctcttccaaagccttaatatccttgttcaattttacaatacgataaatgcaccnnnnnnnnnnnnnnnnnnnnnnnnnnnnnnnnnnnnnnnnnnnnnnnnnnnnnnnnnnnn

SEQ ID NO: 6058 - DNA, 901 bp, Zea mays
  Peptide Sequence Number=SeqID_11555
  Probeset Number=SeqID_20461
gataaatgtggggaactagcctcgctaggaaaaccccattgttgagttacggtgcggacaccgattcctcgttgatcagcggccgacctcctggtaggctgccttcaagtccaaccaagctctcttcttggcggcgacttgatcgagggtggcgacatagggattcccgtcgggatcacagagtgggcggccagattgttgagaaagttcatgaagaaccaaatcaaagtaaatcgggtgaccggttctgagccagtaatcaatcttccaacgagcactcatggatttggctttaatgccaaaaccagcgcactcgtggaacattgtgttcttgtcaagcttactgaaacagatctccacgttgtcgtcaccttccaactgcccgcccaatgcgaccgaagaaatcggtacggttgtcttgggacgtgcttccgccaaacgcaatggtggaggcgcgtcctcattggttgggacaggcatggaaacagtcacctcctcattgttcaaaatgggacatggctgaaacatctcgtcgtacgagccaggttgcttgtaatcagccttcattggcggcgagttttgcacaacatcgcgaaacttgtcatgcaactctcgaactttgaatttcctgaaggttgtgtagcaattcctcctcttgctgcgcacgcgtttgaaaaacgccggttggtccgaactgaaagcagaactgtagtaaacgaataccaagtaagctgccacataatcgacataatcggcgaaatccgaccgtgcgggtggttcaagatggggaaggtttggctctaccggatgggagctgatatcggccatgttgaatggtgttgttgttgttgttgttgttgttgttgttgttggtgttggtgttggtgttggtgttgatatc

SEQ ID NO: 6059 - DNA, 901 bp, Zea mays
  Probeset Number=SeqID_20462
gatatcaacaccaacaccaacaccaacaccaacaacaacaacaacaacaacaacaacaacaacaccattcaacatggccgatatcagctcccatccggtagagccaaaccttccccatcttgaaccacccgcacggtcggatttcgccgattatgtcgattatgtggcagcttacttggtattcgtttactacagttctgctttcagttcggaccaaccggcgtttttcaaacgcgtgcgcagcaagaggaggaattgctacacaaccttcaggaaattcaaagttcgagagttgcatgacaagtttcgcgatgttgtgcaaaactcgccgccaatgaaggctgattacaagcaacctggctcgtacgacgagatgtttcagccatgtcccattttgaacaatgaggaggtgactgtttccatgcctgtcccaaccaatgaggacgcgcctccaccattgcgtttggcggaagcacgtcccaagacaaccgtaccgatttcttcggtcgcattgggcgggcagttggaaggtgacgacaacgtggagatctgtttcagtaagcttgacaagaacacaatgttccacgagtgcgctggttttggcattaaagccaaatccatgagtgctcgttggaagattgattactggctcagaaccggtcacccgatttactttgatttggttcttcatgaactttctcaacaatctggccgcccactctgtgatcccgacgggaatccctatgtcgccaccctcgatcaagtcgccgccaagaagagagcttggttggacttgaaggcagcctaccaggaggtcggccgctgatcaacgaggaatcggtgtccgcaccgtaactcaacaatggggttttcctagcgaggctagttccccacatttatc

SEQ ID NO: 6060 - DNA, 628 bp, Zea mays
  misc_feature (601)..(628): n is a, c, g, or t
  Peptide Sequence Number=SeqID_11556
  Probeset Number=SeqID_20463
ggggatacgcgggcgcccggcccccgtacccggggattcacatccaaatccaaacgaccgacacgaccaagaccaaccctagtgtggcggttcttttgactctggcgttcctgtggcggcgggcctcctccggcaagtcggcgccacctgcgctctgagctcaaagcctccaacctgcgaccacgatctcaggctccttcggcgaccccgcgacaaataccaacgcttgctgccctgctcctcctgctccaaagcctcagcagataccgtctaactctcaagaagcaagaaaaaaatgtaaggcctttgggaacaagtgaaaagaaaaccttaaaagctcaggcatatgcatctcagaagaccattgatagtctggaggtcgatggaaaaaaataacaacctccttcatcaactattaagcttcgattgaggccaagtgcctctatcttaagtctgatgacccctataggacctggaactttatggctgctatagtagctagttacaatccctctggatttgaagttataggatttttttcaattatgcttgatgcttaatactttgagttgaagttataggatttgcttttgatttaaannnnnnnnnnnnnnnnnnnnnnnnnnnn

SEQ ID NO: 6061 - DNA, 628 bp, Zea mays
  misc_feature (1)..(20): n is a, c, g, or t
  misc_feature (621)..(628): n is a, c, g, or t
  Probeset Number=SeqID_20464
nnnnnnnnnnnnnnnnnnnncctttagctttaaatcaaaagcaaatcctataacttcaactcaaagtattaagcatcaagcataattgaaaaaaatcctataacttcaaatccagagggattgtaactagctactatagcagccataaagttccaggtcctataggggtcatcagacttaagatagaggcacttggcctcaatcgaagcttaatagttgatgaaggaggttgttatttttttccatcgacctccagactatcaatggtcttctgagatgcatatgcctgagcttttaaggttttcttttcacttgttcccaaaggccttacatttttttcttgcttcttgagagttagacggtatctgctgaggctttggagcaggaggagcagggcagcaagcgttggtatttgtcgcggggtcgccgaaggagcctgagatcgtggtcgcaggttggaggctttgagctcagagcgcaggtggcgccgacttgccggaggaggcccgccgccacaggaacgccagagtcaaaagaaccgccacactagggttggtcttggtcgtgtcggtcgtttggatttggatgtgaatccccgggtacgggggccgggcgcccgcnnnnnnnn

SEQ ID NO: 6062 - DNA, 234 bp, Zea mays
  Peptide Sequence Number=SeqID_11557
  Probeset Number=SeqID_20465
acaagaaaatcacagcagtacagcaccagaaacagaaaggtagtagatcaaggaacgccagtgcggcgacaatgaccggcagtggaagcacgggcgccaatggcaagagccagagatccagggccaaggcaatgctgttcggtgtctgaatgaagtgttttcttcagtggttctgctcaaaaaaaaaaaaaaaaaaaaaaaaaaaaaaaaaaaaaaaaaaaaaaaaaaaaaaaa

SEQ ID NO: 6063 - DNA, 465 bp, Zea mays
  misc_feature (89)..(89): n is a, c, g, or t
  misc_feature (135)..(135): n is a, c, g, or t
  misc_feature (228)..(228): n is a, c, g, or t
  misc_feature (377)..(377): n is a, c, g, or t
  Probeset Number=SeqID_20466
cgacgactctggctcgggcgtcgcggcgtggcggacaagaagaacctcttcgtgggcgtgggaggcatgggcgacctcccgggctttancgccgtgggcggcgggtacggcggcggcttcggcaacaacggcggnggcgtcttcagcggcgtcacgggcccgctgggcgcgtcgggggcggcgtcggaggcgtcggcccgctgggcggcgtcggcgggttcgggcccntcggcggcggtggcggcggtatcccgttcggcggcttcgctggcggtggcacccccttcggcggctacggtggcgggggcgctggcggcgtcacgcttgagctggccctgggctgcggcaggtgcctgggtcgtgatttgagtgcagcnaccagcagcgtgcatggcgttcgcactattattctgcacagcaacgcatcaagccttctagaaccatctcgccgccgccacaccacaa

SEQ ID NO: 6064 - DNA, 512 bp, Zea mays
  misc_feature (463)..(463): n is a, c, g, or t
  misc_feature (466)..(466): n is a, c, g, or t
  Peptide Sequence Number=SeqID_11558
  Probeset Number=SeqID_20467
ggcggctgtatggcagatagtactatgtacgtgtagctggtgatctgtggcatgagatgagactatgagagtcctgcctgcgtacgtactgatcagtgatgcgaagtgaggttcgaagcgtttctttcagcacgtcgcgtcccgctcgcggctgatcaacagacggcagtggcatcgttaagattgacatcgctcatgatgtagttgaggtggttgtccaaaactgagttgataagcacaaggcgccccatggggttgaggacgcccgtctaccaacccgtcaggtatttatctaaagccgcctctagcacaccaacatttcaatttttcatacccgcatgtgcaggtatcatgatgatgttgttgtaactgtggtgttaatcagtaataaacgtgagaagtacatatgaacatgttgttgatggtggtacacgaggatgtaggactacttatattatattgntgngctcttctttcaccacgtctagtagtaacaatacatgatattgtat

SEQ ID NO: 6065 - DNA, 512 bp, Zea mays
  misc_feature (47)..(47): n is a, c, g, or t
  misc_feature (50)..(50): n is a, c, g, or t
  Peptide Sequence Number=SeqID_11559
  Probeset Number=SeqID_20468
atacaatatcatgtattgttactactagacgtggtgaaagaagagcncancaatataatataagtagtcctacatcctcgtgtaccaccatcaacaacatgttcatatgtacttctcacgtttattactgattaacaccacagttacaacaacatcatcatgatacctgcacatgcgggtatgaaaaattgaaatgttggtgtgctagaggcggctttagataaatacctgacgggttggtagacgggcgtcctcaaccccatggggcgccttgtgcttatcaactcagttttggacaaccacctcaactacatcatgagcgatgtcaatcttaacgatgccactgccgtctgttgatcagccgcgagcgggacgcgacgtgctgaaagaaacgcttcgaacctcacttcgcatcactgatcagtacgtacgcaggcaggactctcatagtctcatctcatgccacagatcaccagctacacgtacatagtactatctgccatacagccgcc

SEQ ID NO: 6066 - DNA, 800 bp, Zea mays
  misc_feature (800)..(800): n is a, c, g, or t
  Peptide Sequence Number=SeqID_11560
  Probeset Number=SeqID_20469
gggtgaaattggaaatgtttattagaaagaaagatcataagtatttctgcacacgctatttgggtaaccaaaatcgacatattatcgatgacttcctccaactgacctacagaacttgatgatatatttcttcctgcaagaaccatagtctgctgcaactgataccaacttcaagcagaatctccacttccaagtcaaaaatcatcaccaacatttcctttacaagtcataaaacagcccaatattgtctgcattattaagcctcagaggtgcacagcttgccattcaaatccaaaaagcaatttattttacccgcaatttccatgcagctggaaaaagaatgaatatcatacaataaagacttgaaagttgaatttgacgtagatgctacaacaaatattgcaaagcaacattttagcctgtgcatccctcaaatcatttgcttataaaatctattctggataagttgtctcgacttgaatatttttaccttcaaacatcgtgagaagaccaaaccttaatctcaaggaatggttctgtgataataagcattatgtggcaaaaatatcgagcttcttgcatatggtatatagtaatataccatcccacacaatgtttcaaagatcctggtttcttatccaaggataaacaggttcatcctcataaaaggaagataacaaagcaacctctcctttgctgcgaaaatactgtctcaactcttcatcagaaatattttcatccgacttaaagacatgtagatctagcatagcattatagtgaccatcttcaatttgtttctn

SEQ ID NO: 6067 - DNA, 800 bp, Zea mays
  misc_feature (1)..(1): n is a, c, g, or t
  Probeset Number=SeqID_20470
nagaaacaaattgaagatggtcactataatgctatgctagatctacatgtctttaagtcggatgaaaatatttctgatgaagagttgagacagtattttcgcagcaaaggagaggttgctttgttatcttccttttatgaggatgaacctgtttatccttggataagaaaccaggatctttgaaacattgtgtgggatggtatattactatataccatatgcaagaagctcgatatttttgccacataatgcttattatcacagaaccattccttgagattaaggtttggtcttctcacgatgtttgaaggtaaaaatattcaagtcgagacaacttatccagaatagattttataagcaaatgatttgagggatgcacaggctaaaatgttgctttgcaatatttgttgtagcatctacgtcaaattcaactttcaagtctttattgtatgatattcattctttttccagctgcatggaaattgcgggtaaaataaattgctttttggatttgaatggcaagctgtgcacctctgaggcttaataatgcagacaatattgggctgttttatgacttgtaaaggaaatgttggtgatgatttttgacttggaagtggagattctgcttgaagttggtatcagttgcagcagactatggttcttgcaggaagaaatatatcatcaagttctgtaggtcagttggaggaagtcatcgataatatgtcgattttggttacccaaatagcgtgtgcagaaatacttatgatctttctttctaataaacatttccaatttcaccc

SEQ ID NO: 6068 - DNA, 178 bp, Zea mays
  Peptide Sequence Number=SeqID_11561
  Probeset Number=SeqID_20471
ggtttttaatttggattgtagcaccggcgggccggatgtaggtaaactattgtgggtggtggtctaaaatatctagtaaccgacggttgccccgattcattttttttttttttttgtatattcggctccgccttctatttccgtttgataatatataatacggtggtggtacggtgcc

SEQ ID NO: 6069 - DNA, 660 bp, Zea mays
  misc_feature (1)..(33): n is a, c, g, or t
  misc_feature (35)..(35): n is a, c, g, or t
  misc_feature (37)..(37): n is a, c, g, or t
  misc_feature (39)..(44): n is a, c, g, or t
  misc_feature (52)..(52): n is a, c, g, or t
  misc_feature (55)..(73): n is a, c, g, or t
  misc_feature (75)..(91): n is a, c, g, or t
  misc_feature (95)..(95): n is a, c, g, or t
  misc_feature (97)..(105): n is a, c, g, or t
  misc_feature (107)..(107): n is a, c, g, or t
  misc_feature (113)..(117): n is a, c, g, or t
  misc_feature (119)..(124): n is a, c, g, or t
  misc_feature (127)..(137): n is a, c, g, or t
  misc_feature (143)..(148): n is a, c, g, or t
  Probeset Number=SeqID_20472
nnnnnnnnnnnnnnnnnnnnnnnnnnnnnnnnngngntnnnnnnaaaataantannnnnnnnnnnnnnnnnnngnnnnnnnnnnnnnnnnncaangnnnnnnnnnanacgacnnnnnannnnnntcnnnnnnnnnnnacagcnnnnnncatgcgaatcatacaacggtccaggtttccaaacggtacttggagacgacggggaagacctctcacgagcgagtcgcaggcgcggcggcgtgcctcatcctgtaagaaattttctttgcctccgacttcttcatgtggaaaccgtggtgctctcagtgtggattcctgcgaccctcgacagctcgacttatggattctaggggaactgtggcgtccttagcaaggtgctaaaaaaatcggcatggacgagatcctggtgcggcggtcctcatctctctccccttcggtgatggcgcaaagtgcatggtcccagctcgatctcgtggtagtagaggtggaggcgatctggatatttatgcatatgctccgtggaaaccggtgaccgttaagcggctgcgcggttgccggtgaggttgagcgacgcgcggagtcctcctagcttttctaacttcctaacgcggatggctggaggcggttgccgagtttatcccggccggacacgagcaacccac

SEQ ID NO: 6070 - DNA, 466 bp, Zea mays
  misc_feature (135)..(137): n is a, c, g, or t
  misc_feature (158)..(160): n is a, c, g, or t
  misc_feature (188)..(193): n is a, c, g, or t
  misc_feature (199)..(201): n is a, c, g, or t
  misc_feature (216)..(218): n is a, c, g, or t
  Peptide Sequence Number=SeqID_11562
  Probeset Number=SeqID_20473
caccgcctgagccaaatctccgccccctccaccgtgctgtctccgtgcatcgcccgcagtcgcttgcatcgccgccttctccatctcctaccccgccatatagaccccatgccttcttcctgcctccacggaccnnngtcacaccatgaatgcgaagnnntcttcgccatcgaggcctccgtcttcannnnnnaaaagnnntccctggccttgagnnnaatggaggaggcggaggcatcaagcagcagtacgacttctggctaattgagcccatcaggtttagtggtgccggtagagacgacgccgtcgtcgtcgtcccactcaagaacatgggggggatatcaagaggaggaaagaggcgctgaagaatggtgcagatccacatttgtttttgcataattgctgccatagctccaccaattgtgtttcatgagaaatcattaacgtaagtttgccgacagcaacg

SEQ ID NO: 6071 - DNA, 674 bp, Zea mays
  misc_feature (1)..(1): n is a, c, g, or t
  misc_feature (383)..(383): n is a, c, g, or t
  misc_feature (606)..(674): n is a, c, g, or t
  Probeset Number=SeqID_20474
naacgcaaaaaacaaaaccgctatggtccatccacatccacagtcgccatcgcccccacctctcaccgtcgtcttcgtgcaccactcggcctccactgccggtcgcgcctcccagccacctcgtgccgctctgccaccccgcgcatcctccaccgcccctatggctgccacgggcgagcgctgcccgagcagtcgaccgccctttccgtgccgccccgcctccccgctaggcctccactgcccactgctccggcgcctacagtggaaggcaaggagaaggacatcgggcggcggtagctggatctggcaagcacaaggccgcgcccccggcggcgcctggatctgcgttgcttgcaacccccccccccccccccccccccacnacacacacacacaacagatcttgctacagggacaatcctgatcggtcggcgcatccgcctagaggcccggggagtgacgagtcaacgcctcctcagccctcatcctcacgtcgtccccaccgaagatccgcccaacggccccctgacccgacaaggacgattatcttattgccagcaccgatggggggggggacaaacgcggaagcttgctttccaaaccggnnnnnnnnnnnnnnnnnnnnnnnnnnnnnnnnnnnnnnnnnnnnnnnnnnnnnnnnnnnnnnnnnnnnn

SEQ ID NO: 6072 - DNA, 695 bp, Zea mays
  Peptide Sequence Number=SeqID_11563
  Probeset Number=SeqID_20475
cgaaaaaaagaataattatttttgaataaatatctcaatacctgtttacatgatatataaaaaccgtagcaaagtacggccaactagctagtatataataaagatgtgacattgatttctgccccatgagttatcatgggggagacttgatcctaacatacattggagacgcacccgagtttacccttaaatctgagtttgacaatggctcacatcaaacgatgcttattatatataaatattaatagtttttatatgtatatatatgtatacatatagtataactttggagattgattgtcttattgaaaacacattcttttttaactcaacttgtatatactaagaatggccttgctgtaggcctgtagcatgcatgtgcagatcacattttatgggggccaacgatataccggaggaggacgatgtggacgaaccttgggcgtagcgacgtcgaaaacaagtacgaagatggctgcaagtagtaccagaaggtgcccccggtgagttcttccgggtggatgactatgagaaggcatcaccatcgtttgcagaatgaattgcagtaaattaatcatatgcatgtataattgtatatacgtatatagggtttcttctattgccttgcagggtttatttcttggcatgcatgtattctagctacatatgcatatgtaataagccgcaacataatc

SEQ ID NO: 6073 - DNA, 695 bp, Zea mays
  Probeset Number=SeqID_20476
gattatgttgcggcttattacatatgcatatgtagctagaatacatgcatgccaagaaataaaccctgcaaggcaatagaagaaaccctatatacgtatatacaattatacatgcatatgattaatttactgcaattcattctgcaaacgatggtgatgccttctcatagtcatccacccggaagaactcaccgggggcaccttctggtactacttgcagccatcttcgtacttgttttcgacgtcgctacgcccaaggttcgtccacatcgtcctcctccggtatatcgttggcccccataaaatgtgatctgcacatgcatgctacaggcctacagcaaggccattcttagtatatacaagttgagttaaaaaagaatgtgttttcaataagacaatcaatctccaaagttatactatatgtatacatatatatacatataaaaactattaatatttatatataataagcatcgtttgatgtgagccattgtcaaactcagatttaagggtaaactcgggtgcgtctccaatgtatgttaggatcaagtctcccccatgataactcatggggcagaaatcaatgtcacatctttattatatactagctagttggccgtactttgctacggtttttatatatcatgtaaacaggtattgagatatttattcaaaaataattattctttttttcg

SEQ ID NO: 6074 - DNA, 801 bp, Zea mays
  misc_feature (601)..(801): n is a, c, g, or t
  Peptide Sequence Number=SeqID_11564
  Probeset Number=SeqID_20477
gagatatgcgccggtgtcttccactccgtccctgggccaaccgggtggtggtgtcagcgccggtgtcttcctctccgtccctgggcttgggtttccatggcggtggcgagggtaacgccgacctcagccctattactcggaggtccaaccagatagccttttgtacttctacagtgctgcgagagcaaggagagtaggagcccaaagccccaaacgctctttgtttcgctctgcgtgcatgcacgcgtgttcgatgcattaggacggactttgaagaggctagagcaacagttaccgtgtaggtgagctgaatgaaattggccaggagaggaaacaatcggtctataaaaaagtttatagctaatttagataagatcatactttcttatgattgaataattctatgtctgtgttctaactgtgtcctttctcagtgttatactgtcccaatttacagaacaacagatgaaccgtaatgagtcattccgaagatagttgaagtccagtgttattaccgcaattaatatctacctctccacattatggcccttatcttactccatcagtacgaatggctgatattaacgtgtctcatttttannnnnnnnnnnnnnnnnnnnnnnnnnnnnnnnnnnnnnnnnnnnnnnnnnnnnnnnnnnnnnnnnnnnnnnnnnnnnnnnnnnnnnnnnnnnnnnnnnnnnnnnnnnnnnnnnnnnnnnnnnnnnnnnnnnnnnnnnnnnnnnnnnnnnnnnnnnnnnnnnnnnnnnnnnnnnnnnnnnnnnnnnnnnnnnnnnnnnnnnn

SEQ ID NO: 6075 - DNA, 1395 bp, Zea mays
  misc_feature (1)..(6): n is a, c, g, or t
  misc_feature (8)..(23): n is a, c, g, or t
  misc_feature (25)..(39): n is a, c, g, or t
  misc_feature (41)..(45): n is a, c, g, or t
  misc_feature (56)..(58): n is a, c, g, or t
  misc_feature (74)..(94): n is a, c, g, or t
  misc_feature (96)..(97): n is a, c, g, or t
  misc_feature (124)..(124): n is a, c, g, or t
  misc_feature (174)..(176): n is a, c, g, or t
  misc_feature (793)..(794): n is a, c, g, or t
  misc_feature (988)..(988): n is a, c, g, or t
  misc_feature (1047)..(1395): n is a, c, g, or t
  Probeset Number=SeqID_20478
nnnnnngnnnnnnnnnnnnnnnncnnnnnnnnnnnnnnncnnnnncggcgccacgnnnggcatgatcaggaacnnnnnnnnnnnnnnnnnnnnnannatgcacgtccaagtcgaccagtacccnatctggtaaattaaattcacggcacggacccattgcatgcatgcatcatnnnctgcgctcatgattcatgacagacaggcttatctcggtctgtcccgttgtttcaggggagaggtgctggacatcgacacctgggtgggctcgtcggggaagaacggcatgcggcgggactggctcatccgtggccgcaactccggcgacgtcttcgtccgcgcaacaaggcaagctagcctggtcctaccgaccgaacgttagatgcatgcagcagatgatgatgaaggcaaaggttttctgtcatctccctgcagcacgtgggtgatgatgaacaaggtgacgaggaggctgtccaagacgccggaggaggtccggggcgagatcgcgccgtggttcatcgaccgccatgccatctcttctgtgctatgcagactcttcctgatcacttccagcagcagaaccagctcagcagcatcatcctggagtacaggaaagagtgtgggagctcagatgtcgtgcagtccatctgtcaacctgatgacgactcgattccaccgcaagaagatgtcagtatggccattgggccttcgctttcgccggaactcatcagtggccaccacagcttggcaggtgcgctccagcacagcccgatgaagtacacgcaccttctgcagnnaaagcaggcgacaagcccggccttctcttgagaggcatttagacgactcttgatccatgactcaagataaaagggaaatatgccttgaatcacagttaacacccgcgctctgcaaaaaaaaacggtggaccagcctggccggcttcaaacaagactactttgtcagccattccatcgatgcgaccaaagaaacnggggtcttcctcggcttcaggtgaaatcctctcagtgactgatgaaccgaaaggcaccnnnnnnnnnnnnnnnnnnnnnnnnnnnnnnnnnnnnnnnnnnnnnnnnnnnnnnnnnnnnnnnnnnnnnnnnnnnnnnnnnnnnnnnnnnnnnnnnnnnnnnnnnnnnnnnnnnnnnnnnnnnnnnnnnnnnnnnnnnnnnnnnnnnnnnnnnnnnnnnnnnnnnnnnnnnnnnnnnnnnnnnnnnnnnnnnnnnnnnnnnnnnnnnnnnnnnnnnnnnnnnnnnnnnnnnnnnnnnnnnnnnnnnnnnnnnnnnnnnnnnnnnnnnnnnnnnnnnnnnnnnnnnnnnnnnnnnnnnnnnnnnnnnnnnnnnnnnnnnnnnnnnnnnnnnnnnnnnnnnnnnnnnnnnn

SEQ ID NO: 6076 - DNA, 721 bp, Zea mays
  misc_feature (1)..(80): n is a, c, g, or t
  misc_feature (702)..(721): n is a, c, g, or t
  Peptide Sequence Number=SeqID_11565
  Probeset Number=SeqID_20479
nnnnnnnnnnnnnnnnnnnnnnnnnnnnnnnnnnnnnnnnnnnnnnnnnnnnnnnnnnnnnnnnnnnnnnnnnnnnnnnnaagggatacgacaccaccttaaaatgaaggttcaggcccacaatttgccgggaaatttaaagacagtttacacccccatgcaggacggaaagtttgccacaaaaaaatcaaccttgcccacaaagcattgcccggggtccacacatgaaaggacaccaccggttgttcacgattaaaacatagcccgcagaaggcaggggaggataactttggggagcgcaccagcacggccataagttgccaccgaacaggtaccccagggaaaagccaccgccaggagcagggtgaaccttgtttgaaggacggcccgtaaggaagttgccagggttctgaccataacccctggggaagttattggttgggttggaaaccccagaagaaacctgtttggccgaataagtttttgcagaaaatggtttctaaacagggggagcacttgcagttgggcccactgttggtttggggggctcaccgtttccaaagagataacccaaagaactttgaccaccaccggcattaccaccacggttaattttgtttattgaaaagagaaacgagaggcaccggcaaggagatggagggcaaccggcggcggggtcgggggaactgcggttgctcccannnnnnnnnnnnnnnnnnnn

SEQ ID NO: 6077 - DNA, 721 bp, Zea mays
  misc_feature (1)..(20): n is a, c, g, or t
  misc_feature (642)..(721): n is a, c, g, or t
  Peptide Sequence Number=SeqID_11566
  Probeset Number=SeqID_20480
nnnnnnnnnnnnnnnnnnnntgggagcaaccgcagttcccccgaccccgccgccggttgccctccatctccttgccggtgcctctcgtttctcttttcaataaacaaaattaaccgtggtggtaatgccggtggtggtcaaagttctttgggttatctctttggaaacggtgagccccccaaaccaacagtgggcccaactgcaagtgctccccctgtttagaaaccattttctgcaaaaacttattcggccaaacaggtttcttctggggtttccaacccaaccaataacttccccaggggttatggtcagaaccctggcaacttccttacgggccgtccttcaaacaaggttcaccctgctcctggcggtggcttttccctggggtacctgttcggtggcaacttatggccgtgctggtgcgctccccaaagttatcctcccctgccttctgcgggctatgttttaatcgtgaacaaccggtggtgtcctttcatgtgtggaccccgggcaatgctttgtgggcaaggttgatttttttgtggcaaactttccgtcctgcatgggggtgtaaactgtctttaaatttcccggcaaattgtgggcctgaaccttcattttaaggtggtgtcgtatcccttnnnnnnnnnnnnnnnnnnnnnnnnnnnnnnnnnnnnnnnnnnnnnnnnnnnnnnnnnnnnnnnnnnnnnnnnnnnnnnnn

SEQ ID NO: 6078 - DNA, 548 bp, Zea mays
  Peptide Sequence Number=SeqID_11567
  Probeset Number=SeqID_20481
aggtgccatagccgccatggcagtcataggatgtatggccgttgcgggctttctcggatggtgggtctactccaggttttgcagtctaagcgcgaagatggcttggcaagattatactagagacttgtatttctcagatccatatttggcttaggcggggaaaggagccgaactggggaacaagagagaaggaccccgctagccccatccttggtgggaggaagaagctagcaccaccattgcagcaggaggaggtggtggatccaagcctacgcgacgggttcagagcgaaggcgctcctcggtagacaagacaccagcatcactgatacctgctccctgtcctgacgagatttggacaccttacaaagggtaaggtgtcctgacgagatttggaccgacagcaacggcgacagcaacggtttttttttttttttgggtttggacacagtaatttcattcccaacaaataggagtagcagggagtcactgaaccttacaatttatggctactaaacagcgcagcgactctcgatccatgcccacatt

SEQ ID NO: 6079 - DNA, 548 bp, Zea mays
  Probeset Number=SeqID_20482
aatgtgggcatggatcgagagtcgctgcgctgtttagtagccataaattgtaaggttcagtgactccctgctactcctatttgttgggaatgaaattactgtgtccaaacccaaaaaaaaaaaaaaaccgttgctgtcgccgttgctgtcggtccaaatctcgtcaggacaccttaccctttgtaaggtgtccaaatctcgtcaggacagggagcaggtatcagtgatgctggtgtcttgtctaccgaggagcgccttcgctctgaacccgtcgcgtaggcttggatccaccacctcctcctgctgcaatggtggtgctagcttcttcctcccaccaaggatggggctagcggggtccttctctcttgttccccagttcggctcctttccccgcctaagccaaatatggatctgagaaatacaagtctctagtataatcttgccaagccatcttcgcgcttagactgcaaaacctggagtagacccaccatccgagaaagcccgcaacggccatacatcctatgactgccatggcggctatggcacct

SEQ ID NO: 6080 - DNA, 1143 bp, Zea mays
  misc_feature (6)..(9): n is a, c, g, or t
  misc_feature (13)..(23): n is a, c, g, or t
  misc_feature (25)..(26): n is a, c, g, or t
  misc_feature (980)..(983): n is a, c, g, or t
  misc_feature (1026)..(1026): n is a, c, g, or t
  misc_feature (1078)..(1078): n is a, c, g, or t
  misc_feature (1111)..(1115): n is a, c, g, or t
  misc_feature (1117)..(1118): n is a, c, g, or t
  misc_feature (1120)..(1123): n is a, c, g, or t
  misc_feature (1129)..(1143): n is a, c, g, or t
  Peptide Sequence Number=SeqID_11568
  Probeset Number=SeqID_20483
tcgagnnnncggnnnnnnnnnnntnnccaccgtttctttcctcacctcccgcgacagcaccggtagctgccatggcctcttgcgacctccttgatgtcgaccctctggagcttcagtttccgttcgtgctcgacaagcagatcccctgcccgctgcggctcgccaacaggactgaccgtaccgtcgcctttaaggtgaagacgacgaacccgaggaagtactgcgtgcgccccaacaatggcatcgtaccgccccgatccttgtgtacggttgtagtcacgatgcaggcgcagacggtggtgcctccggatttgcagtgcaaggacaagttcatggtgcagagcgtggtcatcagtgatagcttgtcagccaaggacataacctctcaaatgttcgcgaaagaggggggtaatgtgctccaggaggtaaaattgaaggttgcttatgtgatgccacctgaaccaccatcagagattgcagaggagcacgatggtttagatcgagttttagtgcctatgcagaggatcgtggataatgggaaaagtacttcagagctatcgagtggctccgtgtcattgaggtcagctgaggagtttggatcacctgttggtcgaattgtgaagagtgaggagtttctgaaggctgcaggacctgctatggaaacaaaaacatatgcaggacctggtgaacaatctcatcagctgtcagctataattacaaagctgactgaagaaaagaattctgctcttgagcaaaacagaaagcttcaagttgaattggaacttgtaaggtgcgaagccaggaaacagcaaagcgcgttctcgttggttctcctaatagcgtttgggctccttggcattgttttaggttacattgttaagaaatgataatttcatagtctaatcgagcaatcgctatggtaaataaaaggtaacatgtcgtgtgattcttacattcatcagccagctgccaatgctacnnnnaagtgcaagcgtcagttgacaaaccgggggtgggggtgggggngcggagtacaatagcatgtattttgatccacatgatgtatttacacgaatcnctggaaaagtgattgttgtttggtttctgtatnnnnncnnannnnaaaaannnnnnnnnnnnnnn

SEQ ID NO: 6081 - DNA, 181 bp, Zea mays
  Peptide Sequence Number=SeqID_11569
  Probeset Number=SeqID_20484
ataggcctactaggctcaacgcctcgtctagacgtctacggtctacctcatccagccacaacgaccagcttggccaaacgccttgcttcgaatgttttacttctgaagttcgttataataacccttcgctttgttcaattattcatattgattatggatcggatgagattgaaataaaaaa

SEQ ID NO: 6082 - DNA, 1756 bp, Zea mays
  misc_feature (698)..(698): n is a, c, g, or t
  misc_feature (893)..(893): n is a, c, g, or t
  misc_feature (946)..(946): n is a, c, g, or t
  misc_feature (963)..(963): n is a, c, g, or t
  misc_feature (1013)..(1013): n is a, c, g, or t
  misc_feature (1021)..(1021): n is a, c, g, or t
  misc_feature (1138)..(1138): n is a, c, g, or t
  misc_feature (1166)..(1166): n is a, c, g, or t
  misc_feature (1314)..(1314): n is a, c, g, or t
  misc_feature (1454)..(1454): n is a, c, g, or t
  misc_feature (1756)..(1756): n is a, c, g, or t
  Probeset Number=SeqID_20485
cgtaatcgtaatcatactcagattctccccacagccagattttcagaaaatctggtcagaaaaaagctgaaccaaacaggccctttgaccctctgttgtttctgttttgcaggaactttactttagatcacaatcacaagaggatgagatcttgttgcttcgcaagaaaattgctgaggcatctctcaaggagctgagattactgggtgaaaaacatattctggagaagaggctcacagacttgaggatggctgttgacgagaagcaggaagaagctatatctggtgctttgcaacaattgaaccagaagaaaacccatcttgaggacaatatgagactggcaaatgaactaaaagttgaggaagaagagctatacttttttacttcttcattgcttagcatgctagcagaatacaatattcgcccacctcaaataaatgcttccatcattacaactgttacaaagcgtttgtaccaacagatgcatttgaagctcagatctttaaatgacaatttaggtgatatgactcaacctggaaatatatataatcccaatcttcagcaagtaaccctatcaagaaatgaaccttccccatcttataatttggattcaaataggaacactcttcaacagtatgctcaaggtccaagtgaccgacatatggatcaaatggatactggcggtactactccctctnaattattttgagggagacagaagagtagatggtgactcacagttataccaacctgatggtgacgctttacctggtagtgaggggtttcaaattgctgtgaacctagaccaggatttcaattaacagcatgcggttttcctactaatggtactaccctttgcaatttccagtgggttcgccatcttgaaaatggtnccagacagtctatcgaagatgatgttggcacttttcttgctgtagactgtacncctatggatgataatgnccgccagggtgatttggtgacagaatttgctaacaatgggaataagatancctgtganccagagatgcagagtcatattgatgcatatatttctaatgggagagctgaatttgaagtttttgtcctggcttattctcctgaggagtgggaattggctacattggtgctaacacgncctaactatcagattaagttcaaaaagnccggtgaagttataattgctgagaagtactcacaaagtctacagatgaaaattccaaatgggcgcacaactcaatttgttttagtaactgcgggtgcaactcttccatttaacacacagggaatatcagagccaaacaatgaggattncgatgttaggttacgcgatctaatcgtattagtcatgagaactttccagaaaaaggctctagatgccaaaaggaaagtcaacacttagaatccatgttgatctgttacaaaagattctatgtaaaaccgtagaaaatttncctatttttgattcttttgtgcagtattagatgatttttgttcttgaggtggaatgagctctcgatagagcaggaatttcaagagttacctgttggagacgtgagggcacataaaacggttagaggaacctaggatcacttatcctaggattattataattgtaggtttgtgtaattctttttcttctcattgcttgctctaagttaagtcatgtcgctgcggtctttgtaaatatgaagcagccagtgctgcaaataaatctatgagatgtttgttgcagctcttgaatacaactttattn

SEQ ID NO: 6083 - DNA, 177 bp, Zea mays
  misc_feature (32)..(32): n is a, c, g, or t
  misc_feature (40)..(40): n is a, c, g, or t
  misc_feature (42)..(42): n is a, c, g, or t
  misc_feature (75)..(75): n is a, c, g, or t
  misc_feature (88)..(88): n is a, c, g, or t
  Peptide Sequence Number=SeqID_11570
  Probeset Number=SeqID_20486
tctccgattgtatacaggtaactactcgtggngaagtgangntcttacccgcaagacccgcatcctggatgtggnctatactctctgnctgttcgctacgccctacgcatctgtgctcgacgcctacccgcatgtgaaggcctggtggtctggtctgatggagaggccgtctgtcca

SEQ ID NO: 6084 - DNA, 222 bp, Zea mays
  Peptide Sequence Number=SeqID_11571
  Probeset Number=SeqID_20487
gggggacggacggcgtggcatctgtggcttgggcgcgcccacctgtccctcagattagatatggcaataggtatatactccccgtactacctcatactcataccccccccataaaaataactttatcggatccctcatataccccggtgggtatggacttactccatacccatattcatgtaggtatgagtcatccctatccccaaaaaataaacctctttc

SEQ ID NO: 6085 - DNA, 222 bp, Zea mays
  Probeset Number=SeqID_20488
gaaagaggtttattttttggggatagggatgactcatacctacatgaatatgggtatggagtaagtccatacccaccggggtatatgagggatccgataaagttatttttatggggggggtatgagtatgaggtagtacggggagtatatacctattgccatatctaatctgagggacaggtgggcgcgcccaagccacagatgccacgccgtccgtccccc

SEQ ID NO: 6086 - DNA, 644 bp, Zea mays
  misc_feature (1)..(15): n is a, c, g, or t
  misc_feature (644)..(644): n is a, c, g, or t
  Peptide Sequence Number=SeqID_11572
  Probeset Number=SeqID_20489
nnnnnnnnnnnnnnnatacgtgatagggttttacccacccgccctctgccgcaggcgacgcgccgactccctcgccatcaccgataggaaggcactctgctccccctgtttgcctccatccgcaccccctttctcattgcgggcgtacgcaccccttctgttgtatgtgatacgcgttcattgtctttcaagtcgacgggaggcggcacactaccgccaacgagccggagctcaagatggtggttgtgccggcaattattccaatctgaatcccgaactcataaatcgtatccatcacactgattcggtctccgtggtcttcaacccgcaccatgtcttcgaaaaggttaattttacagcatcaggtctttgaattggtgtggcagcgattgtttgtttggactgctataatgttattggtttaccatttgttgtcgacctgtgtttcctttgttggcgaaactgacggcggtatggcattgccacgaagatctgattcgtttcttattacttgtgcttctcgtctcggctgaagatcatgttattgtgttcgtcaccgagcattagattgaacaggggtacattttgacaccatcatttgttcgtcagatttgtgccattgattgggtttctggcttaaaaan

SEQ ID NO: 6087 - DNA, 644 bp, Zea mays
  misc_feature (1)..(1): n is a, c, g, or t
  misc_feature (630)..(644): n is a, c, g, or t
  Probeset Number=SeqID_20490
ntttttaagccagaaacccaatcaatggcacaaatctgacgaacaaatgatggtgtcaaaatgtacccctgttcaatctaatgctcggtgacgaacacaataacatgatcttcagccgagacgagaagcacaagtaataagaaacgaatcagatcttcgtggcaatgccataccgccgtcagtttcgccaacaaaggaaacacaggtcgacaacaaatggtaaaccaataacattatagcagtccaaacaaacaatcgctgccacaccaattcaaagacctgatgctgtaaaattaaccttttcgaagacatggtgcgggttgaagaccacggagaccgaatcagtgtgatggatacgatttatgagttcgggattcagattggaataattgccggcacaaccaccatcttgagctccggctcgttggcggtagtgtgccgcctcccgtcgacttgaaagacaatgaacgcgtatcacatacaacagaaggggtgcgtacgcccgcaatgagaaagggggtgcggatggaggcaaacagggggagcagagtgccttcctatcggtgatggcgagggagtcggcgcgtcgcctgcggcagagggcgggtgggtaaaaccctatcacgtatnnnnnnnnnnnnnnn

SEQ ID NO: 6088 - DNA, 808 bp, Zea mays
  misc_feature (1)..(1): n is a, c, g, or t
  misc_feature (720)..(808): n is a, c, g, or t
  Peptide Sequence Number=SeqID_11573
  Probeset Number=SeqID_20491
naaacgcaggccgcagtcgcgtgcggaactagagctccttcagagaagtgccgtgccagtgccaccgccggccgcatcatcgttccgcccccctggtacgagcacttcgcagagctgcaacctacatcccttttacataaatctattgtctcgtattgccgttgacgccggaatagtcttcgcatcccttttacataaatccgatgttttctttctccgattcctttgaggaatcatcacgggtcagggcaggtgttctgccgtttgcccttttctttatattctccttagaagaaatatttagttggaggttggacatagccggaggaactaactaatcgagcggtgtactggcaaaacaaaaggagcggagcaagaaaggggagaaaaactagccaccgccgcagcgctattggccgcgttgggcctggaagcttgcatcaatacttccctcgccccgatttggttccaaaatcatacaagtctcaaagttgtcaagatattggaggtatgcaagcgacttggatctcaaaatagaagaaatttcggatctgagcacaaatctgagttgaaaaaactggaactcaaaatcatcaaaaaaataagaagaaagaaacgaatatattcgctcctcttctcagccgaacccaaaggaattgaatccaaaccctgggtaggcagacagtgagatatggaggagagcaggaggcgaacaagagnnnnnnnnnnnnnnnnnnnnnnnnnnnnnnnnnnnnnnnnnnnnnnnnnnnnnnnnnnnnnnnnnnnnnnnnnnnnnnnnnnnnnnnnn

SEQ ID NO: 6089 - DNA, 481 bp, Zea mays
  Probeset Number=SeqID_20492
gccagactgagcaactccatcgcgccagacgaagtcgcgcccagactgagcagacgtcgtcggccgccagacgcagttggccgctctccaggtacgccgccggtcagcccatatggtatattggaggccttgtcgttcacaacagcagccataccgagggcagcgaagaaccctagccctccgcacagccacgccaacgcctcgtacttgccgatgtgcggggcaaggcggtcgatgcagggttccgggaagggcgtgccgttatcccataccaactcgtcgttcacggggaggggcttgtcggggacgatgtggcggccgacggggaggcccatgccggcgcggtgtcggagggcggaagccgcggcgcgtgcgccgccgccgcccaggatgcgggaccctgccgcggttagcctcccagccatctctcgcttgctcgctcaccgatctgtgcgagtcctcctgcagtgagttcggttgc

SEQ ID NO: 6090 - DNA, 465 bp, Zea mays
  Peptide Sequence Number=SeqID_11574
  Probeset Number=SeqID_20493
ggtgtttctttttttttttttttttttttttttttttttttttttttttttttttttttgggggccaagggctgggtttttttttatttagggatccaacagccccctccttttgtacaaaagacgggcagggtttgtccctcccgttgggaaaacccgcccatgggaaaacgggggctttttgctccgttgggaaaagagcgcccccaaaaccccggggggcaagggaaaaccccaggcctacaaagttttttttgccgatcgatctgttttgcaggtgggagaagttaccggacccttctacggccggccggacaaaaaccttatacataacggccgggattccttgccgggcctgggggctttacggaaatacccggccggggggattcctcctcaggggggccggtcctttgcccgggctcctcccaaagccaacagggcctcggagctaatggtggcaac

SEQ ID NO: 6091 - DNA, 465 bp, Zea mays
  Probeset Number=SeqID_20494
gttgccaccattagctccgaggccctgttggctttgggaggagcccgggcaaaggaccggcccccctgaggaggaatccccccggccgggtatttccgtaaagcccccaggcccggcaaggaatcccggccgttatgtataaggtttttgtccggccggccgtagaagggtccggtaacttctcccacctgcaaaacagatcgatcggcaaaaaaaactttgtaggcctggggttttcccttgccccccggggttttgggggcgctcttttcccaacggagcaaaaagcccccgttttcccatgggcgggttttcccaacgggagggacaaaccctgcccgtcttttgtacaaaaggagggggctgttggatccctaaataaaaaaaaacccagcccttggcccccaaaaaaaaaaaaaaaaaaaaaaaaaaaaaaaaaaaaaaaaaaaaaaaaaaagaaacacc

SEQ ID NO: 6092 - DNA, 865 bp, Zea mays
  Peptide Sequence Number=SeqID_11575
  Probeset Number=SeqID_20495
gttgggtcgtgtcatcggtggatggaagcacatgttaggccgatttgtcccaaatctatgtagattgagagagattaagtcatctataccccaaatctatgaaaattgagagagattaagtcccgtcaaaaccctcaaggactcaatccccttcattcttctaaaatccatatggtttaaatataaaacgaacgaggcctcataaggacctgaggtttggaaggtccatgtgtgcaaaaggtaaggaactctgataaggggaactcttttaaatctgaagcctgattcgtccaaaacagagctaagacctgaaaccatgacgaaggaacaacttgattatgttagaaatctacacaaaaaagcatgagataccaacaatttaaatagaaataattcctaatgtatgtcctgttgtccataacagcgagcaacaaacttccttactcatttgtgttgttaatgcacatggtgctagggtcctagttcaggaaagatgtacgtaaaaagaatacaaggtagtctggtggcctgtttggataagaattttgacagcaagctgtaagaaaaatgtatagtgttgatacatcgccatgtaaatgtacaaaggaagcctttgctctaggcatcagtgatcctgactagcataagaacagttcatcgtccatccaattacttcacacaaaaaaatagtcatccgggtggtacctacaatacctacaagtgaacaccatgagtccaggtctgaggcaaaggccaatgaacacctctttttatttatataaccaaaattcttgtgttttttatacactggatagcattagtagtgatgaaaaaattatgataaatttagaaactatcatcaaat

SEQ ID NO: 6093 - DNA, 865 bp, Zea mays
  Probeset Number=SeqID_20496
atttgatgatagtttctaaatttatcataattttttcatcactactaatgctatccagtgtataaaaaacacaagaattttggttatataaataaaaagaggtgttcattggcctttgcctcagacctggactcatggtgttcacttgtaggtattgtaggtaccacccggatgactatttttttgtgtgaagtaattggatggacgatgaactgttcttatgctagtcaggatcactgatgcctagagcaaaggcttcctttgtacatttacatggcgatgtatcaacactatacatttttcttacagcttgctgtcaaaattcttatccaaacaggccaccagactaccttgtattctttttacgtacatctttcctgaactaggaccctagcaccatgtgcattaacaacacaaatgagtaaggaagtttgttgctcgctgttatggacaacaggacatacattaggaattatttctatttaaattgttggtatctcatgcttttttgtgtagatttctaacataatcaagttgttccttcgtcatggtttcaggtcttagctctgttttggacgaatcaggcttcagatttaaaagagttccccttatcagagttccttaccttttgcacacatggaccttccaaacctcaggtccttatgaggcctcgttcgttttatatttaaaccatatggattttagaagaatgaaggggattgagtccttgagggttttgacgggacttaatctctctcaattttcatagatttggggtatagatgacttaatctctctcaatctacatagatttgggacaaatcggcctaacatgtgcttccatccaccgatgacacgacccaac

SEQ ID NO: 6094 - DNA, 1022 bp, Zea mays
  misc_feature (7)..(14): n is a, c, g, or t
  misc_feature (341)..(342): n is a, c, g, or t
  misc_feature (347)..(349): n is a, c, g, or t
  misc_feature (364)..(371): n is a, c, g, or t
  misc_feature (375)..(377): n is a, c, g, or t
  misc_feature (409)..(411): n is a, c, g, or t
  misc_feature (1017)..(1022): n is a, c, g, or t
  Peptide Sequence Number=SeqID_11576
  Probeset Number=SeqID_20497
cttctgnnnnnnnnagctagtgtactagttgtatgccgcagcgatctgtatatatgtacatgcagtttctcgatcgttatcgctactcgatcggtagccatcgatcgatcttctgatgcaaatgcaaatgctcatcagataacatggaccccttcgtgatccttacctgccgcacccaagagcagaaaagcagcgtcgcaaatggtacgtacgtataggagcacttgttttttttttctctcttttcattcgttcgttcacaagaatccccatcttatgctgtcgatctgcaatacgtacaggagcaggaagcgagcccgaatggaacgagaccttcgtcnncaccnnntccgacgacaccccnnnnnnnnaccnnnagatcatggacagcgacctcaccaacgacgannncgaagcaacgtaactcatcactatatactctgcgacgatatgattaatttagttgtgaaatgaaatgatccataatcttcttccgaactgcatgcgtgcgtgcgtgcgtgtgctctttcagcatccccctggaggccgtgtttcaggaaggcagccttcccccggcggttcacccggtcgtcaaggaggagaagtactgcggagaggtcaagctcgcgctcaccttcactccagcagcggtacacaacatttcttgccagctgcaatagccaagcaagccttccagtatatgccacaaattaaatctcagtcacagtgcatgcatgcatgcgactctaatctgatcttctccaggaaactcgccaccgccctgacgacaacgaggaggggccgccttacagcagctggagttgatctatctgccatgggatgcatgctgcatcatatcccccaagagaagagaggataattaattaatctactcaagagaagaatcagtgttgcagttatgcgaccctctacctatctatatatatgtgcttaatttgtcatgaacgactgccaatataaactaaactattcagagttaaaaaaaaaaaaaaaaannnnnn

SEQ ID NO: 6095 - DNA, 200 bp, Zea mays
  Peptide Sequence Number=SeqID_11577
  Probeset Number=SeqID_20498
ggtgattttgaaagcacttataacaaagttagatgtgattttctggaggaggtcatggtctcaaaaaaaacccgtgggtcaagatggtgatgaacacagtcaaagactcaaaggtggtaaggtctatgcccctgcctaccacccagcatgggcgaagctagccaataacactgtcggtggcatcaccattacatgaactc

SEQ ID NO: 6096 - DNA, 200 bp, Zea mays
  Probeset Number=SeqID_20499
gagttcatgtaatggtgatgccaccgacagtgttattggctagcttcgcccatgctgggtggtaggcaggggcatagaccttaccacctttgagtctttgactgtgttcatcaccatcttgacccacgggttttttttgagaccatgacctcctccagaaaatcacatctaactttgttataagtgctttcaaaatcacc

SEQ ID NO: 6097 - DNA, 487 bp, Zea mays
  Peptide Sequence Number=SeqID_11578
  Probeset Number=SeqID_20500
gaggcccggaggaggaaaaaggagccaaaggaaaaaggccccccaaaattccccaaggttgtccagggtagtcgggttataggtgatcccccaaaaaaccccgccaaagttataaacaacgggtgggcagctgggcggctaaccccgccgattgcaggaaaggaaaattttgttttcagctctaaaagggtccttaggcaaagatctagttttgttttcccttttctaacccttgaaaacggtaaataaaagtcctgcggatccaaaaaaaaaatcgttggagctttggcatttaaaacgaaagttttgtcaggaaaggaaaattccccctaaaaagtttggatttgaggattccccctgtaattttattcccaactgagggttcaaaaaaaaaaaattgccctgtaacaacatatatatactgccccaaaaatttgtgtgcccctatttaaaaaaaaaaaaaaaaaaaaaaaaaaaaaaaaaaacc

SEQ ID NO: 6098 - DNA, 515 bp, Zea mays
  Peptide Sequence Number=SeqID_11579
  Probeset Number=SeqID_20501
agagctgcctatctctgtattaagaaaaatgagacaagagcccttacaacacacctacgctcttaagctcttagaaaaacatgcgcgccttttactaagacagaaaatacgaccacagattcacaaaaggaccccagcggctatctacaggctcaagggaagggaaggagcttccctgagccttcgcaagactccagtaacgatgttcctcacttgcaagcagcaatgctccagccaagttaagagtaccataaaaaacactcggttttgatggttccaaattgtccatgtcccaacgatgataagtgagtcgagtctttttttgtatgaaccatccattcttgactctgccttgacccaccattcatcaaaggaggattcatcctgttgtggcgaaagggtctgtttctgcagcaaaataaaccaaacctctcacgcgaatacacattatactaacatatgattgataatttcttcctctcgatcgcagtgggggtagtgagcaggatgtggga

SEQ ID NO: 6099 - DNA, 515 bp, Zea mays
  Peptide Sequence Number=SeqID_11580
  Probeset Number=SeqID_20502
tcccacatcctgctcactacccccactgcgatcgagaggaagaaattatcaatcatatgttagtataatgtgtattcgcgtgagaggtttggtttattttgctgcagaaacagaccctttcgccacaacaggatgaatcctcctttgatgaatggtgggtcaaggcagagtcaagaatggatggttcatacaaaaaaagactcgactcacttatcatcgttgggacatggacaatttggaaccatcaaaaccgagtgttttttatggtactcttaacttggctggagcattgctgcttgcaagtgaggaacatcgttactggagtcttgcgaaggctcagggaagctccttcccttcccttgagcctgtagatagccgctggggtccttttgtgaatctgtggtcgtattttctgtcttagtaaaaggcgcgcatgtttttctaagagcttaagagcgtaggtgtgttgtaagggctcttgtctcatttttcttaatacagagataggcagctct

SEQ ID NO: 6100 - DNA, 245 bp, Zea mays
  Peptide Sequence Number=SeqID_11581
  Probeset Number=SeqID_20503
gcacctgaggtacctttccatgggcaagcacactcatccccaccccactcccccaagttgctttatttatttagtgatgtcattggaatcaccttttgttctagcacaacaatctattgaaaaaatggcattcgcgcatcaaacagttgtatttgtctgtgaaatgtaatgtttatagtttcgggatcagtttgtggtagatatactgctgtaatatgccatatcctgatttgagcctctgaacg

SEQ ID NO: 6101 - DNA, 245 bp, Zea mays
  Probeset Number=SeqID_20504
cgttcagaggctcaaatcaggatatggcatattacagcagtatatctaccacaaactgatcccgaaactataaacattacatttcacagacaaatacaactgtttgatgcgcgaatgccattttttcaatagattgttgtgctagaacaaaaggtgattccaatgacatcactaaataaataaagcaacttgggggagtggggtggggatgagtgtgcttgcccatggaaaggtacctcaggtgc

SEQ ID NO: 6102 - DNA, 435 bp, Zea mays
  Peptide Sequence Number=SeqID_11582
  Probeset Number=SeqID_20505
tgacccgtaagagaacagcagtagttaacatcgtctgcggctagcgccaaggaggctagcggatcgatctgacggacctgctctgccgtccgtgagtgtcgatggagcggaggggcgattcacggaccggatcttccgccggagctgctggagcgcatatcgtcgtcgatcgtccgccctcgtcgcttgtcatcttcccggagtagagcacggtttacaaagggagcggaggagggagccgatgggtccccaatccctaggcgcggctttcagatccgcatgcttcttttttgcaccggtgggtggacttgaccaccggctgacgggcgatggtgatttgctcaggattttactgctaccacgcactgtactgctccgtgtagcagtgatttgacttggccagattccagaaacctttttgccgcgtcaggcccc

SEQ ID NO: 6103 - DNA, 326 bp, Zea mays
  Probeset Number=SeqID_20506
atggggattaacaacagatctgaccgctcgtagcaatggtgaattagttaatcgcccccttagccaaccaacacgcgcgtaggggaagctacatatctacaagacaaggccggatgaggtcaagaagatgggaggtacggagggttaaggggagggaccgactacgatccagacgacgccgacgagggggcacagctccccgaagcaggccgtagacgagccccaccgcctagcagatccagtgcaccacatccagcagttggtcctgcaatagccaggccgagacgagagcgtcagcacgagagcagctacccggcgagcgcgcc

SEQ ID NO: 6104 - DNA, 326 bp, Zea mays
  Peptide Sequence Number=SeqID_11583
  Probeset Number=SeqID_20507
ggcgcgctcgccgggtagctgctctcgtgctgacgctctcgtctcggcctggctattgcaggaccaactgctggatgtggtgcactggatctgctaggcggtggggctcgtctacggcctgcttcggggagctgtgccccctcgtcggcgtcgtctggatcgtagtcggtccctccccttaaccctccgtacctcccatcttcttgacctcatccggccttgtcttgtagatatgtagcttcccctacgcgcgtgttggttggctaagggggcgattaactaattcaccattgctacgagcggtcagatctgttgttaatccccat

SEQ ID NO: 6105 - DNA, 159 bp, Zea mays
  Probeset Number=SeqID_20508
tatcaaatatagaaactaaaactttattttagtttctatatttgtcaatttatatactaaaatggaataaaatgaagagactaaatattagtccctagaaaccaaacaccctctaaacttgaaactgcttattatgagtgaaatgatgatgttatttcc

SEQ ID NO: 6106 - DNA, 268 bp, Zea mays
  Peptide Sequence Number=SeqID_11584
  Probeset Number=SeqID_20509
cttaatacgttcataaatctgcttgacatcgatgacacagcatagtccaaacaaaaatgcaagaggaatagcttttgttacagaatatattgttcatgtgatcaaatccctgacagtcttttcccaagggacacaccccttgggaaaccctgtatccccttgtatataaacaagtatcactgcaataaagaataactgtctctggcatttgcacaatctctgagtctcgttaccactacgctctaacacgttatcagcactgttcgca

SEQ ID NO: 6107 - DNA, 268 bp, Zea mays
  Probeset Number=SeqID_20510
tgcgaacagtgctgataacgtgttagagcgtagtggtaacgagactcagagattgtgcaaatgccagagacagttattctttattgcagtgatacttgtttatatacaaggggatacagggtttcccaaggggtgtgtcccttgggaaaagactgtcagggatttgatcacatgaacaatatattctgtaacaaaagctattcctcttgcatttttgtttggactatgctgtgtcatcgatgtcaagcagatttatgaacgtattaag

SEQ ID NO: 6108 - DNA, 804 bp, Zea mays
  misc_feature (1)..(1): n is a, c, g, or t
  misc_feature (658)..(804): n is a, c, g, or t
  Peptide Sequence Number=SeqID_11585
  Probeset Number=SeqID_20511
ntacccgcctcgaagatccctacatcatcatcgacaccgagctccatcggacagacgccgaccgaggccccaacctcctcctccacccagcgtcgcgtccagtgtggccccgccgctgattatcgaagccaagggcttgagcgcagcgcgggaacaggagggcgagctgaggtggcgacgaattctcccacctctcgtcgcccacgcccgctggatcccactgtcgccgtctctgcctcctctctgtatcctcgcccgcagagaggaattacttgagcagggagatgaggagggcaggaggcccatggctcgccggagcaacccatgggcaagaaggcacacgtcgattaggtggatggggttctagggaggcgcttcctcaggagctatccaaaatcctactagatggagaagatcatggcaacaaccatcgtatcgatgaccctgaagacgctggtttaacttgctccaacagtcctactagatggagaagatcatgacaacaaccattggatcggtgaccctaaagttgtacaagggcttggtgagtgtcgcatccctgaagagccctttcatccatgcaaggagacatttcctcgtttgaggacgaggaaatctatatccaggctaacgacgaggggtcatcttgctctggtcnnnnnnnnnnnnnnnnnnnnnnnnnnnnnnnnnnnnnnnnnnnnnnnnnnnnnnnnnnnnnnnnnnnnnnnnnnnnnnnnnnnnnnnnnnnnnnnnnnnnnnnnnnnnnnnnnnnnnnnnnnnnnnnnnnnnnnnnnnnnnnnnnnn

SEQ ID NO: 6109 - DNA, 804 bp, Zea mays
  misc_feature (1)..(147): n is a, c, g, or t
  misc_feature (804)..(804): n is a, c, g, or t
  Peptide Sequence Number=SeqID_11586
  Probeset Number=SeqID_20512
nnnnnnnnnnnnnnnnnnnnnnnnnnnnnnnnnnnnnnnnnnnnnnnnnnnnnnnnnnnnnnnnnnnnnnnnnnnnnnnnnnnnnnnnnnnnnnnnnnnnnnnnnnnnnnnnnnnnnnnnnnnnnnnnnnnnnnnnnnnnnnnnnnngaccagagcaagatgacccctcgtcgttagcctggatatagatttcctcgtcctcaaacgaggaaatgtctccttgcatggatgaaagggctcttcagggatgcgacactcaccaagcccttgtacaactttagggtcaccgatccaatggttgttgtcatgatcttctccatctagtaggactgttggagcaagttaaaccagcgtcttcagggtcatcgatacgatggttgttgccatgatcttctccatctagtaggattttggatagctcctgaggaagcgcctccctagaaccccatccacctaatcgacgtgtgccttcttgcccatgggttgctccggcgagccatgggcctcctgccctcctcatctccctgctcaagtaattcctctctgcgggcgaggatacagagaggaggcagagacggcgacagtgggatccagcgggcgtgggcgacgagaggtgggagaattcgtcgccacctcagctcgccctcctgttcccgcgctgcgctcaagcccttggcttcgataatcagcggcggggccacactggacgcgacgctgggtggaggaggaggttggggcctcggtcggcgtctgtccgatggagctcggtgtcgatgatgatgtagggatcttcgaggcgggtan

SEQ ID NO: 6110 - DNA, 326 bp, Zea mays
  Peptide Sequence Number=SeqID_11587
  Probeset Number=SeqID_20513
aaagtcaatctgggttatatctcccaggatcaacatttcaaaataaaacatatagagtgggtcccttacaatgatattttacatcttgaaaaactatctcacaatatatttgctattcaaaagattgagaaggaaaatgatttgctcgaacagaatatcaatacctggtgcacagggatatgtgagattgttatttttgaagatgtggttcttaaagcttcactgaagaatgtggcgcagagaacacttgcaggacgaccaagacaatatgcaactatccgataataacgatctcagaatgacatgccctattaatccacggctcc

SEQ ID NO: 6111 - DNA, 326 bp, Zea mays
  Probeset Number=SeqID_20514
ggagccgtggattaatagggcatgtcattctgagatcgttattatcggatagttgcatattgtcttggtcgtcctgcaagtgttctctgcgccacattcttcagtgaagctttaagaaccacatcttcaaaaataacaatctcacatatccctgtgcaccaggtattgatattctgttcgagcaaatcattttccttctcaatcttttgaatagcaaatatattgtgagatagtttttcaagatgtaaaatatcattgtaagggacccactctatatgttttattttgaaatgttgatcctgggagatataacccagattgacttt

SEQ ID NO: 6112 - DNA, 592 bp, Zea mays
  misc_feature (10)..(10): n is a, c, g, or t
  misc_feature (12)..(12): n is a, c, g, or t
  Peptide Sequence Number=SeqID_11588
  Probeset Number=SeqID_20515
acgcgacccncnaccttttcttatttttttttttccactatttttttttttgcgcatttttttaattcctatcatttatgtaccaagggatttaggaaggtatacccatcctatgttgaatatatcaatacttttatatttacattatcaaactccaataatccggccatttcaaagattcggactaaaaaaggaaaacccaacatctaaatatttccttctaatctcttttattaaaaccaggaaggacttgaggccctctccacactctgcaggtcgtttgcatgcatcttatcacgacatgtgccatgagtacggatccaactgaagtctggattacagttatgaattgttctagtttatgaagattatataaattactccatctgtcctaaaatatagatctttctagcctactttttggtatctacattcgttcgaataataatgaatataaatatacatgaaaactacattcatatattacttaataaatatgtaattaatcttaaataaattatattttaaaacagatgaagtactaacgatctctgagcgaaaaccaggatccgaatttttcatgcaatagacc

SEQ ID NO: 6113 - DNA, 592 bp, Zea mays
  misc_feature (581)..(581): n is a, c, g, or t
  misc_feature (583)..(583): n is a, c, g, or t
  Probeset Number=SeqID_20516
ggtctattgcatgaaaaattcggatcctggttttcgctcagagatcgttagtacttcatctgttttaaaatataatttatttaagattaattacatatttattaagtaatatatgaatgtagttttcatgtatatttatattcattattattcgaacgaatgtagataccaaaaagtaggctagaaagatctatattttaggacagatggagtaatttatataatcttcataaactagaacaattcataactgtaatccagacttcagttggatccgtactcatggcacatgtcgtgataagatgcatgcaaacgacctgcagagtgtggagagggcctcaagtccttcctggttttaataaaagagattagaaggaaatatttagatgttgggttttccttttttagtccgaatctttgaaatggccggattattggagtttgataatgtaaatataaaagtattgatatattcaacataggatgggtataccttcctaaatcccttggtacataaatgataggaattaaaaaaatgcgcaaaaaaaaaaatagtggaaaaaaaaaaataagaaaaggtngngggtcgcgt

SEQ ID NO: 6114 - DNA, 824 bp, Zea mays
  Peptide Sequence Number=SeqID_11589
  Probeset Number=SeqID_20517
gagtaatcctgagtcatcagagtaaagagttaataaaatacaaaatacataagcgctgaattatagaaactcctatttcaagtgatgataaaagtaattgaatcattgataaaattattactataaagggtctttttaatcttattgtattacctataagagtaagtaagaggtggccagatactatattagccattaaacgaattctaagagtaaacggtcgaattgatgtactaattaattcaattaatactataaaactaattaagggtattggagtcccatttggtaccaaatggggaaaacattttattagtatatttttttcacccataaataaaaaagcctattcataggggtaatgaaataaaaaggtttattgcaatgggcctagttgatgtaaatgaattaggaaccagcccaataaaattagaaaaaaacacaaataaaaagattcttgtaaacataatttttgtactatctttataactttttaaagcaattcttagctgaattcctatttcttttagaagtattatgaataatattttagaccgcgagggataacaatataaagatagaaatataaagtaaagagaaaatagtataattattcagttcatttcttctattgggaatttaattcttgatttgggatcaaatgataaaaacagtcttatttttataatgttctttcttttattaccttttacatctttatttttaaataaaaattcaaaaaatgtagttgataaaattattataacaacaaaaattaacaaagttgataaaattatttgatttataggtaaaatttgaaaaat

SEQ ID NO: 6115 - DNA, 824 bp, Zea mays
  Peptide Sequence Number=SeqID_11590
  Probeset Number=SeqID_20518
atttttcaaattttacctataaatcaaataattttatcaactttgttaatttttgttgttataataattttatcaactacattttttgaatttttatttaaaaataaagatgtaaaaggtaataaaagaaagaacattataaaaataagactgtttttatcatttgatcccaaatcaagaattaaattcccaatagaagaaatgaactgaataattatactattttctctttactttatatttctatctttatattgttatccctcgcggtctaaaatattattcataatacttctaaaagaaataggaattcagctaagaattgctttaaaaagttataaagatagtacaaaaattatgtttacaagaatctttttatttgtgtttttttctaattttattgggctggttcctaattcatttacatcaactaggcccattgcaataaacctttttatttcattacccctatgaataggcttttttatttatgggtgaaaaaaatatactaataaaatgttttccccatttggtaccaaatgggactccaatacccttaattagttttatagtattaattgaattaattagtacatcaattcgaccgtttactcttagaattcgtttaatggctaatatagtatctggccacctcttacttactcttataggtaatacaataagattaaaaagaccctttatagtaataattttatcaatgattcaattacttttatcatcacttgaaataggagtttctataattcagcgcttatgtattttgtattttattaactctttactctgatgactcaggattactc

SEQ ID NO: 6116 - DNA, 1109 bp, Zea mays
  Peptide Sequence Number=SeqID_11591
  Probeset Number=SeqID_20519
ccttttctgctaaactttaaacattgaaccacagataacaacaaagtttgaaaaaataaaggtccaacaatcacaataataaaataacaagtaatttttaaaatgataaatcacttctgatttgacaggcccgctgcaataaataatttgtaagcttagttttataataaatttcatacttaatgaaaccttaaataattggcaaaaaccatttataatagacagggatcttaagtagcaagtccattgattaaaaaatgtcccttaacagatttaagagaaataatcgacttactgctaaggggccataggttggcacacaacataaggcaaattatgtaagtacattagctagaaaatgatgagtgagcagttttaaattaagtacataataagaattttatgaaacactttggctttggcacagtttgtacacttcgtcttattctgactagacggctttgtcttgagattaatactgaatgaatctgtctatgaaaaaagacactttgaagattactgactagataggaaattaaaaattaaacagatgaaagtgagattcgagtacagtaaaattcctactaaattttaaacatctgaaaggttacgaagaaagatttggattcaggaatttcaaaaattagcaggtaaatagttaccacacttggtttgtattgtttatgacctaataatgaaaccttaatgaaaatggcagccccaccactactaagttggcatcatgtcatggaattcatcctacaaaaaaagagaacagaagagaaggcagtctgtatctacacaagtatagtaaattaggcaaggcccagcctcttcttcatggattcaggcatgtctggtggaggtggtcgtggcatgcggagccacactttcactgcatcatagatgaaccactgagcggcagtgagggtaccaatcatgatgatcctgggaacaagacctccccacatacccttccagcctagtttcttggcaacatccattgctgtagatgacttgtctttgttaagcacagacacaacagtgtcagcagggtgagatacaatagcgcagaacacaccggcaatgtaaccagcagcaaaggttac

SEQ ID NO: 6117 - DNA, 1109 bp, Zea mays
  Peptide Sequence Number=SeqID_11592
  Probeset Number=SeqID_20520
gtaacctttgctgctggttacattgccggtgtgttctgcgctattgtatctcaccctgctgacactgttgtgtctgtgcttaacaaagacaagtcatctacagcaatggatgttgccaagaaactaggctggaagggtatgtggggaggtcttgttcccaggatcatcatgattggtaccctcactgccgctcagtggttcatctatgatgcagtgaaagtgtggctccgcatgccacgaccacctccaccagacatgcctgaatccatgaagaagaggctgggccttgcctaatttactatacttgtgtagatacagactgccttctcttctgttctctttttttgtaggatgaattccatgacatgatgccaacttagtagtggtggggctgccattttcattaaggtttcattattaggtcataaacaatacaaaccaagtgtggtaactatttacctgctaatttttgaaattcctgaatccaaatctttcttcgtaacctttcagatgtttaaaatttagtaggaattttactgtactcgaatctcactttcatctgtttaatttttaatttcctatctagtcagtaatcttcaaagtgtcttttttcatagacagattcattcagtattaatctcaagacaaagccgtctagtcagaataagacgaagtgtacaaactgtgccaaagccaaagtgtttcataaaattcttattatgtacttaatttaaaactgctcactcatcattttctagctaatgtacttacataatttgccttatgttgtgtgccaacctatggccccttagcagtaagtcgattatttctcttaaatctgttaagggacattttttaatcaatggacttgctacttaagatccctgtctattataaatggtttttgccaattatttaaggtttcattaagtatgaaatttattataaaactaagcttacaaattatttattgcagcgggcctgtcaaatcagaagtgatttatcattttaaaaattacttgttattttattattgtgattgttggacctttattttttcaaactttgttgttatctgtggttcaatgtttaaagtttagcagaaaagg

SEQ ID NO: 6118 - DNA, 216 bp, Zea mays
  Peptide Sequence Number=SeqID_11593
  Probeset Number=SeqID_20521
ggtacgatagctgtacggagactgtgaaacagggtttacgaatcatcatcgtccaccggcaggtccgggaccttgacgtcgctgttgctctcgatgaagtcgtagaaggccgagacgcgagtgaacacgacgggcttgccggtggtgcagctctcgggccggccgaaggacacgatgccgatcagctccttccgcacgaagccgtcgtccaccgtc

SEQ ID NO: 6119 - DNA, 216 bp, Zea mays
  Probeset Number=SeqID_20522
gacggtggacgacggcttcgtgcggaaggagctgatcggcatcgtgtccttcggccggcccgagagctgcaccaccggcaagcccgtcgtgttcactcgcgtctcggccttctacgacttcatcgagagcaacagcgacgtcaaggtcccggacctgccggtggacgatgatgattcgtaaaccctgtttcacagtctccgtacagctatcgtacc

SEQ ID NO: 6120 - DNA, 1376 bp, Zea mays
  misc_feature (1)..(3): n is a, c, g, or t
  misc_feature (22)..(24): n is a, c, g, or t
  misc_feature (36)..(38): n is a, c, g, or t
  misc_feature (45)..(45): n is a, c, g, or t
  misc_feature (47)..(55): n is a, c, g, or t
  misc_feature (1074)..(1376): n is a, c, g, or t
  Peptide Sequence Number=SeqID_11594
  Probeset Number=SeqID_20523
nnntcggcacgaggccgcaacnnngcgtcccgggannntccgacncnnnnnnnnnggcgggcagcacgcaccggtggagccccggcgcccgcgccttctccacggcgccggctacgcggaccaccgtgccgctcgcgcacctggccgctctcccggcgtctctgccagaatcgggctacaccgtcacgccgcctgtccaaccctggccgcgccgcctcacggcgcggtcgctgtcccgtctcctcctcggcgcggccacgcccgagctcgcggtcctcgccctccgccacgcgctcttccacgccgcgcatcctctgccgccctcgctccccgtcttcgccgcggccctctcccgcctctcccacgccgacgctggcgccgcggcccgccacctgccccccgtcctctccctgctccgcgcctcccgcctcccggccttctccgaccgcccgttcctgccgctcctccgcgcgctgcggccgctcccgtccctccgccttttcctctccctcccgtccttcaactcccgtccttccacccgctcctttaacgcgctcctccactctctcgtctccgcacgccgccgccgcctcgccgccgcgctcttccgggccgcgccaaccaagttgtacatcacgccgaaccttgtgtcctgcaacatcctgctcaagggccttgttggcatcggtgacctcgattctgcgctgaaggtgctcgacgaaatgactggatgggggatcgtcccggatgtcgtcacttacacgacggttctcactgcctactgtgccaaaggggatctcgagggtgcacagcagctctttgacgatattattgccagtgggcgtaggccagatgctactatgtacacagtgctcatagatgggtattgccatcgtaggaagttgcaagatgcagcaaggatcatggatgagatgggagctgctggggtgcagccaaatgaggatacatactctgtggtgaatctggggtggtcaaaggagggaaaaggagggaaaatccccattttgatgtgatttagcgagggagatgctagtgaaaggtgaaagggacttnnnnnnnnnnnnnnnnnnnnnnnnnnnnnnnnnnnnnnnnnnnnnnnnnnnnnnnnnnnnnnnnnnnnnnnnnnnnnnnnnnnnnnnnnnnnnnnnnnnnnnnnnnnnnnnnnnnnnnnnnnnnnnnnnnnnnnnnnnnnnnnnnnnnnnnnnnnnnnnnnnnnnnnnnnnnnnnnnnnnnnnnnnnnnnnnnnnnnnnnnnnnnnnnnnnnnnnnnnnnnnnnnnnnnnnnnnnnnnnnnnnnnnnnnnnnnnnnnnnnnnnnnnnnnnnnnnnnnnnnnnnnnnnnnnnnnnnnnnnnnnn

SEQ ID NO: 6121 - DNA, 390 bp, Zea mays
  Peptide Sequence Number=SeqID_11595
  Probeset Number=SeqID_20524
accggtgcacaaattaaagtcttcagaactcaatgacaaattacagtagagctggaaccagaaacaccgcccatgtataacccaaaaaaacaaagtaacgacatcattattattttttaccatgtacacattaaaggaacgacaatatcgttcttcccttccaagagatttttaagataagttattaattacataatacaatcaatttttgaattggtactggttggggtgcgcctggtccagccaatagtgcaacggccggacgacgcttgaggaacccaggggcaagccactgttgtgattcctcccccacaaaaaataaatttaatatcgaaggggacacatagtccacatatcagatattaaactgacccgaacagatactacact

SEQ ID NO: 6122 - DNA, 390 bp, Zea mays
  Peptide Sequence Number=SeqID_11596
  Probeset Number=SeqID_20525
agtgtagtatctgttcgggtcagtttaatatctgatatgtggactatgtgtccccttcgatattaaatttattttttgtgggggaggaatcacaacagtggcttgcccctgggttcctcaagcgtcgtccggccgttgcactattggctggaccaggcgcaccccaaccagtaccaattcaaaaattgattgtattatgtaattaataacttatcttaaaaatctcttggaagggaagaacgatattgtcgttcctttaatgtgtacatggtaaaaaataataatgatgtcgttactttgtttttttgggttatacatgggcggtgtttctggttccagctctactgtaatttgtcattgagttctgaagactttaatttgtgcaccggt

SEQ ID NO: 6123 - DNA, 816 bp, Zea mays
  misc_feature (1)..(2): n is a, c, g, or t
  misc_feature (28)..(30): n is a, c, g, or t
  misc_feature (779)..(816): n is a, c, g, or t
  Probeset Number=SeqID_20526
nnaagacctcgagtgactgccatcgccnnncgctgctttgctcgcgggcccatcttggctggcagaggcggcttggtctcgaccaggcctaaggcagggcccggagggcgcgtaggcagcgggtttgggcatgatgaccgtctggccgggcggaggaggcgcggccacggcggggctcggctgttggcatggagcggaagatgcgaggagggcgtgccttgtgctcgtcccctgggcctgatccgctgctagcgctgttcccggctgccactggctgctccaccgatggctgctatggtgcgaaggcggacctgaccatcctttcggggtctccgctggtggtggctgcggcgacggactcctgctgctagttgagaggagctgctggttgggaggagcgggaacctgtacgctttcattattgacatcatctccgacgaggtaggggtagagagaagaggacgacgctgctgctcgttactgttggaaagggctgctgcatatggataggagcatcatgaactaatggtgaacatcatttgcaaattttacttgaccaaggatcattctatacaacggaggaagatcacgagaagtaaaagtgttgtctaagatgtacattctttggctgtggagtctgtagactatacatatacacccattgttctggcgaggctgtgtacactgtacatcaaatgaattttacgatacttcttgttgcgtttacgcacaaaaacacaaaacgcacgttgtattgtacactacattttttgcctcgnnnnnnnnnnnnnnnnnnnnnnnnnnnnnnnnnnnnnn

SEQ ID NO: 6124 - DNA, 896 bp, Zea mays
  misc_feature (1)..(195): n is a, c, g, or t
  misc_feature (849)..(896): n is a, c, g, or t
  Peptide Sequence Number=SeqID_11597
  Probeset Number=SeqID_20527
nnnnnnnnnnnnnnnnnnnnnnnnnnnnnnnnnnnnnnnnnnnnnnnnnnnnnnnnnnnnnnnnnnnnnnnnnnnnnnnnnnnnnnnnnnnnnnnnnnnnnnnnnnnnnnnnnnnnnnnnnnnnnnnnnnnnnnnnnnnnnnnnnnnnnnnnnnnnnnnnnnnnnnnnnnnnnnnnnnnnnnnnnnnnnnnnnnncgggctcagaggatgaagctggagcacttcaacgagttgctgggcaagctaaggcccaggtacagcccgacgcacggccgcccaacccgaacgccaccgctgttgctgccgtggctaaaccagcttggggagaagagacagagcaggatgtcgagaaagaatgggtgaagaccagctcagcggacgctgcaaatcggcgcaccagaagccatgacccaatgcagcaggctatgaaaagaagttactctaacacaggggatactaatgaagagtctcgaagaatcaggccaaagcgaaacagatcaaattctcttaggaatcagggaggtacgaccgcagagggcgccgccaatgcagggagagcggggagggacttcccagacgggctccggacagaatttacagatcatccgccacttgggactaataacctgacattttcggacttggtttcaaagggtctgttcgatgatgaaccttctgtagctgctgctgctgaacacttcacttcaacctcttgtcaagctgactgggacaaacgtggatctggcatgtcatatccgtattctagtcagaatcagatggagatgtctcgtgtcaaggcagaacttatcgatgaacctgtcgctcttgagactgacatgacaaatctgnnnnnnnnnnnnnnnnnnnnnnnnnnnnnnnnnnnnnnnnnnnnnnnn

SEQ ID NO: 6125 - DNA, 414 bp, Zea mays
  Probeset Number=SeqID_20528
gtttgatcataatcaagagaaaacatctccatttatgtatccagatagataatttagtattcaggttccaactaatacccaatcaagttaatttagtactccaaatcacaaaaaatcatctacattcatgcatcaagatagataattgaaagcaccataatttagttctccaaatcataaaaatcatctccattcatgcatctacatcacaaaaaaatcacatcttcattcaggtgctacccaaggtccttggtctagccttctccttcctctatacttgcctgaggagacggagttgctagcatgcgaacccgaggtgacaccgacgtcggaggtgacgctgtgctgacagaggcggcggcgtgctcggataactccatgcgacgagagaagacgaaccggggatccccgcgt

SEQ ID NO: 6126 - DNA, 414 bp, Zea mays
  Peptide Sequence Number=SeqID_11598
  Probeset Number=SeqID_20529
acgcggggatccccggttcgtcttctctcgtcgcatggagttatccgagcacgccgccgcctctgtcagcacagcgtcacctccgacgtcggtgtcacctcgggttcgcatgctagcaactccgtctcctcaggcaagtatagaggaaggagaaggctagaccaaggaccttgggtagcacctgaatgaagatgtgatttttttgtgatgtagatgcatgaatggagatgatttttatgatttggagaactaaattatggtgctttcaattatctatcttgatgcatgaatgtagatgattttttgtgatttggagtactaaattaacttgattgggtattagttggaacctgaatactaaattatctatctggatacataaatggagatgttttctcttgattatgatcaaac

SEQ ID NO: 6127 - DNA, 645 bp, Zea mays
  misc_feature (1)..(1): n is a, c, g, or t
  misc_feature (625)..(645): n is a, c, g, or t
  Probeset Number=SeqID_20530
ntcctcgtcacgctcagcaagccccggtggctcatcgccctcgccaacgctatggtcgtcgtccatgtcattggcagctaccagattttcgcgatgccggtgttcgacatgatggagacggtcctggtgaagaaactgcatttcccgcccggccttgccctccgtctcattgcccggagcacctatgtcgcgttcacgacgttcatagccattaccatccccttcttcggcgggctgcttggtttcttcggcgggttcgcctttgcgccgacaacctatttccttccatgcgtcatggtggcttgcaatctgcaagcccaaacggttcagtctcccatggttcgccaactgggcctgcattgttcttggagtagtcctgatggtcctggcgccaatcggagcactccggcagatcatcctgtctgccaagacgtaccgattctactcgtaagcaaactagctactcagccacagcgcgctgcgtgtcttctgtcgtaccaaccaaatagaagaggatagcctcctgtaaccagagcttgatccgtccgaatgagatgatagtcgtcagaggcatgttgtgagctagtgttcagttgctgattaattaagtcagagggtctttctnnnnnnnnnnnnnnnnnnnnn

SEQ ID NO: 6128 - DNA, 725 bp, Zea mays
  Peptide Sequence Number=SeqID_11599
  Probeset Number=SeqID_20531
gagatgcttgtcatatctaatcttctggaagcctattatttgtggacctcccttatgggctcatagcagagtccatggacccatccactcgaacttttctttaccggactcagtctagtacccatagtgcatatcattatcagactttaatggcttctaatgtcttacttaaggggttgatcattttatctaagtccaactccaccttacatactgctgaattataccttgtatagtataaaacaatattagtccaaatagttgctttaatcaaacaccaaaagtccaaacttaatgacaaatggggtatgttttcattacaatctcgttttttgtgcttgataacaacacaatcaaagcatgcaaataataaatataagaatcaaaattcactaactacttactaggatgcaacgcaagagcacgatcatatgatgctaaaagataccattgaaaagcaaaaagtaatgcttatcttgcctttgcctaactctataatccactttctacctttcttgatcatcacctaaaatagaaatatcgccatttaccaattgtagacttaaaattaaatttcaattgcacctggccctatcgagatgaatagctaccaaacacagctaagctgcaagcccaacatatcagtacgattttcatatattcttttttacataatatgacacttcttccgttctaaaatatagttctttctagcttattttttc

SEQ ID NO: 6129 - DNA, 725 bp, Zea mays
  Probeset Number=SeqID_20532
gaaaaaataagctagaaagaactatattttagaacggaagaagtgtcatattatgtaaaaaagaatatatgaaaatcgtactgatatgttgggcttgcagcttagctgtgtttggtagctattcatctcgatagggccaggtgcaattgaaatttaattttaagtctacaattggtaaatggcgatatttctattttaggtgatgatcaagaaaggtagaaagtggattatagagttaggcaaaggcaagataagcattactttttgcttttcaatggtatcttttagcatcatatgatcgtgctcttgcgttgcatcctagtaagtagttagtgaattttgattcttatatttattatttgcatgctttgattgtgttgttatcaagcacaaaaaacgagattgtaatgaaaacataccccatttgtcattaagtttggacttttggtgtttgattaaagcaactatttggactaatattgttttatactatacaaggtataattcagcagtatgtaaggtggagttggacttagataaaatgatcaaccccttaagtaagacattagaagccattaaagtctgataatgatatgcactatgggtactagactgagtccggtaaagaaaagttcgagtggatgggtccatggactctgctatgagcccataagggaggtccacaaataataggcttccagaagattagatatgacaagcatctc

SEQ ID NO: 6130 - DNA, 438 bp, Zea mays
  Peptide Sequence Number=SeqID_11600
  Probeset Number=SeqID_20533
gggcgccacctattcgccggttcctctcggctaagtacagtcaacttcgccgcctccttccgcgagaggaggccccttccacaactcataaacgatatggacacatcaagccctgcatgacttgacaatcgcatagattctaaacatgcttttagggcaaagagtgcaaacaggccgcacaaggccaacacagtgacgggggaacgcttgctcctcacccccatgatgggcatcaattgattttcaaaagcgccatggatgaacctgattaacactatatggaggtgtatggaattgctgacaacagctcaaaccatacgacgctgagataggcccatatttatgagcctgactttgagacacagactttaaattaattgcgcagcctgacaagtaacaagttcaagcgcatgttactgcaaaggtcatgatgaagag

SEQ ID NO: 6131 - DNA, 438 bp, Zea mays
  Probeset Number=SeqID_20534
ctcttcatcatgacctttgcagtaacatgcgcttgaacttgttacttgtcaggctgcgcaattaatttaaagtctgtgtctcaaagtcaggctcataaatatgggcctatctcagcgtcgtatggtttgagctgttgtcagcaattccatacacctccatatagtgttaatcaggttcatccatggcgcttttgaaaatcaattgatgcccatcatgggggtgaggagcaagcgttcccccgtcactgtgttggccttgtgcggcctgtttgcactctttgccctaaaagcatgtttagaatctatgcgattgtcaagtcatgcagggcttgatgtgtccatatcgtttatgagttgtggaaggggcctcctctcgcggaaggaggcggcgaagttgactgtacttagccgagaggaaccggcgaataggtggcgccc

SEQ ID NO: 6132 - DNA, 1233 bp, Zea mays
  misc_feature (1)..(44): n is a, c, g, or t
  misc_feature (708)..(712): n is a, c, g, or t
  misc_feature (1190)..(1233): n is a, c, g, or t
  Peptide Sequence Number=SeqID_11601
  Probeset Number=SeqID_20535
nnnnnnnnnnnnnnnnnnnnnnnnnnnnnnnnnnnnnnnnnnnngacatgagttaggagctgctccgattttgccgagcacacctgtggcatctcctgatgacttagcagatcaaatcgcagacatacttgatttttttggactggattcggttatgtgcttaggtgtcactgcgggcgcatacattcttactctgtttgcaacgaagtatagggagcgagtactaggacttattctcgtttcacctctatgtaaagctccctcatggtctgagtggttttataataaggtaatgtcaaatttactgtattattatggcatgtgtaatgtcgtgaaggatattttgttgcagcgctactttggaaagggagtacgtggaggctctgctgaacctgaatcagatattgtgcaggcttgcagaagctttctagatcaacggcagtgtgtgaacgtgtggcgatttatccaaactatcaacgagagaaaagacttgacagagaacctgaagcagctacagtgcaggacactaatttttgttggtgagaattcccagttccatgctgaagctgttcacatgactgcaaagcttgataggcgatatagcgctcttgtggaggtacaagcttgtggctcggttgtgacagaggagcaacctcatgcaatgctgataccaatggagtactttctcatgggatatggactgtacannnnnagccagataaactgtagccctcgtagccctctgaatccgttttgtatatcaccagagctcctctctcctgagagcatgggggttaagctctgatgaatcccctaatgattttggtaaaaatcattaagttaaggtggatacacatcttgtcatatgatcaaatggtttcgcgaaaaatcaataatcagacaacaagatgtgcgaactcgatattttacacgactctctttaccaattctgccccgaattacacttaaaacgactcaacagcttaacgttggcttgccacgcattacttgactgtaaaactctcactcttaccgaacttggccgtaacctgccaaccaaagcgagaacaaaacataacatcaaacgaatcgaccgattgttaggtaatcgtcacctccacaaagagcgactcgctgtataccgttggcatgctagctttatctgttcgggcaatacgatgcccattgtnnnnnnnnnnnnnnnnnnnnnnnnnnnnnnnnnnnnnnnnnnnn

SEQ ID NO: 6133 - DNA, 715 bp, Zea mays
  misc_feature (1)..(1): n is a, c, g, or t
  Peptide Sequence Number=SeqID_11602
  Probeset Number=SeqID_20536
ngcagtcgcgcgctccctggcttctctcctctcccaaccgccgcggcctctatctcttccttacgcttccttctctccaccgcggtcctgcaccacgggcaccaccaccggtgccgccgcctcgcccccacggcctacgtcgccgccgcggcagctgcggctgaggccccgctccccatggcgccgcgcttcggtcgggccacgcggcaacccataatcatgttcctcgccatcctggccgaagcactgtaggaatgggagcgaggggggagcatggatggaaggcaaaaagcatggcaggagaacgcgagaagatgctagggttattgtccttttcatgccaactctagccggatatcttccccgatgccgctgcatattatttcggtcatcttcttgatccatgatttcgtgcagactctgacctcgattcctttatgaatgttttgcaacactgatttgtgaccaatccactctgtaaggcaagtgttttatatcttgttcatctcgcatcgacaccaggggtcgaccccctggccagaccagaaatggcgttgagccgagccgcagctgggcatgcgtgtgaggtgaaaggcgctctgatttgggggccgggatggagtgattacggataaaggtgagagccacgatccaaggctcttgatccccttcactggtgaaatgaccgagcagaggtccgggccaaagccatctg

SEQ ID NO: 6134 - DNA, 788 bp, Zea mays
  Probeset Number=SeqID_20537
atagcaacacaccagcggagtgtattgatttgactcgatagtagcaatttacaataggtattataggagaggatagtattggaaatggagataaggaatgaaaggatagcttgagcaggaagaagaatatgttctgtttgttcgttccctaccccaagccacaaccggaaccctaaatacaccactagttggcttcactctttcccagcccatctgcctttctgagccggcccacttgcatcatcagccacacatgctttctgtagaccatccatacagctgttgacagcgagcgtagtccaggcgcggatggcgagggccaagcagaggggaatgacatccagcgacacaagggcagtggtcgtgaactggtgaaggcgagctcgaggatctcaggcgcatcctgaggcttgtgctcgcacgggacctagcgaggtcggatagcgcggtggggagcacatggcggagctcagatcagggcaccaggagaagatccagcgtaggggcatccatggagggagctccgtttggtcgccatggaagaggagcaggggcactgggtgccgactaccgagcgccagtagagggcatcgtgcgccaagaagcctaggcactgaggttgtggagaaagggagccagcgccatggatggggtagaaggagaggagctcggctcctaggggaaggagacacgcgtccttggcgtgagggtaggagcggcggagtgaacaaggaagatgagagggttgtgcggctgggaaggggaaaatgagggattccctccccccc

SEQ ID NO: 6135 - DNA, 788 bp, Zea mays
  Peptide Sequence Number=SeqID_11603
  Probeset Number=SeqID_20538
gggggggagggaatccctcattttccccttcccagccgcacaaccctctcatcttccttgttcactccgccgctcctaccctcacgccaaggacgcgtgtctccttcccctaggagccgagctcctctccttctaccccatccatggcgctggctccctttctccacaacctcagtgcctaggcttcttggcgcacgatgccctctactggcgctcggtagtcggcacccagtgcccctgctcctcttccatggcgaccaaacggagctccctccatggatgcccctacgctggatcttctcctggtgccctgatctgagctccgccatgtgctccccaccgcgctatccgacctcgctaggtcccgtgcgagcacaagcctcaggatgcgcctgagatcctcgagctcgccttcaccagttcacgaccactgcccttgtgtcgctggatgtcattcccctctgcttggccctcgccatccgcgcctggactacgctcgctgtcaacagctgtatggatggtctacagaaagcatgtgtggctgatgatgcaagtgggccggctcagaaaggcagatgggctgggaaagagtgaagccaactagtggtgtatttagggttccggttgtggcttggggtagggaacgaacaaacagaacatattcttcttcctgctcaagctatcctttcattccttatctccatttccaatactatcctctcctataatacctattgtaaattgctactatcgagtcaaatcaatacactccgctggtgtgttgctat

SEQ ID NO: 6136 - DNA, 324 bp, Zea mays
  Probeset Number=SeqID_20539
ctttatatatctagttgtatttgcatgtttttattggaggttttgttcttactttgttttttttcgtatttattatgaagtctgtactattttttttcagattactgttttgtctttctcgctatctttcgggtttttctatggttttttatggtttgcttttcgttttagtattgggttagtatagggtagatgttttttatttgtatgttttttgactgtatttttagctggtgttaagagatctttgatggtatgaaacagtttctggatcaaccctttttagaattacttatctgctttactcgagaattggcatcgcgt

SEQ ID NO: 6137 - DNA, 603 bp, Zea mays
  Peptide Sequence Number=SeqID_11604
  Probeset Number=SeqID_20540
atggacatggatcatgattacatcaataaagaagactatgaacatgtgcatcgcacaatctgagcgtcgcacaaaaaaatcgagttcactccattttataggaactgtgctttcatgtccagcattaagtttgacatgaagatttctgtgaaccaacttcctttcaagaaaatttctaagaacagtttatacatccacaactagttggccaaccattgatcttcatgcatatttcatagtgctaactgctaacttgaacaagattgtagatcctatttatgttttgaatttgatgcttctgctgacttcttcttgaacataaaatacatgtggagcctatttggttcctcttgattattatggattttattttgcatttggtttgattaggttaactacatggttctaactagccccctatatcgccgctaagccactatagctatgctatatgattttcagagggcctaccactatgatattgtcatttgttcattattacatctaacgatgctttagctctgctaaacaccattatttggcttacccgtgaaattggtttagcactgctgattctgacagagtcaaaacattcattctttg

SEQ ID NO: 6138 - DNA, 603 bp, Zea mays
  Peptide Sequence Number=SeqID_11605
  Probeset Number=SeqID_20541
caaagaatgaatgttttgactctgtcagaatcagcagtgctaaaccaatttcacgggtaagccaaataatggtgtttagcagagctaaagcatcgttagatgtaataatgaacaaatgacaatatcatagtggtaggccctctgaaaatcatatagcatagctatagtggcttagcggcgatatagggggctagttagaaccatgtagttaacctaatcaaaccaaatgcaaaataaaatccataataatcaagaggaaccaaataggctccacatgtattttatgttcaagaagaagtcagcagaagcatcaaattcaaaacataaataggatctacaatcttgttcaagttagcagttagcactatgaaatatgcatgaagatcaatggttggccaactagttgtggatgtataaactgttcttagaaattttcttgaaaggaagttggttcacagaaatcttcatgtcaaacttaatgctggacatgaaagcacagttcctataaaatggagtgaactcgatttttttgtgcgacgctcagattgtgcgatgcacatgttcatagtcttctttattgatgtaatcatgatccatgtccat

SEQ ID NO: 6139 - DNA, 440 bp, Zea mays
  Probeset Number=SeqID_20542
agaacacgcgccctggtatcaacttatgaaactacaatttgcatctttcatgttccctttctttcatcccctgcattagcggtcaatcaacaatgtgcatgcccgacatagcaagttctcctctctcacgcatttcatcaagcagcctcccagcaccctccaaatgtaaaacttcacataaccatcaaccgtcagcacccgtccacgcattcaaaatacattttacttgtgttgagttgacttgtttttccctaagaacaagaacaagcagacttctctagtggatgcgatgcggatgcggatgctagacaatttgccgtgggacctgaactcctactgcatgccggactttactgtgtaatagcagcaggaacacaacagctgccagcagaaagcaaaagggactcccgttccagcagtgagaccaggagccctcggtc

SEQ ID NO: 6140 - DNA, 440 bp, Zea mays
  Peptide Sequence Number=SeqID_11606
  Probeset Number=SeqID_20543
gaccgagggctcctggtctcactgctggaacgggagtcccttttgctttctgctggcagctgttgtgttcctgctgctattacacagtaaagtccggcatgcagtaggagttcaggtcccacggcaaattgtctagcatccgcatccgcatcgcatccactagagaagtctgcttgttcttgttcttagggaaaaacaagtcaactcaacacaagtaaaatgtattttgaatgcgtggacgggtgctgacggttgatggttatgtgaagttttacatttggagggtgctgggaggctgcttgatgaaatgcgtgagagaggagaacttgctatgtcgggcatgcacattgttgattgaccgctaatgcaggggatgaaagaaagggaacatgaaagatgcaaattgtagtttcataagttgataccagggcgcgtgttct

SEQ ID NO: 6141 - DNA, 328 bp, Zea mays
  Probeset Number=SeqID_20544
ggggctacatatagcaattcttggctttccagatcatctggaaatgtctcggccgttcttgatacacctcagtgcaggccaaagtgacagccccgcaggccacagccaacagaaaacaagagagcttcctgaatcagagctaactatataatgaccagatggatgttgtgagctctgatcatcgccatcctagtcaatgaaaccactggtttcctgagagttcttcacccgatgcagaaacactttgtcaattctcacatttgcagacactgcgaacagcatccactatcttcttccacgatattggctttgcgaggtgaagatccat

SEQ ID NO: 6142 - DNA, 328 bp, Zea mays
  Peptide Sequence Number=SeqID_11607
  Probeset Number=SeqID_20545
atggatcttcacctcgcaaagccaatatcgtggaagaagatagtggatgctgttcgcagtgtctgcaaatgtgagaattgacaaagtgtttctgcatcgggtgaagaactctcaggaaaccagtggtttcattgactaggatggcgatgatcagagctcacaacatccatctggtcattatatagttagctctgattcaggaagctctcttgttttctgttggctgtggcctgcggggctgtcactttggcctgcactgaggtgtatcaagaacggccgagacatttccagatgatctggaaagccaagaattgctatatgtagcccc

SEQ ID NO: 6143 - DNA, 152 bp, Zea mays
  Probeset Number=SeqID_20546
atttactctctagtctattcgtagcatatgagagaatcgtaaaaactggaacatcaaacctccactaaaactaactccagagcatggcttatacaactaacgctaggtatacttacattacaacaccccggccataaggccgaatcccgggt

SEQ ID NO: 6144 - DNA, 152 bp, Zea mays
  Peptide Sequence Number=SeqID_11608
  Probeset Number=SeqID_20547
acccgggattcggccttatggccggggtgttgtaatgtaagtatacctagcgttagttgtataagccatgctctggagttagttttagtggaggtttgatgttccagtttttacgattctctcatatgctacgaatagactagagagtaaat

SEQ ID NO: 6145 - DNA, 203 bp, Zea mays
  Probeset Number=SeqID_20548
gtataaaaatattgacaatatttatagctgtgaataaatttattacaagaatatactttaataatctatcgccaaattttatacccggccataacggccgacatgtttttttttttttttttttttttttttttttcggaaacatatagctgggttaaataagcaccattacggtcctatcagataacacagttgctacagac

SEQ ID NO: 6146 - DNA, 487 bp, Zea mays
  Peptide Sequence Number=SeqID_11609
  Probeset Number=SeqID_20549
gcgtggtcgcggccgaggtacgcggggcatcaagaaagcatccatctctcggtagagaaccatagccagcttccttcatccatggcgctactcaagataagcatcaagagtacactggttggttttcaccgtcacatggctgccgatgacactccttgctacggccgtgccaccagctggcaaccaggaagcggagaaccaagcggtctgcgcccaagtgaaaggcacctgtacacagaaggtgtgtggcggaatgtgtgctgagataggctccaaaggtgttgggtcatgcaagttgaatggcaaggtctcctactgctgctgccaaccaaaatcccccacaaacatcggtgtccactagctagtagctaggaaccagttaatttggttttttgatccatagtatggctgttaaattgacatttttcattaataataaacgaaacgtgtggtgcgtgattgaccaataaatgtgtggcaccaggaa

SEQ ID NO: 6147 - DNA, 861 bp, Zea mays
  misc_feature (11)..(11): n is a, c, g, or t
  misc_feature (13)..(19): n is a, c, g, or t
  misc_feature (31)..(32): n is a, c, g, or t
  misc_feature (150)..(152): n is a, c, g, or t
  misc_feature (250)..(252): n is a, c, g, or t
  misc_feature (275)..(277): n is a, c, g, or t
  misc_feature (281)..(284): n is a, c, g, or t
  misc_feature (288)..(288): n is a, c, g, or t
  misc_feature (290)..(290): n is a, c, g, or t
  misc_feature (299)..(301): n is a, c, g, or t
  misc_feature (304)..(309): n is a, c, g, or t
  misc_feature (326)..(326): n is a, c, g, or t
  misc_feature (330)..(330): n is a, c, g, or t
  misc_feature (345)..(345): n is a, c, g, or t
  misc_feature (374)..(374): n is a, c, g, or t
  misc_feature (383)..(383): n is a, c, g, or t
  misc_feature (385)..(385): n is a, c, g, or t
  misc_feature (400)..(400): n is a, c, g, or t
  misc_feature (402)..(402): n is a, c, g, or t
  misc_feature (416)..(416): n is a, c, g, or t
  misc_feature (418)..(418): n is a, c, g, or t
  misc_feature (429)..(429): n is a, c, g, or t
  misc_feature (444)..(444): n is a, c, g, or t
  misc_feature (451)..(451): n is a, c, g, or t
  misc_feature (458)..(458): n is a, c, g, or t
  misc_feature (460)..(460): n is a, c, g, or t
  misc_feature (466)..(466): n is a, c, g, or t
  misc_feature (483)..(483): n is a, c, g, or t
  misc_feature (489)..(489): n is a, c, g, or t
  misc_feature (501)..(501): n is a, c, g, or t
  misc_feature (515)..(515): n is a, c, g, or t
  misc_feature (537)..(537): n is a, c, g, or t
  misc_feature (552)..(552): n is a, c, g, or t
  misc_feature (589)..(589): n is a, c, g, or t
  misc_feature (600)..(600): n is a, c, g, or t
  misc_feature (604)..(604): n is a, c, g, or t
  misc_feature (612)..(612): n is a, c, g, or t
  misc_feature (653)..(653): n is a, c, g, or t
  misc_feature (672)..(672): n is a, c, g, or t
  misc_feature (712)..(712): n is a, c, g, or t
  misc_feature (734)..(734): n is a, c, g, or t
  misc_feature (736)..(736): n is a, c, g, or t
  misc_feature (746)..(746): n is a, c, g, or t
  misc_feature (774)..(774): n is a, c, g, or t
  misc_feature (788)..(788): n is a, c, g, or t
  misc_feature (806)..(806): n is a, c, g, or t
  misc_feature (811)..(812): n is a, c, g, or t
  misc_feature (834)..(834): n is a, c, g, or t
  misc_feature (838)..(838): n is a, c, g, or t
  misc_feature (843)..(843): n is a, c, g, or t
  Probeset Number=SeqID_20550
atgaataatcntnnnnnnncattaatatatnngcatgaatgaatataaacaatattgaattacatttataccttcggcttgacagaaggcaaagatccatgtgtgacgtgcaagtgaatacaagtcagcgtgaacagtacggggttactnnncatctatttataggcacgagatgcagcccggtcgaaattacattcatgccctcaacaaataactataaacatgacacaaactataaaggactgatcgnnnttttcctctttaggtaggttccnnnttcnnnncctnanccgaagctnnnctnnnnnncaagggggagcttttgnccancccaaacccccccanggggggcttttcctttttttgggtccccntccaaattngnccatgggaaaagggngnccaaatattaaagnangtttgaaaaangggtggttttttttntggaggncccgacntntttttntcccccctcccccatcnaagctnccgagtcatctntcgctttttaagcncccatgagcgcaagaagtatantaagatccctctttnctatcccggtatttcaaagtgcgctcccatactttcngtccccttagncaanccaccatnttttgatggggaagattattatatgtggagtgataaaatgnggccccatttacccccctntacgaaagaatttgggatattgttgagtatggaccgcagntacttaaggcggggacaaagantncgattcggangaggcccgccccaaattaggccactttncctcccaaaccacntttatcctcctcccctcnttatnnagagaggggggggggggggggnatanggagnttttttttctctctctcc

SEQ ID NO: 6148 - DNA, 764 bp, Zea mays
  misc_feature (1)..(164): n is a, c, g, or t
  misc_feature (195)..(195): n is a, c, g, or t
  misc_feature (232)..(232): n is a, c, g, or t
  misc_feature (242)..(242): n is a, c, g, or t
  misc_feature (248)..(248): n is a, c, g, or t
  misc_feature (252)..(253): n is a, c, g, or t
  misc_feature (256)..(257): n is a, c, g, or t
  misc_feature (262)..(262): n is a, c, g, or t
  misc_feature (268)..(268): n is a, c, g, or t
  misc_feature (270)..(270): n is a, c, g, or t
  misc_feature (289)..(289): n is a, c, g, or t
  misc_feature (302)..(302): n is a, c, g, or t
  misc_feature (309)..(309): n is a, c, g, or t
  misc_feature (321)..(322): n is a, c, g, or t
  misc_feature (333)..(333): n is a, c, g, or t
  misc_feature (335)..(335): n is a, c, g, or t
  misc_feature (338)..(338): n is a, c, g, or t
  misc_feature (346)..(346): n is a, c, g, or t
  misc_feature (354)..(355): n is a, c, g, or t
  misc_feature (358)..(358): n is a, c, g, or t
  misc_feature (361)..(362): n is a, c, g, or t
  misc_feature (367)..(367): n is a, c, g, or t
  misc_feature (369)..(369): n is a, c, g, or t
  misc_feature (381)..(381): n is a, c, g, or t
  misc_feature (383)..(383): n is a, c, g, or t
  misc_feature (388)..(388): n is a, c, g, or t
  misc_feature (398)..(398): n is a, c, g, or t
  misc_feature (413)..(413): n is a, c, g, or t
  misc_feature (423)..(424): n is a, c, g, or t
  misc_feature (438)..(438): n is a, c, g, or t
  misc_feature (446)..(447): n is a, c, g, or t
  misc_feature (449)..(449): n is a, c, g, or t
  misc_feature (452)..(454): n is a, c, g, or t
  misc_feature (465)..(465): n is a, c, g, or t
  misc_feature (473)..(473): n is a, c, g, or t
  misc_feature (476)..(476): n is a, c, g, or t
  misc_feature (499)..(499): n is a, c, g, or t
  misc_feature (501)..(501): n is a, c, g, or t
  misc_feature (506)..(506): n is a, c, g, or t
  misc_feature (512)..(513): n is a, c, g, or t
  misc_feature (518)..(518): n is a, c, g, or t
  misc_feature (524)..(524): n is a, c, g, or t
  misc_feature (526)..(526): n is a, c, g, or t
  misc_feature (545)..(545): n is a, c, g, or t
  misc_feature (550)..(550): n is a, c, g, or t
  misc_feature (561)..(561): n is a, c, g, or t
  misc_feature (574)..(574): n is a, c, g, or t
  misc_feature (605)..(609): n is a, c, g, or t
  misc_feature (613)..(615): n is a, c, g, or t
  misc_feature (617)..(622): n is a, c, g, or t
  misc_feature (633)..(636): n is a, c, g, or t
  misc_feature (639)..(640): n is a, c, g, or t
  misc_feature (669)..(673): n is a, c, g, or t
  misc_feature (686)..(690): n is a, c, g, or t
  misc_feature (698)..(701): n is a, c, g, or t
  misc_feature (720)..(722): n is a, c, g, or t
  misc_feature (746)..(748): n is a, c, g, or t
  misc_feature (762)..(764): n is a, c, g, or t
  Peptide Sequence Number=SeqID_11610
  Probeset Number=SeqID_20551
nnnnnnnnnnnnnnnnnnnnnnnnnnnnnnnnnnnnnnnnnnnnnnnnnnnnnnnnnnnnnnnnnnnnnnnnnnnnnnnnnnnnnnnnnnnnnnnnnnnnnnnnnnnnnnnnnnnnnnnnnnnnnnnnnnnnnnnnnnnnnnnnnnnnnnnnnnnnnnnnnnnncattttatcactccacatataataatcttcnccatcaaaatatggaggtttgccctagggggacgganagtaatgganccgcantttnnaannacggngcatangnaaagaggcatcttactatncttcttgcgttcntggcgcnttataagcgacnnatgaactccgnanctngtacgcgnatggctgnnccnaanncgctngnctcccattatgnantaccnaccttttttncaaaacccccctttnattctttggnnccccctttttcccncatgggcnntnttnnnttggccactanaaacaggnccncccctaccccttggtcggctttngnaggtncaatannccccnttttgncngaaaaaggcccttaccacnaaganctgtggcgcgnctcattggaccancccaggcttctaaatttcttttcccctatgnnnnnttannntnnnnnntatttcaaaannnnaannaatttataacagttcaaagttatttcttnnnnncacttttgtaatnnnnntgatcatnnnnaatgtaaacttaatgtaannngtaaattttggtaataaaatttcnnntacaaattgttggnnn

SEQ ID NO: 6149 - DNA, 1090 bp, Zea mays
  misc_feature (1)..(3): n is a, c, g, or t
  misc_feature (7)..(11): n is a, c, g, or t
  misc_feature (13)..(17): n is a, c, g, or t
  misc_feature (24)..(36): n is a, c, g, or t
  misc_feature (82)..(82): n is a, c, g, or t
  misc_feature (106)..(107): n is a, c, g, or t
  misc_feature (115)..(116): n is a, c, g, or t
  misc_feature (125)..(127): n is a, c, g, or t
  misc_feature (136)..(139): n is a, c, g, or t
  misc_feature (157)..(160): n is a, c, g, or t
  misc_feature (163)..(166): n is a, c, g, or t
  misc_feature (195)..(196): n is a, c, g, or t
  misc_feature (199)..(199): n is a, c, g, or t
  misc_feature (205)..(205): n is a, c, g, or t
  misc_feature (208)..(208): n is a, c, g, or t
  misc_feature (224)..(225): n is a, c, g, or t
  misc_feature (228)..(231): n is a, c, g, or t
  misc_feature (243)..(246): n is a, c, g, or t
  misc_feature (249)..(253): n is a, c, g, or t
  misc_feature (255)..(255): n is a, c, g, or t
  misc_feature (319)..(323): n is a, c, g, or t
  misc_feature (325)..(325): n is a, c, g, or t
  misc_feature (351)..(360): n is a, c, g, or t
  misc_feature (393)..(397): n is a, c, g, or t
  misc_feature (1085)..(1090): n is a, c, g, or t
  Probeset Number=SeqID_20552
nnnctcnnnnncnnnnnggatagnnnnnnnnnnnnngagatgacgccagccttgctcttatcttgtgcattattgcatcgcnggaagtctctcacgcagaccgccnncatcctcnnaacgtcctnnnccgccatcnnnncgctcacctaggccggannnngcnnnncgtcccttcctgcttcctccttgcccttnnacncaacanatnagcgccgacgacctcnnccnnnncttcatcatcannnncannnnncncgcatcactgctccccaccgcaccgagctgctcacgtccctgcttcgtcctccctcgtatttgnnnnngngcagctcctgtacgccgtcattttcnnnnnnnnnntcgtgtttctccgccggccagactcctcatcgnnnnntctctcaacataaggaggcgaggagtatagacgtggcttgggagttaaagtgcctaatttgggcggcctcgtccgagtcgtagtctttgtcccccgccttaggtacctgcgctccatactcaacaatatcccaaattctttcgtagagtgaggttagatggtgcctcattttatcactccacatataataatcttcaccatcaaaatatggtggtttgcctagggggacggaaagtaatggagcgcactttgaaatacggggatagcaaagaggcatcttactatacttcttgcgctcatggcgcttagaagcgacagatgactcggagcttgatgtggagggtgacaaagagtcggtctcatagtagaccacctttttcaacttcttcttcttgtcacctttccgatgcgatttgatggacgaagaggattcctccttgtgtttgttgccagactcccttgagagagtcctccccgagcttgcggacttgtcgtctagtcatgattggattgtccttaagccaatagtaaacataaagggcatgaatgtaattttacacaggctgcgccctgtgcctataaatagatgaacagtacccccgtactgttcacgctgacttgtattcacttgtgcgtcacacttggacttttcaccttctatcaagccgaaggtacaaatgtaatctgnnnnnn

SEQ ID NO: 6150 - DNA, 599 bp, Zea mays
  Peptide Sequence Number=SeqID_11611
  Probeset Number=SeqID_20553
tgttgagacaatcagcccggaccaattgttaaaaagtctcgtgccccccccaatttccttggggggcccccccccccaaggtgggctgccgggcaaccagggagactttcttcccccccagcacaatcactccagcacaaaagggttttgcctcgatgccccagcttgggcatttgccatgacaagcttgatcagaaaccccacatttctccacgttatgggagacctcagtctttttgccactgctaggaggtctcatgttccaaaaaactgcactaagcgctcagcggaccgggggcataagcgctccaaaagcggcgcgaccgccttggtgaagcagcggctgctggctcccgctgccctcaggtggcgcgcggcgctgccgcccgggccgggcggcgttgacgatccaccggatgcgggaggggagagagagagagagagagagaggcacgcacgcagggtcaccggccggtgtgcgtagtaccgcaggtagaactcgccctcgcccgcgcccgcgcccgcgccgctgttctcgccgccggccgccgccgccgccatcgatttggcttccccttctcggcgattgggatggaact

SEQ ID NO: 6151 - DNA, 566 bp, Zea mays
  misc_feature (26)..(26): n is a, c, g, or t
  misc_feature (121)..(121): n is a, c, g, or t
  misc_feature (135)..(135): n is a, c, g, or t
  Peptide Sequence Number=SeqID_11612
  Probeset Number=SeqID_20554
gttgtagactcctagtatcgtctatngattattcgataagaaaaaaaattgttctttgaattcttatattcacttggacttgtgagttagttccgtcgtcgaacgaaacgcagcatctgcngcgcccagcaagangcgcgtcgtctcctgcagggccgtcagcagcaggtcgctgtccatcatcaggtgcgagcagagcgcgaagaagggcggcgggccggacacatggctgggccgcgcggccatggtcggcttcgcctccgcgatcgccgtcgacggggccaccggcaagggcacgagtttgttgtgggtggcgtgcagaacttgggcgtgggtactccggcgccgacgctggcgctggccgtgtcggggctcgtcgtcggcctcgccgtcttcttcctgctgcagtcgggaggaggcacgccagactcacggctgatggaaccccatgagctgagagcacgcgcacgtcgaacatcgtctccccactcgacatcagttgctgtaatggttggtgaagtgaggatgaaaacccagggcatataaaaaaaaaaaaaaaaaaaaaa

SEQ ID NO: 6152 - DNA, 486 bp, Zea mays
  Peptide Sequence Number=SeqID_11613
  Probeset Number=SeqID_20555
gcacgagaccattacctagaacatcctaatcgaaaaatttttgatggtccgcgcgggagaggcagcagaggagcttcacgatgttgttgtgccggatgtggccgaggatgtccacctccgacgcgaactcgcgctccagcttcttgtccagactcccgccggcccagatgcgcttcacggccacggtccccgccgcttcgccgctgctccggctggtgtacgtgacgcgcgccccaagccgcccttgccgatgaggttctcgtcggcgagcccgcgcacacggaggcctcgccgaagtccacgggctggaaagcggtgagcttccagggctcctcggccagcgcgagccgccgcttccgcctcttgatgtcgcggatgacgaagatgttggatttttttatgggcttagttcatttattcaataaactttatggtgtgtaatggtagaaaataccaataataccatattggaagtccaaaaaaaaa

SEQ ID NO: 6153 - DNA, 560 bp, Zea mays
  misc_feature (260)..(260): n is a, c, g, or t
  misc_feature (441)..(441): n is a, c, g, or t
  misc_feature (473)..(473): n is a, c, g, or t
  misc_feature (513)..(513): n is a, c, g, or t
  misc_feature (521)..(521): n is a, c, g, or t
  misc_feature (554)..(554): n is a, c, g, or t
  misc_feature (556)..(556): n is a, c, g, or t
  Peptide Sequence Number=SeqID_11614
  Probeset Number=SeqID_20556
gaagagagagactcactaattcccccccccccccgtggttgggcaatcctgacacattatcctctccacctcttcagaatccggacctcggcagagtccagtccctcgtgcatctcggcctctccactctcctttccacgcccgtccaggcctctaatctgacccctcttctccagcgggccggagatggtctcgctgcgatgcacaaacgcgcaccactccctcctcgggtcgccgacctgcctcgcgcggcccgcggncgggggggggtggccccggtcatggggcgctggccggcccccgtgggagggccgggcggcggcaaggccaaaggtctcacttcattccgaaattggggaaggcgtggggaggtccctcttggctctttgggcaaaggcccccgaaaacacggagaaaaaactggaaaggccacacccctcnttgagtttaacttgaggggaaaggggccattnggggaatcggtccttcattaaaggacccccaggggggacnttggattnttggggaaacaaaaccccttggcaaaaattggnanggga

SEQ ID NO: 6154 - DNA, 162 bp, Zea mays
  Peptide Sequence Number=SeqID_11626
  Probeset Number=SeqID_20557
gctgtcgggcaaattagtttccagccccagttcctgcaacaaaataacatccagttcaacacttcgctgctacctccccaaaaccagcagaccgaacagttgaactggatgttattttgttgcaggaactggggctggaaactaatttgcccgacagcaacg

SEQ ID NO: 6155 - DNA, 308 bp, Zea mays
  Peptide Sequence Number=SeqID_11627
  Probeset Number=SeqID_20558
gatcgcgcatattatggggagccgcgggcgacatagaaagcgcaatagtgtgccaacaaggggggccaaaatattttgcctccttatgcgtccttggggtgtctgcgagggcgtggtacagggaccattttcccgcgaatgcgtcacaagctcctataggttcccttcttcccccggacctctcaccaggggtggcttcgggatgggaaaacccaattcttcaaccctacaggatccaacaggcgaatcgcgaggtggcatcttacctttatcacccttggtcctccaacaatcatcagccctattac

SEQ ID NO: 6156 - DNA, 308 bp, Zea mays
  Peptide Sequence Number=SeqID_11628
  Probeset Number=SeqID_20559
gtaatagggctgatgattgttggaggaccaagggtgataaaggtaagatgccacctcgcgattcgcctgttggatcctgtagggttgaagaattgggttttcccatcccgaagccacccctggtgagaggtccgggggaagaagggaacctataggagcttgtgacgcattcgcgggaaaatggtccctgtaccacgccctcgcagacaccccaaggacgcataaggaggcaaaatattttggccccccttgttggcacactattgcgctttctatgtcgcccgcggctccccataatatgcgcgatc

SEQ ID NO: 6157 - DNA, 598 bp, Zea mays
  Peptide Sequence Number=SeqID_11629
  Probeset Number=SeqID_20560
cgggggcgggccgtgtggtggtgcccgggaatcgggcttatgggcggggagcaaccatattatggggagcaggggcgacataaaaagggggatccagtagcaacaatagagcaacaagggggaccaagatactttccctccttatgcgtccttgcgtctttctgcgatggggtgcgtaacgcggacaattttccctcaaggcgtcacaagctcctataggttcccttcttcccccataccttccatcaatgggaggctcaggatgggaaaacccagctcttcaaccctataggctccaacaaggaatcggaggaaggaacatacctttatcacccttggttcaacaatcggcaggcctatctttggggcaggcattgggacaaaccatcaaggcgacaggaggtggagcaactcgggctacctgggatcaaccaaggagctctggcaaacctttctccctactatcagcaacaacaatttcttccattcaaccaactatctacactgaaccctggtggttatttgcgggaacaactattaccattcagccaggtaggtggtggctactctcatcaacaacaacttcttccatttaacc

SEQ ID NO: 6158 - DNA, 1045 bp, Zea mays
  Peptide Sequence Number=SeqID_11630
  Probeset Number=SeqID_20561
gcggattcaatgtttttagtaaatcttttttactgttacataggtggagactagcgcagcgttattaatattattacatattacttcttaatatctgtgagaatatgtaagggattgatgggactatgactaagaagaagaagtgacccccatcatccacttgtctgaattcttatagaaattgatctaatcatcatcattcattacaatctatatcagatctaatctatttacttttccattgggtcatgggctcattaatcatcacttgggtgatccctatgagtctgtgcaagaatcgcatgcatctctgtgcacctatctctctctcggagcagttctttctcttattatctcatggcatgttattctcacagggtctttcttatcatagggggtctaatatcattaatcttattgggcttcgcttactgtgtgatcattaactttgtcagtccttggtccagtaacacaatgatatcatctgttatacaatggcatccaacaatctacatatccaatcaatagcttacttgaatcaaatagcaaatgcagtgcgagcattgtaccattaggatgactctcaagaaaaccgcagtggccaaaagtacagcatatcaaagccatctcaatcagtcagagccggtgtcatccagagccaggccattattagaacgaaggattatacatctgagatccacgtttagttcagagctattcccccatatcatatctttcccatagttacaactgggaaccagtcttagtcctatagagtttgaataaagtgcgggggtggatcatgtcaaagtccaagaatctaaagaaatcttactatatcagagggctacaatagccaaatctaatccagcaatgggcatctttgaaaatcttgtgacttgtcttttcatgtggttataaagtcccactttttgtgttatttctttgaaaaacagagaaccttttcggggcccatagagatccgacccaaaagacaaaaccctaaagcattcgaaggtcacgtaagggttggttatgtgtgcta

SEQ ID NO: 6159 - DNA, 1045 bp, Zea mays
  Probeset Number=SeqID_20562
tagcacacataaccaacccttacgtgaccttcgaatgctttagggttttgtcttttgggtcggatctctatgggccccgaaaaggttctctgtttttcaaagaaataacacaaaaagtgggactttataaccacatgaaaagacaagtcacaagattttcaaagatgcccattgctggattagatttggctattgtagccctctgatatagtaagatttctttagattcttggactttgacatgatccacccccgcactttattcaaactctataggactaagactggttcccagttgtaactatgggaaagatatgatatgggggaatagctctgaactaaacgtggatctcagatgtataatccttcgttctaataatggcctggctctggatgacaccggctctgactgattgagatggctttgatatgctgtacttttggccactgcggttttcttgagagtcatcctaatggtacaatgctcgcactgcatttgctatttgattcaagtaagctattgattggatatgtagattgttggatgccattgtataacagatgatatcattgtgttactggaccaaggactgacaaagttaatgatcacacagtaagcgaagcccaataagattaatgatattagaccccctatgataagaaagaccctgtgagaataacatgccatgagataataagagaaagaactgctccgagagagagataggtgcacagagatgcatgcgattcttgcacagactcatagggatcacccaagtgatgattaatgagcccatgacccaatggaaaagtaaatagattagatctgatatagattgtaatgaatgatgatgattagatcaatttctataagaattcagacaagtggatgatgggggtcacttcttcttcttagtcatagtcccatcaatcccttacatattctcacagatattaagaagtaatatgtaataatattaataacgctgcgctagtctccacctatgtaacagtaaaaaagatttactaaaaacattgaatccgc

SEQ ID NO: 6160 - DNA, 932 bp, Zea mays
  misc_feature (368)..(368): n is a, c, g, or t
  misc_feature (381)..(381): n is a, c, g, or t
  misc_feature (384)..(384): n is a, c, g, or t
  misc_feature (393)..(394): n is a, c, g, or t
  misc_feature (396)..(398): n is a, c, g, or t
  misc_feature (437)..(437): n is a, c, g, or t
  misc_feature (471)..(472): n is a, c, g, or t
  misc_feature (509)..(509): n is a, c, g, or t
  misc_feature (519)..(519): n is a, c, g, or t
  misc_feature (529)..(529): n is a, c, g, or t
  misc_feature (551)..(551): n is a, c, g, or t
  misc_feature (553)..(555): n is a, c, g, or t
  misc_feature (582)..(583): n is a, c, g, or t
  misc_feature (619)..(622): n is a, c, g, or t
  misc_feature (654)..(654): n is a, c, g, or t
  misc_feature (659)..(659): n is a, c, g, or t
  misc_feature (661)..(662): n is a, c, g, or t
  misc_feature (666)..(667): n is a, c, g, or t
  misc_feature (671)..(673): n is a, c, g, or t
  misc_feature (677)..(681): n is a, c, g, or t
  misc_feature (691)..(695): n is a, c, g, or t
  misc_feature (697)..(703): n is a, c, g, or t
  misc_feature (705)..(707): n is a, c, g, or t
  misc_feature (711)..(715): n is a, c, g, or t
  misc_feature (717)..(717): n is a, c, g, or t
  misc_feature (932)..(932): n is a, c, g, or t
  Peptide Sequence Number=SeqID_11631
  Probeset Number=SeqID_20563
atcacaagcaatcgatagagctagcatggcggtgaaggtgtgggtgttcgccgtggctctgatgatgtgcgctggtgtacggcttggagctgacgacgacggcggcagccgccttattagccgctgtcgtctgagctcgcccaactaccgcggcgccctggcaaaggccatcctcttcttcgaggggcagcggtcggggcggctgccggcaaaccagagagtcaggtggcgcggggactcggcgctcaccgacggccaacccgaaaacgtgaacttgacgggtggctactacgacgccggagacaacgtcaagttcggtttcccgatggcgttcagcgtcaccctcctgagctggagcgccgtcgagnaccgcgacgaggnggnggcggcggnncnnntccgccacccccggcccgccaccaggggggcgccgaatnccttccccgtggccaaagcagggccgaccacccnncacaatcagggggccgacggcccccgcccaccacccnggccccccancccccacagncacggcacaccccgcggcaccngnnnaagagccccccgaatctccccccgccnncgggcccgacgagctcgatttccctttttttctccnnnntcgcccgccccaggctggactcccttcatttngagcngnnaacnnacannnacgnnnnntttgtgggcnnnnncnnnnnnncnnngggnnnnngncaggtgcctgtggacgacacagcctcagcccacagtgatgttatgtaactagaacggaggagtatgcaagggcgggcagggtcttgcccaagtcccaaccaaaccatgatgtcgccttgtaacatcccacggcccctacccccactaccactcttgatcatcctgataagaagagataaataaataattaaatacaatggcaaatctgcagtagn

SEQ ID NO: 6161 - DNA, 539 bp, Zea mays
  Peptide Sequence Number=SeqID_11632
  Probeset Number=SeqID_20564
ctctacattcctttgaaagacaatttcagagtcatcagcattgcatatagacaaatggcatatataaaaaatacataaaagttacaaaaaatattcaaaatcttatgtacatgaaagacgttgagttgatcaaaacgaatgtgaaaaataattgactacttttgttgttgttttggaattcaaagaaattcaaaagttgtgtaaaaatttccacattcgttgaccattctggcagtgacgggtagcatgttaaaaatacaaataactagcgatctaacaaatacaaaaaatttacattgaaaaattcgaatcggcatagcggggtatgccaaattcagttgactatcatcggtttatacaactattggtatgtggtaggaaatggaacttttttacaaaaacagaagaatgaagctaaactataattgcaaaagtaatgatggaacttgcgtcaaaaaattcttaaagttaaaaaaactggcgtttttttcattttttttgacgcccgaactatgatcccagtttgcttattttatact

SEQ ID NO: 6162 - DNA, 539 bp, Zea mays
  Probeset Number=SeqID_20565
agtataaaataagcaaactgggatcatagttcgggcgtcaaaaaaaatgaaaaaaacgccagtttttttaactttaagaattttttgacgcaagttccatcattacttttgcaattatagtttagcttcattcttctgtttttgtaaaaaagttccatttcctaccacataccaatagttgtataaaccgatgatagtcaactgaatttggcataccccgctatgccgattcgaatttttcaatgtaaattttttgtatttgttagatcgctagttatttgtatttttaacatgctacccgtcactgccagaatggtcaacgaatgtggaaatttttacacaacttttgaatttctttgaattccaaaacaacaacaaaagtagtcaattatttttcacattcgttttgatcaactcaacgtctttcatgtacataagattttgaatattttttgtaacttttatgtattttttatatatgccatttgtctatatgcaatgctgatgactctgaaattgtctttcaaaggaatgtagag

SEQ ID NO: 6163 - DNA, 374 bp, Zea mays
  Peptide Sequence Number=SeqID_11633
  Probeset Number=SeqID_20566
gggttctaagatttatttaaatgattcacccaacctactaaaagaacaaactcccacaatgataaaaaaacaaactaccaagctaaactcaaaaccatgttcgaccaaaaaaccaaccttcaacaggattcattccaaagcacaataaagactccaatcataaaccgttacattgttgtagtaatgtttttttaaagatcacataaattttaattcggcgatgatagtaggtgaattaggtaagtggtagtggattaatttagattggttggttgagagtcatttatttcgatcttgctctcatcttccttcttttacgcttgagtcttctttgtctctttttcttccacttgtctctcattttttaatggtca

SEQ ID NO: 6164 - DNA, 374 bp, Zea mays
  Probeset Number=SeqID_20567
tgaccattaaaaaatgagagacaagtggaagaaaaagagacaaagaagactcaagcgtaaaagaaggaagatgagagcaagatcgaaataaatgactctcaaccaaccaatctaaattaatccactaccacttacctaattcacctactatcatcgccgaattaaaatttatgtgatctttaaaaaaacattactacaacaatgtaacggtttatgattggagtctttattgtgctttggaatgaatcctgttgaaggttggttttttggtcgaacatggttttgagtttagcttggtagtttgtttttttatcattgtgggagtttgttcttttagtaggttgggtgaatcatttaaataaatcttagaaccc

SEQ ID NO: 6165 - DNA, 278 bp, Zea mays
  Peptide Sequence Number=SeqID_11634
  Probeset Number=SeqID_20568
atgcagattaaatcggactgattggatagatacggctgcaattaatctataaagacaggaaaaacattatagaagcattagaagccggtacgtactaaagccaaacgagcaggctgtaaattagaaattatcaacgccaccattggatgaatatcgaaggtagagtatgattgtatatagtagtcaacgcctcaagctagcacatgggagacttgacagtgaaaactacacgtctctttctagaaaaaccacatacgcaccaccaacacacacgccca

SEQ ID NO: 6166 - DNA, 278 bp, Zea mays
  Probeset Number=SeqID_20569
tgggcgtgtgtgttggtggtgcgtatgtggtttttctagaaagagacgtgtagttttcactgtcaagtctcccatgtgctagcttgaggcgttgactactatatacaatcatactctaccttcgatattcatccaatggtggcgttgataatttctaatttacagcctgctcgtttggctttagtacgtaccggcttctaatgcttctataatgtttttcctgtctttatagattaattgcagccgtatctatccaatcagtccgatttaatctgcat

SEQ ID NO: 6167 - DNA, 543 bp, Zea mays
  Peptide Sequence Number=SeqID_11635
  Probeset Number=SeqID_20570
acagcaatggatcacggctttattgtttgtcactatgttgaatcacttgatccccccaacaatgtgaacgacacggtatcgaggtggtcgcatgacatgacatagtatccaataacgaacaataaaaaacacacacacagaatcaacaaccatggcatagaaccacaaacattatgcgatacaaagatgatgtgggggatgacacgatgatgatggctgtgtgggtaccggagatgatacgtggcaaaacatgtggacgatgaaggagatgtagctgttgcagatataatgatcaaccgtggacatgttcatgtcactatactgtcaggattctactctatcaagtggtcatgagatgaacagttgtttggagggggaggcgacagatgaacgtgatcgcattggacgagaggccgaaccaaggggggcataaacccttacttggcacgagctcgcatctttcttcgtttacgtttgagacgtcgcatacgtttttttctccatttagcgcgcatcttgcgtcttgggaacgaagaacgagtc

SEQ ID NO: 6168 - DNA, 543 bp, Zea mays
  Probeset Number=SeqID_20571
gactcgttcttcgttcccaagacgcaagatgcgcgctaaatggagaaaaaaacgtatgcgacgtctcaaacgtaaacgaagaaagatgcgagctcgtgccaagtaagggtttatgccccccttggttcggcctctcgtccaatgcgatcacgttcatctgtcgcctccccctccaaacaactgttcatctcatgaccacttgatagagtagaatcctgacagtatagtgacatgaacatgtccacggttgatcattatatctgcaacagctacatctccttcatcgtccacatgttttgccacgtatcatctccggtacccacacagccatcatcatcgtgtcatcccccacatcatctttgtatcgcataatgtttgtggttctatgccatggttgttgattctgtgtgtgtgttttttattgttcgttattggatactatgtcatgtcatgcgaccacctcgataccgtgtcgttcacattgttggggggatcaagtgattcaacatagtgacaaacaataaagccgtgatccattgctgt

SEQ ID NO: 6169 - DNA, 695 bp, Zea mays
  misc_feature (1)..(1): n is a, c, g, or t
  misc_feature (639)..(639): n is a, c, g, or t
  misc_feature (642)..(643): n is a, c, g, or t
  misc_feature (658)..(666): n is a, c, g, or t
  misc_feature (679)..(690): n is a, c, g, or t
  misc_feature (694)..(695): n is a, c, g, or t
  Peptide Sequence Number=SeqID_11636
  Probeset Number=SeqID_20572
ngttcttcttcaaacatgcgcattttctcctggatcggcgccaaaaaggacttgagatccttgcagatccgtgttctatcatcagacgcgaggcccttgtcatcgccgacccttacttgtacctccaagtcatcgatcttgccgaatgaaaactcgggaatgtctagatgccctttgatcttcttgttttcttctttgattaaccattcaccgctaaatctcaagcttagttcatagttatatcctactctcttcttgttgcgaacaatgccctgaaatgcctgcaaagcaaccaatggtttatactcggaagttgaatcatcacagtacagaactacggagatacttaaaagaaatataaatggctatcacaaacagatcccatccacggtaactaacagtatagttactcagctgctatgtgtgaatgtacctggaaaaacgtccggttcaaaacatttcattaattcatttaatcgcactgttctttttaaggaaatacttctaaggtgacaagagtcttagcaatatacttgtagggtgcaccaacacaaggcacaaataggctgaggaaggtacaatcaagttctcttcactgggcacaacttgagtagcccaggtggaggaatagacaccganctnngcaaagtgcatgtgnnnnnnnnncgtgttttatgannnnnnnnnnnngtgnn

SEQ ID NO: 6170 - DNA, 883 bp, Zea mays
  misc_feature (582)..(584): n is a, c, g, or t
  misc_feature (601)..(883): n is a, c, g, or t
  Peptide Sequence Number=SeqID_11198
  Probeset Number=SeqID_20573
aaaaaaaaaaaaaaaaaaaaaaaaaaaaaaaaaaaaaaaaaaaaaaaaaaaaaaaaaaaaagaaaaaaaaaaaaccgtcccgcccctccgctctccactttcctctgcaaccgcgcccgcctcccctgcttactacccaagcgaagccaaaggcagccttcacctgtacgcggcgcccaatctagtccaacccctccgccggcgccagatcgcggaggaccctgccgtctcccgcccattctccgcaaaggtctccatgctcatgagatgcaagcacatttgattttctataagttcaacgggcactaatgttaactgaagtattttcctcgatggaggctgaagctgattttgatgttgaagattccagatcaaacaatgaactgcaggagttgtggccagttggtgagatagacccaaagggagggcgattcccttgttgcattgtctggactcctcttcctgtagtttcatggcttgctccttacatagggcatgttggaatctgtcaggaggatggatctgtcctggattttgctggttcaaatttagtgagcatggataattttgcatatggttctnnngctagatacctccagcnnnnnnnnnnnnnnnnnnnnnnnnnnnnnnnnnnnnnnnnnnnnnnnnnnnnnnnnnnnnnnnnnnnnnnnnnnnnnnnnnnnnnnnnnnnnnnnnnnnnnnnnnnnnnnnnnnnnnnnnnnnnnnnnnnnnnnnnnnnnnnnnnnnnnnnnnnnnnnnnnnnnnnnnnnnnnnnnnnnnnnnnnnnnnnnnnnnnnnnnnnnnnnnnnnnnnnnnnnnnnnnnnnnnnnnnnnnnnnnnnnnnnnnnnnnnnnnnnnnnnnnnnnnnnnnnnnnnnnnnnnn

SEQ ID NO: 6171 - DNA, 658 bp, Zea mays
  misc_feature (1)..(2): n is a, c, g, or t
  misc_feature (4)..(17): n is a, c, g, or t
  misc_feature (33)..(36): n is a, c, g, or t
  misc_feature (658)..(658): n is a, c, g, or t
  Peptide Sequence Number=SeqID_11199
  Probeset Number=SeqID_20574
nntnnnnnnnnnnnnnngagcgttgcactgctnnnntcctctgactcgcctcctccccgaccactatgccgccacctccaccctagtcctctcttagtcgcccgacacttcggcttaatgcagggtggaggacgcgagatctgctgttgcatatggagaagggtaagaagttagggagggcgtacatttcttggaatgatgacatatttgtggagtactacaacaagggtgacagatgccaaaatgggtggaagtctcatgtctacaacggttgttatcaagaatgaccgagaaaagtgcaatatagatatcacaaaagactaaatcatgtccaggatcaatacttttgacaagctccacactattatcaatggtatgctagaaacaagtgactttggttaggcttggaacaagagcaagatattcgttgatagtgattctgcattattattactattcgcgtgatttatgttgcatgataaattgtaggggtaaaactagtctctaatctattgcacatgcaatgactcagcaatacacatgtgcatagcaaggcacatgtgtatgttggtgtgtacgagttgatgggtattgtgtacaagttgatgtggttacttccctccaaatatgtaaattatataattatccaaacttgatn

SEQ ID NO: 6172 - DNA, 632 bp, Zea mays
  misc_feature (601)..(632): n is a, c, g, or t
  Probeset Number=SeqID_20575
ttctctctcccctcacctctctcctcccttcccttgcctcgctcctctctgtcccgaccaagcagcagcgaccgagccttggccgagccaccctcccccgacgcgcctgcaccgaccgcgcttcagctcggcgcccaggcggaccgacgtcggccacccgcccatgccccagctcttagacccctatccgcaggtcgcagcaccgccaacacccagatcccagacctcgccgtgaccacgccaccggagtctggtggccagccaaagccctcgcccacccgcgagccagcgagcgtgagccggtgagtccctggctccctgcgcgtgcgagactggagatccaggcagcggaagagccctgtttgttcccagccacatcgcgtccctggctccctgccctgtttgtctccctgcacaggcgagacagaacattctctgtagctgtatgagcatttggagccacatcgctggacaagggggcgatttattcattggagtaaactgcatttaggttgctcaagattcagttttgcttagaccaacaaaaacgtcggccggcgccgggagcatcgtgccccgcgtgccgtagatgacgccgatnnnnnnnnnnnnnnnnnnnnnnnnnnnnnnnn

SEQ ID NO: 6173 - DNA, 166 bp, Zea mays
  Peptide Sequence Number=SeqID_11200
  Probeset Number=SeqID_20576
acggaacttccaccacttggacagttgccccacctagaaaatctggagctctgcaagttggatagggtcaaaagaattggttgggaattctgtggtggcagtggcagaggtgcatttcgccgactgtcatccttctgcatggtacctgcccgggcggccgctggaa

SEQ ID NO: 6174 - DNA, 166 bp, Zea mays
  Probeset Number=SeqID_20577
ttccagcggccgcccgggcaggtaccatgcagaaggatgacagtcggcgaaatgcacctctgccactgccaccacagaattcccaaccaattcttttgaccctatccaacttgcagagctccagattttctaggtggggcaactgtccaagtggtggaagttccgt

SEQ ID NO: 6175 - DNA, 166 bp, Zea mays
  Peptide Sequence Number=SeqID_11201
  Probeset Number=SeqID_20578
taccacgactgttaacatatctagtagccagaactgcatgcattagactgagcctagtgataacatctgagtgatagtcgcgcactgctgctaaagatgacagtatcaaaaacatgactggtgcaaacatgatcatgtagcgcagaaattatgaacttccctgatt

SEQ ID NO: 6176 - DNA, 166 bp, Zea mays
  Probeset Number=SeqID_20579
aatcagggaagttcataatttctgcgctacatgatcatgtttgcaccagtcatgtttttgatactgtcatctttagcagcagtgcgcgactatcactcagatgttatcactaggctcagtctaatgcatgcagttctggctactagatatgttaacagtcgtggta

SEQ ID NO: 6177 - DNA, 331 bp, Zea mays
  Peptide Sequence Number=SeqID_11202
  Probeset Number=SeqID_20580
acgtcgtagtggcaagcaatactgtaatgacaattaaatttcttatcaatatcttgctttatacgtgattaaaatagttgtagtagttccattgatgtaggcggtaggctgcaacacattcttcaatagatgttcatctgtttaaagcttttcattttcctaatattatgcattatgtgtcttcaaattgtgtagttattccatcaagtgtcgcctctgcctctgtatcaaatgcagcagcaccacaagctattatcaactcagatgatgtagcttgggctcattgttttttcccagatgcaaacaagaagcattggctgaagtgcaagta

SEQ ID NO: 6178 - DNA, 284 bp, Zea mays
  Probeset Number=SeqID_20581
agcaccttcccggaccgcctactgctccgactacgtattcatttgatagggtatttcgttctgactgtaataccaaagaagtatatgaggaaggggccaaagcagttgctctctctgtacaagtgtttttgcatatggtcaaacaagtagtggaaaaacatacaccatgactggaataacggaacatacagcagcagatatctatgattacattggcaagcatgaagagagagcatttgtattgaaattttcagcaattgaaatatataacgaagttgtaaggg

SEQ ID NO: 6179 - DNA, 804 bp, Zea mays
  misc_feature (1)..(8): n is a, c, g, or t
  misc_feature (29)..(36): n is a, c, g, or t
  misc_feature (115)..(118): n is a, c, g, or t
  misc_feature (294)..(294): n is a, c, g, or t
  misc_feature (314)..(314): n is a, c, g, or t
  misc_feature (316)..(316): n is a, c, g, or t
  misc_feature (326)..(333): n is a, c, g, or t
  misc_feature (338)..(346): n is a, c, g, or t
  misc_feature (349)..(364): n is a, c, g, or t
  misc_feature (366)..(367): n is a, c, g, or t
  misc_feature (369)..(369): n is a, c, g, or t
  misc_feature (375)..(376): n is a, c, g, or t
  misc_feature (393)..(396): n is a, c, g, or t
  misc_feature (757)..(759): n is a, c, g, or t
  misc_feature (797)..(799): n is a, c, g, or t
  misc_feature (804)..(804): n is a, c, g, or t
  Peptide Sequence Number=SeqID_11203
  Probeset Number=SeqID_20582
nnnnnnnnacggcatacgtgcggttcggnnnnnnnngcaataagagaaccagtgtgctagtgctacagctacggcctagctacctactacggcgcagctagcagcagcggcggannnnagcgacgggcgcgaggagagcaccagcagcaggtggcgcgggcgggagcgagaggaccaccgccacggccacggcaagacggccaaggtgatgcacctgctgctctggggacccaagtgaggtgaagtgaagcgctgctgctgctgcacctgcctctgcctcgtggcccgcgcgcngcgtcctcgcttccttctcngnccgctgcccnnnnnnnntgttnnnnnnnnngtnnnnnnnnnnnnnnnngnntnctcgannccggccggggggttccnnnnacaggaacagagacagaggcatggtggtgaaggactgtactgtacctatacacctatatactacgacgtgcacctgtactacgacgtgctgctgtaccatactaatactagtgcgctgctgctcccttgccttcttgcttgcaccagccactcccgctttttttgctcgaacgatcgactgctcgtgtcgcgtcgggccacggccggtcgtcagtttgggtgtgtccactccactgtaaagctcctctcttttttttgggtactccctccatgccaaagttagcggacgtgtactaggtgtggttcggagcagcaggttgtattacttaccacccctctgtaatgtaagaacgcgttctannnaaaaaaaaaaaaaaaaaaaagaaaaaaaaaaaaaaaannncggcn

SEQ ID NO: 6180 - DNA, 364 bp, Zea mays
  misc_feature (322)..(322): n is a, c, g, or t
  Probeset Number=SeqID_20583
ctgttgccccccaagccaaccatatccactctcggcggcgccgcgcatctctcctctcttcttgcccttccttcccccaacccacacagcctcactaggggtctaccggcggcggcaacgagatggtgcagcgcctcacctaccgaaagcgtcacagctacgcgacaaaatccaatcagaacccggggtcgtgaagaccccagggtgggaaagcttgtgtaccaatacaccaagaagaagggcgagcggtcccaagtgccccgttcaccggggaagaggaatccaggggatcccccacttgagacctgcgagggtaaagagnggggcccagggttgtctaggaacccacaggaacctgttaccg

SEQ ID NO: 6181 - DNA, 1041 bp, Zea mays
  misc_feature (1)..(1): n is a, c, g, or t
  misc_feature (12)..(12): n is a, c, g, or t
  misc_feature (14)..(17): n is a, c, g, or t
  misc_feature (27)..(27): n is a, c, g, or t
  misc_feature (35)..(35): n is a, c, g, or t
  misc_feature (37)..(37): n is a, c, g, or t
  misc_feature (40)..(41): n is a, c, g, or t
  misc_feature (43)..(43): n is a, c, g, or t
  misc_feature (45)..(46): n is a, c, g, or t
  misc_feature (48)..(49): n is a, c, g, or t
  misc_feature (51)..(51): n is a, c, g, or t
  misc_feature (54)..(54): n is a, c, g, or t
  misc_feature (60)..(61): n is a, c, g, or t
  misc_feature (68)..(68): n is a, c, g, or t
  misc_feature (70)..(70): n is a, c, g, or t
  misc_feature (72)..(72): n is a, c, g, or t
  misc_feature (81)..(81): n is a, c, g, or t
  misc_feature (85)..(86): n is a, c, g, or t
  misc_feature (95)..(95): n is a, c, g, or t
  misc_feature (97)..(97): n is a, c, g, or t
  misc_feature (100)..(101): n is a, c, g, or t
  misc_feature (104)..(105): n is a, c, g, or t
  misc_feature (113)..(113): n is a, c, g, or t
  misc_feature (115)..(116): n is a, c, g, or t
  misc_feature (133)..(134): n is a, c, g, or t
  misc_feature (151)..(152): n is a, c, g, or t
  misc_feature (159)..(160): n is a, c, g, or t
  misc_feature (166)..(166): n is a, c, g, or t
  misc_feature (169)..(169): n is a, c, g, or t
  misc_feature (176)..(176): n is a, c, g, or t
  misc_feature (186)..(186): n is a, c, g, or t
  misc_feature (192)..(192): n is a, c, g, or t
  misc_feature (195)..(195): n is a, c, g, or t
  misc_feature (204)..(204): n is a, c, g, or t
  misc_feature (207)..(207): n is a, c, g, or t
  misc_feature (991)..(1041): n is a, c, g, or t
  Peptide Sequence Number=SeqID_11204
  Probeset Number=SeqID_20584
naaaaaaaaganannnnaggggaaganaaagaaangntcnncncnnannantgnttaaannattattntnanataaaaaanttannccccccctnancannganntttttttngnncagccctttgcttgttnncaagaaagcaaatgganncaagccnnttttgnttntagcatnaagaagaganattccnctngtttagtgntanaccccgccggaagcagcactcatccttccttaattaagtagtacttatcccattcctttaaaacctgtcctttccagtggatagcttgcagagtagagtgatttccttgttcataggttcaggttcagaagactctcttccccgtatactgtatttactagtcaggccggtggagcaatctcgaattctcgtatatcaatgttacatgaatgattcacataagggaattccaagtgggtcgaataggactagggagctcgcttccatctactaaaagttctctacgggtggttggtttacagtacagacagtttcctagctggcacttgagaagtgctcgtctagtttagtgattcctagcgtagaacccttctgtatgagaatagtttctagattatgaccttctcttttgattgagtgaatagccatgccagggattcctcttttctgggggaggtttaaaccttttacccttgcctttacatttccataaagaaagacagaggtattcgaaatactgccatgggttaattccctattttgcttgcagcaataattttggttcccgcaattccctctttcttacaaccaagaaggaatgatatcacgaagctacagtcatccttatatggttccctgatcctgttcttaaacgtaattaggcactgcgctgagcgggatgcgtacaatggattgggaatttttttattattcaaacactgaaaaatttgggatatgctacgtgcagaagtagagaatggatgctagtgcgagtcatatgccnnnnnnnnnnnnnnnnnnnnnnnnnnnnnnnnnnnnnnnnnnnnnnnnnnn

SEQ ID NO: 6182 - DNA, 418 bp, Zea mays
  misc_feature (386)..(386): n is a, c, g, or t
  misc_feature (412)..(412): n is a, c, g, or t
  Probeset Number=SeqID_20585
agaagcggcgaagcgccgcaagtttttggagcgagacctggagcggacgccacccgctcccgatggtgactcggcgatcgccgctacagcgctactccttctcgccaaacaaacggcaagtcatcagctatgcacagcgccgacgtcgtcaccgccacactcacgtcacgccattccgtccgcagcaagtggaaatggcggcactggtgccggagtgggctaccaaggagccctgcctcatggggatcgacgaaggctggccgtggccctgtccttggtcctatggtgtatggatgtatgtactgcgcgtattcttacaataacactcttgcgaccctcaaattcgcagattcaaagaccttgaaggaggaacaaagagaggagcnatttgaaagtttaaaggtcaatagcnctatta

SEQ ID NO: 6183 - DNA, 296 bp, Zea mays
  Peptide Sequence Number=SeqID_11205
  Probeset Number=SeqID_20586
acatacccctcggtggacaagtctggctttgaacttggtgatgaccgatgagcctggcttcatcatgcttggtgttgtagccccacttgaggttgatcggtcagacccgaggcggtagttcgacaagctcctaggtgtcattcgctttgatggaggtgaactcattgagcatggtttggtgtcagctcttgtgctcctgtgtctcattaaatgtcattggcttaacttcatttgccagcaacaactgctcatccaactcatgtgcggtgacccccggtggcgtggccggccctagt

SEQ ID NO: 6184 - DNA, 296 bp, Zea mays
  Peptide Sequence Number=SeqID_11206
  Probeset Number=SeqID_20587
actagggccggccacgccaccgggggtcaccgcacatgagttggatgagcagttgttgctggcaaatgaagttaagccaatgacatttaatgagacacaggagcacaagagctgacaccaaaccatgctcaatgagttcacctccatcaaagcgaatgacacctaggagcttgtcgaactaccgcctcgggtctgaccgatcaacctcaagtggggctacaacaccaagcatgatgaagccaggctcatcggtcatcaccaagttcaaagccagacttgtccaccgaggggtatgt

SEQ ID NO: 6185 - DNA, 327 bp, Zea mays
  Peptide Sequence Number=SeqID_11207
  Probeset Number=SeqID_20588
tacatatagtataatgtccgtgcgttgcgacgatacaccaacctaatcatatttgatgacatagtgcaccagcagtgccaagttagtgtgacgggtcctcctcccaaaaaataaatttaaaattaatgtgaaccctccctccaaaaaataaatttaaaattaaagtgaatatatgccttgcataccggatattaaattgcggatactgcattttatcttagctaaaagctcagaaatatatgagttgaaaataagcctttcctttttttatagctcgatcagccgcgccgccgcccagaagggagccgagcttcctggaaggctggt

SEQ ID NO: 6186 - DNA, 327 bp, Zea mays
  Peptide Sequence Number=SeqID_11208
  Probeset Number=SeqID_20589
accagccttccaggaagctcggctcccttctgggcggcggcgcggctgatcgagctataaaaaaaggaaaggcttattttcaactcatatatttctgagcttttagctaagataaaatgcagtatccgcaatttaatatccggtatgcaaggcatatattcactttaattttaaatttattttttggagggagggttcacattaattttaaatttattttttgggaggaggacccgtcacactaacttggcactgctggtgcactatgtcatcaaatatgattaggttggtgtatcgtcgcaacgcacggacattatactatatgta

SEQ ID NO: 6187 - DNA, 272 bp, Zea mays
  Probeset Number=SeqID_20590
acaagaaaaatatgtcagattctcacttaacaattatacaatctaatctaaaaggagtttacgtgacagagaaaaactggtttaaaattcatcttgtttaaagttaaaataccgttaaaagcttatctataattgttggtctctcctctcactgaggtgaaaccctccaaaaatatttgtatgctgcttaatgcagcgagcacacggtattctttagtaaaaggcgaaagaatagttcgctgtgtgctcactgcgcagctgcgtccccgcgt

SEQ ID NO: 6188 - DNA, 272 bp, Zea mays
  Peptide Sequence Number=SeqID_11209
  Probeset Number=SeqID_20591
acgcggggacgcagctgcgcagtgagcacacagcgaactattctttcgccttttactaaagaataccgtgtgctcgctgcattaagcagcatacaaatatttttggagggtttcacctcagtgagaggagagaccaacaattatagataagcttttaacggtattttaactttaaacaagatgaattttaaaccagtttttctctgtcacgtaaactccttttagattagattgtataattgttaagtgagaatctgacatatttttcttgt

SEQ ID NO: 6189 - DNA, 574 bp, Zea mays
  Peptide Sequence Number=SeqID_11210
  Probeset Number=SeqID_20592
tacaggcgcgagaggtttgatttccattttggtcaaattatcaatgcatgcccagatgttgtaggttacttgaatgaacatcataatcacttatggagcaggtctatgttatccactgaaataaaatgtgattatgtgaacaataatcttgctgaatgtttcaattcatggatcaaaaatatcaaagatttccccgttgttgatttagttgataggttgaggcaaatgacaatggaattatgttagaagaggagaaagattgcagataagctctctggtagtattctccctgctattataagtcaacttagagctaagactaaaggtttaggacaaatttcagtatgcaaaaatagacacaaagctgagatttttggaaattaccaggacatgacaccttggcggcatgaggtggatttgcatgaacacacttgcagctgtagagaatgggaagtgattgggaagccttgtcgtcatgctttggcgttcatacaaacagagagaaatgttgacttggactcatttgtgcatgaatattactccgtgtggaggttcaaggttgcatatagtggta

SEQ ID NO: 6190 - DNA, 625 bp, Zea mays
  Peptide Sequence Number=SeqID_11211
  Probeset Number=SeqID_20593
tagcgtggtcgcggccgaggtacatcaatttatgcgagcacaatgatttataagtgctatccatctacctgtttgtcttttgggccaaatgatgagtcttttgggctattttgatgatcctccctgcgctattgctgcaggagctcttttatttgttttggcaagtgatgtgagtacctcttgatctctgtctaaatcacacatgctattatgcatattaaatacctcttatctcaaattttccttcacccagatgattacaaggtggataaaagctattaatttcccttgtgttttcccttttagctgcaaccacttctttcacattacaatgccacttgttttcacattgcaaggctagcatgttctataaaagaatcaaataagaaacaccatgattgaatctcgatattttgaatgtaaaaactaacttgaaatctgttggaaataaatctcaggcagtattgtcatttaaactttttcattagtttgacctaaatgactctctctaatatcgtactcgtttaaataccccgtttaagctggtgtagtagataaaatactccactataactatttacatgtttttgtatattcaataattcgaaatgcattataatttggc

SEQ ID NO: 6191 - DNA, 625 bp, Zea mays
  Probeset Number=SeqID_20594
gccaaattataatgcatttcgaattattgaatatacaaaaacatgtaaatagttatagtggagtattttatctactacaccagcttaaacggggtatttaaacgagtacgatattagagagagtcatttaggtcaaactaatgaaaaagtttaaatgacaatactgcctgagatttatttccaacagatttcaagttagtttttacattcaaaatatcgagattcaatcatggtgtttcttatttgattcttttatagaacatgctagccttgcaatgtgaaaacaagtggcattgtaatgtgaaagaagtggttgcagctaaaagggaaaacacaagggaaattaatagcttttatccaccttgtaatcatctgggtgaaggaaaatttgagataagaggtatttaatatgcataatagcatgtgtgatttagacagagatcaagaggtactcacatcacttgccaaaacaaataaaagagctcctgcagcaatagcgcagggaggatcatcaaaatagcccaaaagactcatcatttggcccaaaagacaaacaggtagatggatagcacttataaatcattgtgctcgcataaattgatgtacctcggccgcgaccacgcta

SEQ ID NO: 6192 - DNA, 552 bp, Zea mays
  misc_feature (145)..(145): n is a, c, g, or t
  misc_feature (233)..(233): n is a, c, g, or t
  misc_feature (245)..(245): n is a, c, g, or t
  misc_feature (293)..(293): n is a, c, g, or t
  misc_feature (302)..(302): n is a, c, g, or t
  misc_feature (305)..(305): n is a, c, g, or t
  misc_feature (310)..(311): n is a, c, g, or t
  misc_feature (316)..(316): n is a, c, g, or t
  misc_feature (318)..(318): n is a, c, g, or t
  misc_feature (326)..(326): n is a, c, g, or t
  misc_feature (336)..(337): n is a, c, g, or t
  misc_feature (347)..(348): n is a, c, g, or t
  misc_feature (352)..(353): n is a, c, g, or t
  misc_feature (359)..(359): n is a, c, g, or t
  misc_feature (373)..(373): n is a, c, g, or t
  misc_feature (378)..(378): n is a, c, g, or t
  misc_feature (380)..(380): n is a, c, g, or t
  misc_feature (382)..(382): n is a, c, g, or t
  misc_feature (384)..(384): n is a, c, g, or t
  misc_feature (388)..(388): n is a, c, g, or t
  misc_feature (391)..(391): n is a, c, g, or t
  misc_feature (395)..(395): n is a, c, g, or t
  misc_feature (397)..(399): n is a, c, g, or t
  misc_feature (402)..(402): n is a, c, g, or t
  misc_feature (406)..(406): n is a, c, g, or t
  misc_feature (410)..(410): n is a, c, g, or t
  misc_feature (417)..(417): n is a, c, g, or t
  misc_feature (426)..(426): n is a, c, g, or t
  misc_feature (430)..(430): n is a, c, g, or t
  misc_feature (433)..(434): n is a, c, g, or t
  misc_feature (437)..(437): n is a, c, g, or t
  misc_feature (443)..(443): n is a, c, g, or t
  misc_feature (448)..(448): n is a, c, g, or t
  misc_feature (453)..(453): n is a, c, g, or t
  misc_feature (457)..(457): n is a, c, g, or t
  misc_feature (459)..(459): n is a, c, g, or t
  misc_feature (464)..(464): n is a, c, g, or t
  misc_feature (469)..(469): n is a, c, g, or t
  misc_feature (472)..(472): n is a, c, g, or t
  misc_feature (474)..(475): n is a, c, g, or t
  misc_feature (480)..(480): n is a, c, g, or t
  misc_feature (483)..(483): n is a, c, g, or t
  misc_feature (486)..(486): n is a, c, g, or t
  misc_feature (490)..(490): n is a, c, g, or t
  misc_feature (492)..(492): n is a, c, g, or t
  misc_feature (494)..(494): n is a, c, g, or t
  misc_feature (498)..(498): n is a, c, g, or t
  misc_feature (500)..(500): n is a, c, g, or t
  misc_feature (504)..(504): n is a, c, g, or t
  misc_feature (508)..(508): n is a, c, g, or t
  misc_feature (511)..(511): n is a, c, g, or t
  misc_feature (514)..(516): n is a, c, g, or t
  misc_feature (521)..(521): n is a, c, g, or t
  misc_feature (529)..(530): n is a, c, g, or t
  misc_feature (534)..(534): n is a, c, g, or t
  misc_feature (536)..(536): n is a, c, g, or t
  misc_feature (538)..(538): n is a, c, g, or t
  misc_feature (542)..(542): n is a, c, g, or t
  misc_feature (547)..(549): n is a, c, g, or t
  Peptide Sequence Number=SeqID_11212
  Probeset Number=SeqID_20595
atgacgcttcctgccctctgaactttcacacgcacaactttacctaccaccgtcggtcgtccaccttcgccttccacccgacgtcgagttctagactccccgttccaccgagcgccagctccggaccgcccacacttggctcggnggcacctccgagtcccaggccactcgcccggtcggacgagctcctcctcggttccaggcatctagcaagtcgaggtcctccccgcggntcctcccccggncgagctccacagtccgccctacgttgcagtgaccgattggtcgcattncccgatgcnacncatgnngacgnanataggcgnaaccgcgganntgggaacctnntggnngatggnccacatccatcccntcacntncntnctgnttnaccncnnntanttanctcnatttatncatttactngccncanncgntcgccnccctngttanagcncncatcncgccnctncnnatacnttntantttncncntttntnattnaacnccnatnnncccanattgtccnncaantntnatcnttctnnncat

SEQ ID NO: 6193 - DNA, 569 bp, Zea mays
  Probeset Number=SeqID_20596
acacctccatgtgagatgttcttctcatgcgctgaatatcatggttcaaactggactcaaggtcagtccaaatgcagttgaaagaatggggacattatcaaggtctgtgacatctacaccatctcgtttacaaatctttaattctattgttcaaacattgtgtgctagaaggaaatcagggctgaatcttgatgttccacatcgtcggaatgcaacctataatatgctaaatgaagcactaaattataagcttgctctcaataggcatgcagtagaggaacaccatgaatttctaattgaagaagattgagtaaaggtagaagctcttcatggtcctctataagagatcaacgatacaaccaaattattctcagctgtgagatgcctatctggatctagatcgcgagagatgttgctcgttacccgaggtgtgctacttggaactcaaatgaactccttatgagatggcaaatgctatgtatgacaagttccagaaatatttgggaaatcctaatattgtattgctcaaagctgttgttctagatccatcaatgaaaaccgaatttgcc

SEQ ID NO: 6194 - DNA, 546 bp, Zea mays
  misc_feature (200)..(200): n is a, c, g, or t
  misc_feature (216)..(216): n is a, c, g, or t
  misc_feature (259)..(259): n is a, c, g, or t
  misc_feature (265)..(265): n is a, c, g, or t
  misc_feature (296)..(297): n is a, c, g, or t
  misc_feature (300)..(300): n is a, c, g, or t
  misc_feature (307)..(307): n is a, c, g, or t
  misc_feature (318)..(322): n is a, c, g, or t
  misc_feature (325)..(326): n is a, c, g, or t
  misc_feature (329)..(331): n is a, c, g, or t
  misc_feature (333)..(333): n is a, c, g, or t
  misc_feature (335)..(335): n is a, c, g, or t
  misc_feature (342)..(342): n is a, c, g, or t
  misc_feature (344)..(344): n is a, c, g, or t
  misc_feature (346)..(346): n is a, c, g, or t
  misc_feature (353)..(354): n is a, c, g, or t
  misc_feature (356)..(357): n is a, c, g, or t
  misc_feature (360)..(362): n is a, c, g, or t
  misc_feature (367)..(370): n is a, c, g, or t
  misc_feature (377)..(380): n is a, c, g, or t
  misc_feature (383)..(383): n is a, c, g, or t
  misc_feature (386)..(386): n is a, c, g, or t
  misc_feature (395)..(397): n is a, c, g, or t
  misc_feature (405)..(405): n is a, c, g, or t
  misc_feature (407)..(407): n is a, c, g, or t
  misc_feature (409)..(409): n is a, c, g, or t
  misc_feature (413)..(413): n is a, c, g, or t
  misc_feature (416)..(420): n is a, c, g, or t
  misc_feature (422)..(429): n is a, c, g, or t
  misc_feature (431)..(434): n is a, c, g, or t
  misc_feature (436)..(467): n is a, c, g, or t
  misc_feature (470)..(471): n is a, c, g, or t
  misc_feature (473)..(484): n is a, c, g, or t
  misc_feature (486)..(546): n is a, c, g, or t
  Peptide Sequence Number=SeqID_11213
  Probeset Number=SeqID_20597
acctccccgtcgcatctcagtatctcactccccagtcgccgccgcacatacaaatacgcgacgggaacggccagggccgaaaccctaaaaccatcgccctgcccccgcctccgctgatccccaatggcggctgtgcagcgcttccctccgggagtcggcccccggtggctcggcaaggcggcggcgggtcaggagggcgnttggaacgtcgcttgnggccggaagcaggcgccgtcttccgggccggctgggttcccanttcgcnggcggagcagaaaaagcaagggcgggccggnnggncggcggnaaaaggaacgnnnnnaannggnnngntncctgggntngnccccggnngnnggnnnaaggnnnncctacgnnnnagncgnctgtcgcgnnntcctcggngngncganatnnnnnannnnnnnnannnngnnnnnnnnnnnnnnnnnnnnnnnnnnnnnnnntgnnannnnnnnnnnnnannnnnnnnnnnnnnnnnnnnnnnnnnnnnnnnnnnnnnnnnnnnnnnnnnnnnnnnnnnnn

SEQ ID NO: 6195 - DNA, 860 bp, Zea mays
  misc_feature (4)..(13): n is a, c, g, or t
  misc_feature (24)..(24): n is a, c, g, or t
  misc_feature (31)..(42): n is a, c, g, or t
  misc_feature (52)..(63): n is a, c, g, or t
  misc_feature (73)..(75): n is a, c, g, or t
  misc_feature (83)..(85): n is a, c, g, or t
  misc_feature (92)..(93): n is a, c, g, or t
  misc_feature (99)..(101): n is a, c, g, or t
  misc_feature (107)..(123): n is a, c, g, or t
  misc_feature (126)..(133): n is a, c, g, or t
  misc_feature (135)..(135): n is a, c, g, or t
  misc_feature (143)..(157): n is a, c, g, or t
  misc_feature (168)..(182): n is a, c, g, or t
  misc_feature (186)..(187): n is a, c, g, or t
  misc_feature (601)..(860): n is a, c, g, or t
  Probeset Number=SeqID_20598
ccannnnnnnnnnccggcgttcgngtcggcnnnnnnnnnnnncatgatgatnnnnnnnnnnnncatgggctcnnncatcctcnnngagaagnnctaccnnngggccnnnnnnnnnnnnnnnnncannnnnnnngngctctacnnnnnnnnnnnnnnnaaggagaaggnnnnnnnnnnnnnnnaggnngaccccatgaaggtgcattggatggcagagcgggtgtcaaacgtcgaattgaggaaaaatattgcaaagtttagaggtcacttttcgtaaccaaacaatggcaagtccaaacggggtaagggggccccctgggaactttccccccatggtttgactaagacccctcttgcgcgcgctctcccccccccaagaaaaccggtttttttttttccccccctcaaaaagaaaaacacccccccccccttgcggtgcgaccctttataaaacgaggggggcgccccccaaaaaccatacttcttctccggggggggcgccaccaacacatcccaccacccatggggggcgggggaaataatcctttctgccccccccgggcccccccccgcggtgggaacaataccctcccactgatannnnnnnnnnnnnnnnnnnnnnnnnnnnnnnnnnnnnnnnnnnnnnnnnnnnnnnnnnnnnnnnnnnnnnnnnnnnnnnnnnnnnnnnnnnnnnnnnnnnnnnnnnnnnnnnnnnnnnnnnnnnnnnnnnnnnnnnnnnnnnnnnnnnnnnnnnnnnnnnnnnnnnnnnnnnnnnnnnnnnnnnnnnnnnnnnnnnnnnnnnnnnnnnnnnnnnnnnnnnnnnnnnnnnnnnnnnnnnnnnnnnnnnnnnnnnnnnnnnn

SEQ ID NO: 6196 - DNA, 860 bp, Zea mays
  misc_feature (1)..(260): n is a, c, g, or t
  misc_feature (674)..(675): n is a, c, g, or t
  misc_feature (679)..(693): n is a, c, g, or t
  misc_feature (704)..(718): n is a, c, g, or t
  misc_feature (726)..(726): n is a, c, g, or t
  misc_feature (728)..(735): n is a, c, g, or t
  misc_feature (738)..(754): n is a, c, g, or t
  misc_feature (760)..(762): n is a, c, g, or t
  misc_feature (768)..(769): n is a, c, g, or t
  misc_feature (776)..(778): n is a, c, g, or t
  misc_feature (786)..(788): n is a, c, g, or t
  misc_feature (798)..(809): n is a, c, g, or t
  misc_feature (819)..(830): n is a, c, g, or t
  misc_feature (837)..(837): n is a, c, g, or t
  misc_feature (848)..(857): n is a, c, g, or t
  Peptide Sequence Number=SeqID_11214
  Probeset Number=SeqID_20599
nnnnnnnnnnnnnnnnnnnnnnnnnnnnnnnnnnnnnnnnnnnnnnnnnnnnnnnnnnnnnnnnnnnnnnnnnnnnnnnnnnnnnnnnnnnnnnnnnnnnnnnnnnnnnnnnnnnnnnnnnnnnnnnnnnnnnnnnnnnnnnnnnnnnnnnnnnnnnnnnnnnnnnnnnnnnnnnnnnnnnnnnnnnnnnnnnnnnnnnnnnnnnnnnnnnnnnnnnnnnnnnnnnnnnnnnnnnnnnnnnnnnnnnnnnnnnnnnnnnntatcagtgggagggtattgttcccaccgcgggggggggcccggggggggcagaaaggattatttcccccgccccccatgggtggtgggatgtgttggtggcgccccccccggagaagaagtatggtttttggggggcgcccccctcgttttataaagggtcgcaccgcaagggggggggggtgtttttctttttgagggggggaaaaaaaaaaaccggttttcttgggggggggagagcgcgcgcaagaggggtcttagtcaaaccatggggggaaagttcccagggggcccccttaccccgtttggacttgccattgtttggttacgaaaagtgacctctaaactttgcaatatttttcctcaattcgacgtttgacacccgctctgccatccaatgcaccttcatggggtcnncctnnnnnnnnnnnnnnnccttctccttnnnnnnnnnnnnnnngtagagcncnnnnnnnntgnnnnnnnnnnnnnnnnnggcccnnnggtagnncttctcnnngaggatgnnngagcccatgnnnnnnnnnnnnatcatcatgnnnnnnnnnnnngccgacncgaacgccggnnnnnnnnnntgg

SEQ ID NO: 6197 - DNA, 619 bp, Zea mays
  misc_feature (1)..(4): n is a, c, g, or t
  misc_feature (619)..(619): n is a, c, g, or t
  Probeset Number=SeqID_20600
nnnnaaaggcttacataggagtgtagctttcataatatttcatttctagaggaagggattaagcccggtttcgtatattaagccacaagaaactatacagggactcagggagaggttacttgacagaaattaatgaagggtttgtaccgaagctaacaaggaaagtcttgcggtactctatgagcttgtattagagtgatattgataaactgtttttcaggacgtgtagcttggctgcttgttcttaaatgattagattgtttcttcgtttcaaattttccaagcagcaataatgaaaattttcatgaagggattttgaaagtattgttttgccttccccatcatgctgaatccttttgttgattaacaattcgtttcttttcttgcaaggttctccgcttgcaagaatgcttaagcaaataccagagaactgctggaaccactcctcaggttgatcttgcccatcttttagcaactcgtgatcaagaactccgagcactcactgctgagatgaatcaagtgcactccgaacttcaacatgcccgtggtttgatcgatgaaaaggattcagagctccagcgtatccgtctgagcaacaaccagtatgttgaagaaaacn

SEQ ID NO: 6198 - DNA, 619 bp, Zea mays
  misc_feature (1)..(1): n is a, c, g, or t
  misc_feature (616)..(619): n is a, c, g, or t
  Peptide Sequence Number=SeqID_11215
  Probeset Number=SeqID_20601
ngttttcttcaacatactggttgttgctcagacggatacgctggagctctgaatccttttcatcgatcaaaccacgggcatgttgaagttcggagtgcacttgattcatctcagcagtgagtgctcggagttcttgatcacgagttgctaaaagatgggcaagatcaacctgaggagtggttccagcagttctctggtatttgcttaagcattcttgcaagcggagaaccttgcaagaaaagaaacgaattgttaatcaacaaaaggattcagcatgatggggaaggcaaaacaatactttcaaaatcccttcatgaaaattttcattattgctgcttggaaaatttgaaacgaagaaacaatctaatcatttaagaacaagcagccaagctacacgtcctgaaaaacagtttatcaatatcactctaatacaagctcatagagtaccgcaagactttccttgttagcttcggtacaaacccttcattaatttctgtcaagtaacctctccctgagtccctgtatagtttcttgtggcttaatatacgaaaccgggcttaatcccttcctctagaaatgaaatattatgaaagctacactcctatgtaagcctttnnnn

SEQ ID NO: 6199 - DNA, 2216 bp, Zea mays
  misc_feature (1)..(1): n is a, c, g, or t
  misc_feature (100)..(100): n is a, c, g, or t
  misc_feature (177)..(177): n is a, c, g, or t
  Peptide Sequence Number=SeqID_11216
  Probeset Number=SeqID_20602
naagctgaagcaaaaatatcagaactgaacacgaagcttctccgccagtctgaacagttcgaacgagaaaaacaagatctcaatgcaaaacttgaagccngaagctcagcaaaattcggatttgagaaaactcctgacaaatcttcaagaaaaatgcctggaatttagcaacaagtncattcaacgactaagaacgattttttactcagttggagccaacagcgaaaaatttaccccctcagctgaagatctaccaaaaacggacgcgtgggttgagggggagattgacgagctcgacgaagtcatagctgggcatggtgacttctgtgcctgggtggcttctcgagggactgctgcagccttcatgaaggctggctgtgatcatgggaaaattgtcaataggccaaattttactttgtcaccatcaatcctggatgacatccctgatctcgcccgaagcatctcgaatcgatttgtaaaaatgatatggacaaaaggtggtcgagagaaagctggagacgaagctcgtagccaccttgatccagtaagaaatcataccttgtgcttaccttttcctgtaaacttgattctaacttccaacgaccttattcatgtaggatgacgaagccgaagctgatgatcaaaaataacgccgaagccgaagctccttggagatttagatagtagactgcagacagtacttgaaaaacttttgagatttatttagtcaggataacaaataacttgtttttaatgtatgctcttaagaccttgtaatatatccttaacctttctgcgatgttggaaagttgcttggatatgaacgaaaaaacaaaaataaaaagcaaggcacatagccataattttctaagtaaaaaaaaaaaaaagtaaaaaaaaaaaaaaatagctgcgtgtttggagcttcttctccttaacatttggcggaatcagcgttgacttttcgctgtaagctctgcattcccttaggaacgactttggagcttcttcgcctttaccttttggcggaatcagcgttgacttttcgctgtaagctctgcattccccttaggaacgactttggagcttcttcgctttttacttttcatcactcgattgtgcgttctcagcttttacatttacattccttgggggattttactcttatagaaataaaaaacgaatttacatgtgatggccccatacaaaaccttgcacccctaacagatttggtaaggatgccatgaacaaaaggttgcctagaaaaaactataaaaaaaattacaagtcgttatataccatatgacaaaacctaaaccgattcttaataagtaggatgctgaattccaggcctcacgttgatcattagtagtttgatttttgaaaaatcaagaaattatttaaatacctttaataaatactactaaattgtccccaatgtattgtgttctccccttgcaatatgcccttttctcctcactaatttttctttagccgaacctttgtatctggcaatttcattgttacggcttgatatttaatgatgttttccacggcttgcatcctgatcccttctacagtatctttttcaacagaattacttgcttcagaatctagctctgaacttacttctaacctcatttatttccttttaggctcctccgcattttttgctataggactggatattttatctataccagtacatctttttgaacatggtattgttgtattgtagattaagatgcctatgattctccaaacttacatctgtcccattgttcgcatgctgtttttccttataaacactaacatacctgcgctaatttttctctgaaagactctcttagcatcttatttgctttttacttcagcggaattagcggtgccttttcgctataagatcttcattatcttaggaacgtctttgtagcttcctttcctttcactttcggcctaatcagcgttaacttttcgcagtattctctgcattccactaggaacgtctttggagcaactttcttgtttcaatcccttactcacagttgcttttgcagcctttacatttgcatctttgggggattttgctcttctagagataaaaaaggaaattacttgtgatggtcgcattaaaaacctttctcccccttcagaaaggaaaaggttgcaaaaaaaataaaaaaaaaaaaaaaaaagcactcgacgttgttgccccttct

SEQ ID NO: 6200 - DNA, 723 bp, Zea mays
  misc_feature (1)..(25): n is a, c, g, or t
  misc_feature (624)..(625): n is a, c, g, or t
  misc_feature (692)..(694): n is a, c, g, or t
  misc_feature (722)..(723): n is a, c, g, or t
  Peptide Sequence Number=SeqID_11217
  Probeset Number=SeqID_20603
nnnnnnnnnnnnnnnnnnnnnnnnntatatagaggcaaatattaagagggctggtgaatggtctctctgcaatatttctctagagaagaagcagaagagccactgggattttgttctggaggagatggtctggatggcaaatgacttcacacaggagcgtttgtggaaaaatacagtcgcagcacagatgtcccattggatttcttctagaggtcgagcggtatttgaagaagcaagcattcagagaaagcagaaatctgttgctagagttctagccaatggtattatgaacttttggtgttcagtccatactttacgagctagtggtggtattcctaaaccaatgcaaatacagcaaccgaatgagctagaggaaaataagcttggtggggtcaaaaccagaaaagcggatgaggagtgtttggagcaagaaaagtcccgtcagtctcctattcagagctttgcacttaggcttcttgagtataacattaatgcatctgaatttctgccattagccgaagcaccatcaactcctgacaggctaaatgattttggcattttgaaagtacctgatcaactttcagaagcaaatctcttttatggcgtagcacccggtgcaatgcnngcatacagggagtctatggagcgtctccttatttataataacaagaaagttggtgacactgtgctcnnngatgattatgagccatcaacatatgcann

SEQ ID NO: 6201 - DNA, 1167 bp, Zea mays
  misc_feature (1)..(4): n is a, c, g, or t
  misc_feature (11)..(15): n is a, c, g, or t
  misc_feature (911)..(1167): n is a, c, g, or t
  Peptide Sequence Number=SeqID_11218
  Probeset Number=SeqID_20604
nnnnaatccannnnngggggaaaggatggccatgaactactatgaagaccactcgatgtcatcatcatctcatgccgatgacacggatgaaaggaagagcacggtttcagtttcagtctcccccgaggctagcgccgacgaggagtcgttctcattctttgggctgctttgctacgccgacacggtagattggctcctcatggccctgggaacccttgggtctatcatccacggcatggcattcccggtcgggtatctcctccttggaaaggcgctcgatgccttcggaactaacataaatgatccggagggcatggtccatgcgctctacaaggtggtcccctttgtttggtacatggcagcagccactcttccagctggaatggttgagatctcctgctggatatactcaagtgagagacagttagcacgcatgcggctcgcgtttctgagatcaatccttaatcaagaggttggggccttcgacactgacttgactactgcaaccatcatcaccggagtaaccaactacatgagtgtcatacaagatgcaataggagagaagctgggtcatttcgtcgcaagcttctccactttctttgctggcgtcataatcgcgtttatcagctgctggcaagttgcaatgctttccttcctggtcattccacttatcctcatcatcggagcagcatacacgaaaaagttgaatgtcttatctttgtcacgcaatgctattgtttcggaggcagtatcagttgtagagcagactttgtcacatcagttaaccgtcatctccttcagcgaggaaccttgggccatgaagtcctttgtccagtgcatggaaagccaatttaatctaagcaagaaggaagcattgataaagggaataggacttggaatgttccaagcannnnnnnnnnnnnnnnnnnnnnnnnnnnnnnnnnnnnnnnnnnnnnnnnnnnnnnnnnnnnnnnnnnnnnnnnnnnnnnnnnnnnnnnnnnnnnnnnnnnnnnnnnnnnnnnnnnnnnnnnnnnnnnnnnnnnnnnnnnnnnnnnnnnnnnnnnnnnnnnnnnnnnnnnnnnnnnnnnnnnnnnnnnnnnnnnnnnnnnnnnnnnnnnnnnnnnnnnnnnnnnnnnnnnnnnnnnnnnnnnnnnnnnnnnnnnnnnn

SEQ ID NO: 6202 - DNA, 481 bp, Zea mays
  Peptide Sequence Number=SeqID_11219
  Probeset Number=SeqID_20605
acaatctatcagatgatgatgaagacgaaatcaatattcataatgtgctgctatcggaaaatgatgattttgatgaggaagtgcctctcgatgatgggagcgaccaggaaggtaaaatggtcctctcaaagaagcgtttatctctccaaagggacgaccatgcttcagtagctggtctaccacacgaaacacacgcccttcaacagcacgaaggaagctatgaccgccatcatttcagacagccttctttatgtggccctcgctgccccggggaggcttgaggatcaccatcctccccattgcgcctcccctctctctctctcctgtgctcggccaccctgcatgctcctttttaattcctctcttctctcctccttttcgcctccttctcttccctctctctttttcctgcccgttcctccttctctcttctttccccccgtctccctgcactcctgcggcagatttcttttgtttctct

SEQ ID NO: 6203 - DNA, 669 bp, Zea mays
  misc_feature (601)..(669): n is a, c, g, or t
  Peptide Sequence Number=SeqID_11220
  Probeset Number=SeqID_20606
agagcagccgacaactctctaccgtccgagaccccaagcaccagcgcggcggcggcggcggcggcgaccatggctgtcgggaagaacaagaggatctccaagggaaagaagtttaagatctgttccacagatcacgcgtgcgcgctcgcgaatcgggggttccacacatagcttcggcgttttgaatttgatgtactaatggagtctaagggtggcaagaagtctagcaggtagtccgtttccctggatgtatggaaaggtccccttgctacagcaattgaggacgttcgacctgccgggaggcgcgaaaaagctcccaggcctgctgcttactccaactggcgcaaaggagccatccctgatatccccttttgggctccccgggttctaaataggcttagggtttttctgtttccgaaacctttcagatttcttaaccacacccccctcggagctggctgttttccctggacaaacgcgacccagtctcccccaaggtcttggccttcccatgggaggccctcccctcccctccaatccaacggggggggtggggggtttccgggagcaccccgggtcgccaaagggcgggggccccttnnnnnnnnnnnnnnnnnnnnnnnnnnnnnnnnnnnnnnnnnnnnnnnnnnnnnnnnnnnnnnnnnnnnn

SEQ ID NO: 6204 - DNA, 669 bp, Zea mays
  misc_feature (1)..(69): n is a, c, g, or t
  Probeset Number=SeqID_20607
nnnnnnnnnnnnnnnnnnnnnnnnnnnnnnnnnnnnnnnnnnnnnnnnnnnnnnnnnnnnnnnnnnnnnaaggggcccccgccctttggcgacccggggtgctcccggaaaccccccaccccccccgttggattggaggggaggggagggcctcccatgggaaggccaagaccttgggggagactgggtcgcgtttgtccagggaaaacagccagctccgaggggggtgtggttaagaaatctgaaaggtttcggaaacagaaaaaccctaagcctatttagaacccggggagcccaaaaggggatatcagggatggctcctttgcgccagttggagtaagcagcaggcctgggagctttttcgcgcctcccggcaggtcgaacgtcctcaattgctgtagcaaggggacctttccatacatccagggaaacggactacctgctagacttcttgccacccttagactccattagtacatcaaattcaaaacgccgaagctatgtgtggaacccccgattcgcgagcgcgcacgcgtgatctgtggaacagatcttaaacttctttcccttggagatcctcttgttcttcccgacagccatggtcgccgccgccgccgccgccgcgctggtgcttggggtctcggacggtagagagttgtcggctgctct

SEQ ID NO: 6205 - DNA, 555 bp, Zea mays
  Peptide Sequence Number=SeqID_11221
  Probeset Number=SeqID_20608
tacttggggttgtaggaagagtttcagatgaatgagtttgtggtgcagctaggtcaggttagacaccagttgtctgagaatatcttcctatatctgatgctactactattaagaagagatgttctgacggaagatgtggaagggggtgcacacctactcttctgtaactgggttgtggagtgacaggtcaagtgaatgggtgcgatggaaacatggtggtggatgggtgaatggggagcatacagagccattagaaagggatgtcgcagggcctttgtcaatggcatgctgcattttctcttctaccacttccagacagtcgtgtatgacagttgcagtgaatggccaagggaacgcatgcagaatcatcccatggccagatcagcgtgagtgtcctcaagttgcttttattagtcaatcacaggggcatcttcattgtatcagtgaattggttaaaggtagcgatttcagcttccctggtctatccatctgggttctcgaggactacgactcaatagagtgggttctgaagcatagtctgagcttttagcagct

SEQ ID NO: 6206 - DNA, 555 bp, Zea mays
  Peptide Sequence Number=SeqID_11222
  Probeset Number=SeqID_20609
agctgctaaaagctcagactatgcttcagaacccactctattgagtcgtagtcctcgagaacccagatggatagaccagggaagctgaaatcgctacctttaaccaattcactgatacaatgaagatgcccctgtgattgactaataaaagcaacttgaggacactcacgctgatctggccatgggatgattctgcatgcgttcccttggccattcactgcaactgtcatacacgactgtctggaagtggtagaagagaaaatgcagcatgccattgacaaaggccctgcgacatccctttctaatggctctgtatgctccccattcacccatccaccaccatgtttccatcgcacccattcacttgacctgtcactccacaacccagttacagaagagtaggtgtgcacccccttccacatcttccgtcagaacatctcttcttaatagtagtagcatcagatataggaagatattctcagacaactggtgtctaacctgacctagctgcaccacaaactcattcatctgaaactcttcctacaaccccaagta

SEQ ID NO: 6207 - DNA, 677 bp, Zea mays
  Peptide Sequence Number=SeqID_11223
  Probeset Number=SeqID_20610
tagcgtggtcgcggccgaggtacacaggttgtctttgggagactggcaacagaagccacaaaatgaccagttccagcagaaagtggtatcgttttaggccttcctcttcccctcctgccacttgactctcttttattacttgatttaggtgaaatgtggataggcagttcagaatcatctgaaagagcacttttacacgcattaccctcacggtttaacaagctagccgaacaaagctcatgcattgataccgtgttctgtgcagatggcaaagcattctcaacagagactgcaggatcatttggaagaatttctgtggaacaaatgctctgtgattcaacaccagaaaccacagggcaatatagagcattagaaattgttttcttctcatccttccctctaatgctctggccttttgacttatcaccacaagttgcagtagatgaagatgcaaacggtgatgatgcatcaactgcaacaatgctaaaactagagttagactctgtgcaagcagtgtgatccatactgcgtccaaataaaacaggctgaccagttgtatctttccccaggtcaatcatagtgtctgaatactttcgaggcatcccccgtgttctctttggttgcttacgagttgcagttgctggagatggttcggtacctcccccgggccccccccg

SEQ ID NO: 6208 - DNA, 677 bp, Zea mays
  Probeset Number=SeqID_20611
cggggggggcccgggggaggtaccgaaccatctccagcaactgcaactcgtaagcaaccaaagagaacacgggggatgcctcgaaagtattcagacactatgattgacctggggaaagatacaactggtcagcctgttttatttggacgcagtatggatcacactgcttgcacagagtctaactctagttttagcattgttgcagttgatgcatcatcaccgtttgcatcttcatctactgcaacttgtggtgataagtcaaaaggccagagcattagagggaaggatgagaagaaaacaatttctaatgctctatattgccctgtggtttctggtgttgaatcacagagcatttgttccacagaaattcttccaaatgatcctgcagtctctgttgagaatgctttgccatctgcacagaacacggtatcaatgcatgagctttgttcggctagcttgttaaaccgtgagggtaatgcgtgtaaaagtgctctttcagatgattctgaactgcctatccacatttcacctaaatcaagtaataaaagagagtcaagtggcaggaggggaagaggaaggcctaaaacgataccactttctgctggaactggtcattttgtggcttctgttgccagtctcccaaagacaacctgtgtacctcggccgcgaccacgcta

SEQ ID NO: 6209 - DNA, 492 bp, Zea mays
  Peptide Sequence Number=SeqID_11224
  Probeset Number=SeqID_20612
ttatttagatcgtccgtccggtcaggttcttcatccattaaagcttcatcttgttttgctcatcaagaaagagagttcagttaaacaactcgtcagcattgtagccagcaattgctctccaccttgtgcacatatcacttcaagtaccaacatgtctctccctatcaagaaagtttatcccgatccaacttctgcatcagcagctatcaagcagtcaatcaattttcctgaacctaggttaaagcctgcaaaagcattgttacaggtaaaaggtctcagttttaaatttcgtaacaagccaagtcatcttaaaagctcaaggtctacagaaatcaagtctcctatttctgtagaggccgatacttctgaacaaaaactatgggtgaaaaagtcatcggaagaagaaaagaaccctgacgattctttgtctgacaagcacaaaaagctgactgcagtcagattagatcattttgatgacaatggaaaaaaggt

SEQ ID NO: 6210 - DNA, 600 bp, Zea mays
  Peptide Sequence Number=SeqID_11225
  Probeset Number=SeqID_20613
aggagaagttgttgcccttgatagatctcacaataaggtgatggatattctgaagttggcttctgagatggacttgagttgtattaaagcttataaacttgatgctctcaaatctgtacggaaaactgatgaagcaagaagccttggcatggctgataatcacagtgaagcaattgaaacaccaacagaggacccttgccatgcgacactaggtgggaaatctaccagtgtagacgaagacagctcaacaacaacagtggtgttttctgataacaaaaacctaaattccaaaagatacattagcaaggcagaactcaggaagaatttaaggcagatgaagaatggacctggaagaaataattgctctggtggtagagttgaaaagtcaaaaggattttgtcctaacagctttgatcgtgtcctccttgatgctccatgttctgcgcttggcttgagacctcggctctttgctggtgagacccattattatgacaggaaactctagaatcactgagggaacattcgaagtatcagaggaaaatgtttgatcaagctgtcaagctagttcgtcctggtggggtgattgtttattcaacgtgt

SEQ ID NO: 6211 - DNA, 932 bp, Zea mays
  misc_feature (2)..(5): n is a, c, g, or t
  misc_feature (826)..(829): n is a, c, g, or t
  misc_feature (835)..(837): n is a, c, g, or t
  misc_feature (845)..(846): n is a, c, g, or t
  misc_feature (858)..(858): n is a, c, g, or t
  misc_feature (863)..(869): n is a, c, g, or t
  misc_feature (885)..(890): n is a, c, g, or t
  misc_feature (901)..(905): n is a, c, g, or t
  misc_feature (910)..(912): n is a, c, g, or t
  misc_feature (919)..(919): n is a, c, g, or t
  misc_feature (931)..(932): n is a, c, g, or t
  Peptide Sequence Number=SeqID_11226
  Probeset Number=SeqID_20614
annnnccctcccctcgcgtatctctcgagactgaaggcttcggcggcgcgagcgtcgaccccgaccccgaccccggccaagatcccggcggccctttcctccagacgtagcttctcccacgggcctcggtccctaccgccgccccagccttctcaccccgtcggcgccgcggcagtccctatcgccgcctccgctttctcacgccgtcggcgccgcctcagcccctaccgccgccgacgatgcttcccccacggccccccttctccggcgcaagcgcaaccgttattccgatattctctccggtctcctgccgaggggaagacttgggacgagataatggcaagccttgctgattctttcttggccgatctcgacgaactttcagacaatgaagcctaccctgaagaagacaatgctgaggcagtgggtatggatgaggatggtgacgatgatatgcctgaccttgagtctcttaattatgatgatcttgacagcgtctcaaaactgcagaagacacaacgttattctgacataatgcaaaaagttgaaggagcacttgagaaagacacatatttgtctaatcaagggttcatcctggaggaggatccagagtaccagcttattgtagattgcaatgccttatcagtagatattgagaatgagctcattataatacataatttcatccgtgacaagtataggctgaagtttcctgaactggaatcccttgtccatcatccgattgattatgcccgtgttgttaagaagattgcaaatgaggtggatataacactagtagatctggaagggctcttaccttctgcannnntaatgnnngtctctgnnacagcatcgacnactannnnnnngcctctttctcaggannnnnnggtaaaaacannnnngcatnnnacagagnccttaatcttgnn

SEQ ID NO: 6212 - DNA, 414 bp, Zea mays
  misc_feature (2)..(2): n is a, c, g, or t
  Peptide Sequence Number=SeqID_11227
  Probeset Number=SeqID_20615
angccgccgtaaagtccaaacgcggaacacccagcaccagcacggcaggtcggcagcacatccctctccggcggtccggccatccgtcgtcgcagcacggcggcacttccctctcccaggtgaccaggtcccagcctccggcggtccagccctccgccgtccctcatctggcgttctacttctgctgtccactgctgacgactcctcgctggctcgctgcaccagcacgcacggcaaccagcctccgtcgtctagacctccaggggacaggggttgccagacctggacaggggctaccagaaaattatctagtatagtattgtgagtatatatattggttctatatataatggcaggtggcgggaggagagcttagaaacagcccaactacgcaaacttgacagtctacattag

SEQ ID NO: 6213 - DNA, 584 bp, Zea mays
  Probeset Number=SeqID_20616
tcttgatattttagatacttgaggttactatgaaatcttgaaacttactaatctaggatcatctgtcgcctaatattgtgggcgcggtcgcggccccggtacatcctgctggttgatcttcggatcagagagctcttcccataaggcgaaaggttaatggcccaccagcaaacattttgattatgttagaaaacatgcatattcagaactcaaaatgtgcttcgaaaatataattctttactggatccgaataacagcgtttcgccgaccaggctctcctttacatttacaaacatgcagatttcttttgggaaatttgaactgtttccttcaggttagatttcgtgtagttactgtccccaatggttaacaagatgaaaaccgtgcagcattttgaatcggcacttgttattcccgtgctagttagtgtcccatccattcccatatttcgaacgttccgacaaaaacgggaagactcattaaagagggcctcagagatcttggtggttcttggtcgtcaggcggagcctttgctccatcaagagtagcaaatattttgatcacatcaccggcccccccgcgta

SEQ ID NO: 6214 - DNA, 584 bp, Zea mays
  Peptide Sequence Number=SeqID_11228
  Probeset Number=SeqID_20617
tacgcgggggggccggtgatgtgatcaaaatatttgctactcttgatggagcaaaggctccgcctgacgaccaagaaccaccaagatctctgaggccctctttaatgagtcttcccgtttttgtcggaacgttcgaaatatgggaatggatgggacactaactagcacgggaataacaagtgccgattcaaaatgctgcacggttttcatcttgttaaccattggggacagtaactacacgaaatctaacctgaaggaaacagttcaaatttcccaaaagaaatctgcatgtttgtaaatgtaaaggagagcctggtcggcgaaacgctgttattcggatccagtaaagaattatattttcgaagcacattttgagttctgaatatgcatgttttctaacataatcaaaatgtttgctggtgggccattaacctttcgccttatgggaagagctctctgatccgaagatcaaccagcaggatgtaccggggccgcgaccgcgcccacaatattaggcgacagatgatcctagattagtaagtttcaagatttcatagtaacctcaagtatctaaaatatcaaga

SEQ ID NO: 6215 - DNA, 569 bp, Zea mays
  Probeset Number=SeqID_20618
agctacaactctatgcagaggagcatagatatattgtcttttgtgctctctcttcgagtccgtgtgctatttgacaatgcaaaatgggcatatcctggtggattctcggaagaaaagcaggcgagaagggagctgaatgatccagagaatgcacttatctatgcttttgctgttttctcatcactggagctataacaactccccttgacgtcatgaagacaaggctgatggttcagggacaggggaaccaatacactggaattgtaagctgcgcgcggacaatcctcagagaggaaggccctaaggcattctcgaaggcatcacttgtgccaacagctttagtactcttaagatgggaaacaaacactagtgaaatggaaactcttttgtaaatggtcgtactccgcttgcaaatgagatatataagcaaatggttgcaaagaaggaaagagagctagaagaaggagaagcacaaaagtcaccctccaagctcaacaggccgcacttgaagaaaaccaaagtttgctgcgccagacccaagaggaagtgaaggggatgcacaccaagtt

SEQ ID NO: 6216 - DNA, 468 bp, Zea mays
  misc_feature (453)..(453): n is a, c, g, or t
  misc_feature (468)..(468): n is a, c, g, or t
  Peptide Sequence Number=SeqID_11229
  Probeset Number=SeqID_20619
aaaaaaaatttgcttcctttgttgtgagttgtgactccttgcgggctgcgagaccgaatcgatcagcatcgccccgccccgccccgcgcccccgcccccgccccgtgcgccatgttcctgcggcggctgagaacgtccgccgccctccgccggggcgcgaccaccggcggagtcctggccgccgtccgcgccgagctggccaacgagctctcctcctcggctccccctccattccgttccgagctggcgcccgacttcgacaccgtgtctgacgccccgcgcgcgcaggacgtgctcctgcgccgccgggacgggtccgaggaggtcctcgtgtcggcgctgctcgccccgctgcagttcgtgggccgagacccgctgcccagggccgcgctcgtcaaggtcttcgtcagtaagcctggcgcggcgcccgtcctgcacttcgactgccgtgcntcttgggtgggggan

SEQ ID NO: 6217 - DNA, 212 bp, Zea mays
  Peptide Sequence Number=SeqID_11230
  Probeset Number=SeqID_20620
tagcgtggtcgcggccgaggtgtaaaagcatgtctgtagcaaggatatatctgttctgcaggacctcctgattttagtaagtactacccctagcaaggtagtgtctcgacgggccaatgcttggcgaagttcctgcgtcagttttcctgccaattgctgataggccgacgcttgttctgcagacatgctgatatcgacaaattcctcctggt

SEQ ID NO: 6218 - DNA, 212 bp, Zea mays
  Peptide Sequence Number=SeqID_11231
  Probeset Number=SeqID_20621
accaggaggaatttgtcgatatcagcatgtctgcagaacaagcgtcggcctatcagcaattggcaggaaaactgacgcaggaacttcgccaagcattggcccgtcgagacactaccttgctaggggtagtacttactaaaatcaggaggtcctgcagaacagatatatccttgctacagacatgcttttacacctcggccgcgaccacgcta

SEQ ID NO: 6219 - DNA, 1020 bp, Zea mays
  misc_feature (1)..(95): n is a, c, g, or t
  misc_feature (115)..(115): n is a, c, g, or t
  misc_feature (122)..(122): n is a, c, g, or t
  misc_feature (442)..(442): n is a, c, g, or t
  misc_feature (467)..(467): n is a, c, g, or t
  misc_feature (668)..(668): n is a, c, g, or t
  misc_feature (707)..(708): n is a, c, g, or t
  misc_feature (714)..(714): n is a, c, g, or t
  misc_feature (1020)..(1020): n is a, c, g, or t
  Peptide Sequence Number=SeqID_11232
  Probeset Number=SeqID_20622
nnnnnnnnnnnnnnnnnnnnnnnnnnnnnnnnnnnnnnnnnnnnnnnnnnnnnnnnnnnnnnnnnnnnnnnnnnnnnnnnnnnnnnnnnnnnnnnccggagtgtgaggacagtgncttgcanaccaggcctcggcggggctattgttccacgttcgtgtgaccatgttcctcagcctggagaggagccatgccctctggacccttggattgccgttccagataagagcaagtatgcggatctccagaccctcaaattgcaagagaatcctgaggatgttccaactggtgagcttccaaggaatgtgctgctttctgtagataggcacctagttcagactattgttccagggactagattaactgttgtttggcatctacagcgtgtaccaagcatccacaacccagaagggtgctgttggtgttaagccagccttacattanagccgtggctttagagcaatcctcngagaacaataactcaaatggccccctcaaacttcactccttgatgagggaatatgggaattcaaagaattttgcacagaggggcaggatgcatatgccaagctctgctcaatgattgggccttcgatttatggccattctgatgtcaagaaagctattgcatgcttgttatttggggggtctaagaagagctacctgatgntgtacgtttgagaagggacattcatgtcttgcttctggnngacccnatccacagcaaaatcacagttcctcaaatttgtaaagaagactgcccctattgcagtctatacctctggcaaaggttcatctgcagctgggcttaaggaatcggaacttcggataaaacttcccgccaggtttttttggaaaggagaaccatggttttggctggggggggagaattttggtcccagaatttgaaaaatgcgccctgaaaacaaggggggatttccgggggccgggggccccaaaaaaatttttttgccaaaaggggggtttaaaaaaggccccctttttggggttttctttttttn

SEQ ID NO: 6220 - DNA, 407 bp, Zea mays
  Peptide Sequence Number=SeqID_11233
  Probeset Number=SeqID_20623
tctagtttccttattgttgtgtccaatttttcatggacactattagtgatgaaaaaggtccaaatggcttttatttcttgataagcacgggcattgagcaaaagctggtaatagtatgttgtagcaaacatttaagtaataatatctgaatgaaaagttatgcttctaacagaaaacgtaagcattttatagttcatagtttataatatcaaacctcccaagttgacttctacacagcagccagttgtttcactggcatcaattactccttcccttagggaagcatgtatctatctgattctaaaacactaagttgtatattattttctttacagataagcaatagtgagacagaaaaaggtgcaaccaatcattcaaaaagcataacaaagcagccccaatgtttt

SEQ ID NO: 6221 - DNA, 407 bp, Zea mays
  Probeset Number=SeqID_20624
aaaacattggggctgctttgttatgctttttgaatgattggttgcacctttttctgtctcactattgcttatctgtaaagaaaataatatacaacttagtgttttagaatcagatagatacatgcttccctaagggaaggagtaattgatgccagtgaaacaactggctgctgtgtagaagtcaacttgggaggtttgatattataaactatgaactataaaatgcttacgttttctgttagaagcataacttttcattcagatattattacttaaatgtttgctacaacatactattaccagcttttgctcaatgcccgtgcttatcaagaaataaaagccatttggacctttttcatcactaatagtgtccatgaaaaattggacacaacaataaggaaactaga

SEQ ID NO: 6222 - DNA, 331 bp, Zea mays
  Peptide Sequence Number=SeqID_11234
  Probeset Number=SeqID_20625
tactgacggacggacgacgactggtcgagctgctgtgtggtggattggaggagactggtatggtggagtgtagcctgggcaggttgatggatcgagctgggaatgatggactaatttagtttagtttggatttaatatacgagatatctactctgttagattatgctgagggtcttggagatcatgttagagcatttgcaaaagctaccctaaatctatttttttaccttgggcctggggcgtgtccacgctcatggttgtgccgcgggcgccaccgcgccctgagagcttcctcgcgcgccttggcggacgagagcatgctgacgtacgg

SEQ ID NO: 6223 - DNA, 331 bp, Zea mays
  Probeset Number=SeqID_20626
ccgtacgtcagcatgctctcgtccgccaaggcgcgcgaggaagctctcagggcgcggtggcgcccgcggcacaaccatgagcgtggacacgccccaggcccaaggtaaaaaaatagatttagggtagcttttgcaaatgctctaacatgatctccaagaccctcagcataatctaacagagtagatatctcgtatattaaatccaaactaaactaaattagtccatcattcccagctcgatccatcaacctgcccaggctacactccaccataccagtctcctccaatccaccacacagcagctcgaccagtcgtcgtccgtccgtcagta

SEQ ID NO: 6224 - DNA, 282 bp, Zea mays
  Peptide Sequence Number=SeqID_11235
  Probeset Number=SeqID_20627
tcgaccgcccgcccggccaggtacagatatgctgccggctgttggatagcgaggaatggggaatagagcaaccaatgtattttctctatatgggccaattccctgtatgcccctggaaaatatactcatcccttgtatgcccctggccccccatgtcatagcccccaaaaattatacctatatgccccccagtggcccccaagggatgcgcctaaaatctgatggcatcccaggaattttctctatatataaatgtgtttcatctaatcttgtatctcagat

SEQ ID NO: 6225 - DNA, 221 bp, Zea mays
  Probeset Number=SeqID_20628
tagcgtggtcgcggccgaggtaccctaccacggatgcaatatcgttgcgtgacctgcgtggcggtatgcgcgtgcgagtcttcagtttaccgattcaaagtaaaattcgttttatttaatttaattaatagattcatacaatagtttgtatatgttttattactccgttactccctccgtctcaaattaaaattcgttttatttaattaatagattcatac

SEQ ID NO: 6226 - DNA, 221 bp, Zea mays
  Peptide Sequence Number=SeqID_11236
  Probeset Number=SeqID_20629
gtatgaatctattaattaaataaaacgaattttaatttgagacggagggagtaacggagtaataaaacatatacaaactattgtatgaatctattaattaaattaaataaaacgaattttactttgaatcggtaaactgaagactcgcacgcgcataccgccacgcaggtcacgcaacgatattgcatccgtggtagggtacctcggccgcgaccacgcta

SEQ ID NO: 6227 - DNA, 539 bp, Zea mays
  Probeset Number=SeqID_20630
tacggaaaatacaccggtaacggtcgaaatctagaatacgatcggtaaacagatcaatataacaagttcataatacaataaatatcgcaaggataacacatccatatcacaagttcataatacaataaagatcacaaaggtcataagtccacaattcaaaatataataaattcgcaaagttcacaagtttataactaatacaaattttatgatgcaggccaatcttatgatgctaagagattcttactgtatcctcacccgagctcgcaattggcgcatagttcatgtgacacacgaagcatggaactcgtgctttaaaagagtagatatagataaatgaaatccatatggtttcaatcaaaccagccatattaccttttaaaaaaatgaatttgatactgtttgatagtcaaaacatcaaggacagggaaactgtcatctggtcattactatggcttcttccaaacattgtgtaaaacatggtcaattatatgatgtcagtttgataatagcaaggctaccagacttctacaaccaac

SEQ ID NO: 6228 - DNA, 539 bp, Zea mays
  Peptide Sequence Number=SeqID_11237
  Probeset Number=SeqID_20631
gttggttgtagaagtctggtagccttgctattatcaaactgacatcatataattgaccatgttttacacaatgtttggaagaagccatagtaatgaccagatgacagtttccctgtccttgatgttttgactatcaaacagtatcaaattcatttttttaaaaggtaatatggctggtttgattgaaaccatatggatttcatttatctatatctactcttttaaagcacgagttccatgcttcgtgtgtcacatgaactatgcgccaattgcgagctcgggtgaggatacagtaagaatctcttagcatcataagattggcctgcatcataaaatttgtattagttataaacttgtgaactttgcgaatttattatattttgaattgtggacttatgacctttgtgatctttattgtattatgaacttgtgatatggatgtgttatccttgcgatatttattgtattatgaacttgttatattgatctgtttaccgatcgtattctagatttcgaccgttaccggtgtattttccgta

SEQ ID NO: 6229 - DNA, 702 bp, Zea mays
  misc_feature (601)..(702): n is a, c, g, or t
  Probeset Number=SeqID_20632
gccggggtacctccttccgtgtggcatataaatccgacgcgccgacgcctcgattcctcgcctccccgagagcccccgtttctgtcacaaatcgccactaaaaccctagccttccgccatggccacctcccctgccgcctcgtcctcctccgctccgaccgcctccgcggtggctgcggctacgatggctgttgaggccaccgacgggccggtgctcagcgtagtatcgaagcgtctccgcgcactgcggaagaagtacaaccgaatcacgcagatggaggagtcgctcgccgccggcaagacgctcaaccgagagcaggaggaggttctccgctccaagcccgtcgtcgccgctctgatcgacgagctcgagcgcctccgccctccgctcgcctcagctctcgcggaggagctctccccccggctctgcccccgccccggctcccgcccccgccgccaccgattcctcctccgacccaaattcgtcaggcccaggaccctcctcgcggctcggactacttttggctcccctctttcgaatgtcaaaggaaaaaaaagcggactttccgtcttcctttggggaataaccccggcgggggannnnnnnnnnnnnnnnnnnnnnnnnnnnnnnnnnnnnnnnnnnnnnnnnnnnnnnnnnnnnnnnnnnnnnnnnnnnnnnnnnnnnnnnnnnnnnnnnnnnnn

SEQ ID NO: 6230 - DNA, 597 bp, Zea mays
  Peptide Sequence Number=SeqID_11238
  Probeset Number=SeqID_20633
ctatccgggctcggacagagacccgactgtcgccggatagccgatgatggggtcaggccggggtgtgctcattggtcttaccgtactggtcgaggtaccgcaagaactccagcacgtgcgcaccgttgcatcgcgccatgtacaacgacggccggtggttcctcaggtactgcccgaacgtgttccagtagcgccgcttctgcgaatcgtaccggctcggcgacgccagcgcagacgccgcgcccgcggatgacgcccccggcgacagcgccccggacgccgagccgccgccgccgccgctgttgtcggagtgcgggctgtccgggtgcggcaccaggtccatctcgcttcacttcacttcacttctcggtcgagaggcgagagctagctagcctccggccggccggacagccagcatgcggcaccaggctcgccgcctccaagatcgccggaaagatcccttgctcactcacggcaacagcatgcctcggcgccgaggtcggggggggaagagaggaggggggaggggagcggatgcaagggagggggtgagtactaattggcggcgagactggaagaggaaagggactgtggcac

SEQ ID NO: 6231 - DNA, 259 bp, Zea mays
  Peptide Sequence Number=SeqID_11239
  Probeset Number=SeqID_20634
acccggtggacattccagacgtgctcaagcactaactagcttccacgtccatcaacagacaacagttgcttccgctcatcccaaacaaaaaagaaaacaactgttttaaatccggcggaataattgagatgtatacagtataccgcgacatgttgggtttgttaattgtttatcctgttgattcatccgctatagtctcacatcagcgtagtatcactatcacactatggttatagatgcgcggtgagacagaagtgta

SEQ ID NO: 6232 - DNA, 614 bp, Zea mays
  misc_feature (4)..(6): n is a, c, g, or t
  misc_feature (360)..(360): n is a, c, g, or t
  misc_feature (384)..(384): n is a, c, g, or t
  misc_feature (387)..(388): n is a, c, g, or t
  misc_feature (401)..(401): n is a, c, g, or t
  misc_feature (601)..(614): n is a, c, g, or t
  Probeset Number=SeqID_20635
gtcnnntcgtctgtcgtctccacctcgtccctcacctctgaccccaagcgacccaagcctaggccaggccccacccccgcccccgcccctatccaatccgatggagggcggcgactcgtccggcgccggcgccggcggcgccgtggccgcggcggccaagtggcggagcgacgcgtcgcgggcgttccagtactacctggaccgctcgacgcctcacgctacggggcggtggctcggcacgttcgccgccgcggcaatctacgcgctgcgggtctacatggtgcagggcttctacatcgtcacctacgggcttgggatctacctccttcacctcctcatcggtttcctctcccccatggntcgacccgagctcgacccctccgncgnncgcgaggggccgncgctgccaacccgggggtctgacgaggtcaagcccttcatcaggggtttccccgagttcaaggtctgggatggaatcccaaaagttttggtggagcttttggggaggacttcctcccgggggtggaggttccgggttttgggccaaaccccctggaaaaggggtgggtccctttggcctaaaaggggagccccaagtggnnnnnnnnnnnnnn

SEQ ID NO: 6233 - DNA, 452 bp, Zea mays
  Peptide Sequence Number=SeqID_11240
  Probeset Number=SeqID_20636
acttgtgatcaggataccggcaccaagttctgttccaaaactgagttcttagctgaaaagcagtcacatctttcaggcgaaccccccattgctgttcatgttgacaagggtgtctatgattatgtcaaagacgatgatggtgatagtttggaagaaaatgctgcctggatgctctgttctttatcagataataaatgtgctggatcaccaaggaagggaactgataggttgtcaaagagatctttttctcagatttcaaaccattttaagaattcatatggaaaaatcaaggatatatgcagtcctgctaggttgctgcggaagcgtgatggcaaagttccgttcttgaagcgtcgtcagcgtcggcatttttatgaagtcagccctagcgatgtggatccattctgcattgttaaagagaggatcagggttttttggcctcttgatgagac

SEQ ID NO: 6234 - DNA, 408 bp, Zea mays
  misc_feature (291)..(294): n is a, c, g, or t
  misc_feature (303)..(307): n is a, c, g, or t
  misc_feature (337)..(340): n is a, c, g, or t
  misc_feature (344)..(348): n is a, c, g, or t
  misc_feature (399)..(400): n is a, c, g, or t
  misc_feature (402)..(404): n is a, c, g, or t
  Peptide Sequence Number=SeqID_11241
  Probeset Number=SeqID_20637
cgacgcttccctattgaatctaaggggcggcaaaagaagctgtatgaggattgtctactcgaataaggtgataaatactaaagtatgcttgcacagcgcttcaggtacatctgccccctacacgcgtgctagggtgaaaaggcgtgcacataatatcgaatgtcgtgctcacatttaatgcgagccatgcagtagttatctcttcgcaaagcgaccatcataccgaatgtctggttgtcccccgaccagggttgggaccgtgacagcaatttgtgttacctgatttctgtnnnnttaacgccnnnnnatacgttgttcaggtttgcatatggatatnnnntggnnnnnaatgataatgcaaacctgaacaacgtatacattgccgttaacaccatcatnnannncgcg

SEQ ID NO: 6235 - DNA, 318 bp, Zea mays
  misc_feature (1)..(19): n is a, c, g, or t
  misc_feature (22)..(25): n is a, c, g, or t
  misc_feature (27)..(78): n is a, c, g, or t
  misc_feature (80)..(97): n is a, c, g, or t
  misc_feature (106)..(108): n is a, c, g, or t
  misc_feature (112)..(116): n is a, c, g, or t
  misc_feature (118)..(119): n is a, c, g, or t
  misc_feature (124)..(124): n is a, c, g, or t
  misc_feature (237)..(238): n is a, c, g, or t
  misc_feature (278)..(282): n is a, c, g, or t
  misc_feature (287)..(288): n is a, c, g, or t
  misc_feature (295)..(296): n is a, c, g, or t
  misc_feature (308)..(314): n is a, c, g, or t
  misc_feature (316)..(318): n is a, c, g, or t
  Probeset Number=SeqID_20638
nnnnnnnnnnnnnnnnnnncannnntnnnnnnnnnnnnnnnnnnnnnnnnnnnnnnnnnnnnnnnnnnnnnnnnnnnnannnnnnnnnnnnnnnnnntaaagcccnnncggnnnnnannccccntgtggagcccacatgctcctgagactgctgccaggtgccaggctagtcttaggagcatgtgggctccacaaggagattagcagctgctggagcattaatgtgaaactaccaanncttatcattacaaactactaaagaacttaaaccatcacgnnnnncggtnntcacaannttgctactgaannnnnnntnnn

SEQ ID NO: 6236 - DNA, 705 bp, Zea mays
  misc_feature (1)..(78): n is a, c, g, or t
  Peptide Sequence Number=SeqID_11242
  Probeset Number=SeqID_20639
nnnnnnnnnnnnnnnnnnnnnnnnnnnnnnnnnnnnnnnnnnnnnnnnnnnnnnnnnnnnnnnnnnnnnnnnnnnnnnagtaagagcttcgttttgagttcagtttgttgatattaaaggagaatggaggattcatacttaaatacttaacaaggattcatacttaaatttatctgatgcaatttttcaactgaacgtgaacttggcaggggtgagtacggagtagtgtacaagcgagttctgcattgagctgtcgtagagagcgtagacagacactctagccaacgttgttggctgggattggaacacaaaagcgagacaagggatgagaagcacaggaggagccaggtgaggtgaggtggcgacacacaggagtcgggcaagctcagctcatctcatctcatgctctactaaaaaggattagcccatctcaagagaaaagagtaacattgtcagcccactgcaataaccacactattaccagtcttgaaattcactttttgtttgtttgtcatagaaccagacattcatgacaggaaatgatctccttctcaagaccagaaaagagcatttaagttactaatcagtgtatggtttactagtttggcggcagcctcaaatcgggtctagaaggtaatcatggtggcgttaagtttggaatcggtgttgggttttgatgcttagtgcatctaatgagggataggt

SEQ ID NO: 6237 - DNA, 852 bp, Zea mays
  misc_feature (1)..(3): n is a, c, g, or t
  misc_feature (5)..(7): n is a, c, g, or t
  misc_feature (10)..(10): n is a, c, g, or t
  misc_feature (12)..(23): n is a, c, g, or t
  misc_feature (27)..(28): n is a, c, g, or t
  misc_feature (42)..(44): n is a, c, g, or t
  misc_feature (46)..(47): n is a, c, g, or t
  misc_feature (71)..(77): n is a, c, g, or t
  misc_feature (79)..(79): n is a, c, g, or t
  misc_feature (90)..(96): n is a, c, g, or t
  misc_feature (101)..(101): n is a, c, g, or t
  misc_feature (120)..(120): n is a, c, g, or t
  misc_feature (141)..(141): n is a, c, g, or t
  misc_feature (161)..(162): n is a, c, g, or t
  misc_feature (806)..(852): n is a, c, g, or t
  Probeset Number=SeqID_20640
nnntnnncanannnnnnnnnnnntgtnnaattacattcatannntnnatatttagtattaacttaagaacnnnnnnncnaggactaaatnnnnnnntcctncttaagtcggttcctttanctattattgagccgaagcttncttgcgcatggcttcgacannggttcaaccttagttctaaacctgctttccatattgtatacagcttcgtcccatgtccgaaggttcctgcccatatattatgctttgggaaacattgttagtcatgtttttgaggaccttcggaagacgaaggcccccaacaccaacttcatcttgtgattgttttctctccgtatctaatcagatactaatccttgaccttgtaatatctatgatgggcatagaaataagcttgggactgaattaacagtctcccattatactcattcatcaacaagtttaggttatggccatgtcttgttcatttcatcgggccatgatctatttggctctctacttgtaaccattctgacaggtagagtctctttgtatattgtcatcatggctcaatctatttgtgtcgcgcgagatttcctattggttacgtctggcaatggtgttgtgactaaaactgatggtgccgcgacgagaccgagggcctcctgtggatgcactcactcggttgcgccgctcagcgggcgctggcatcacaggtgccaggcttcgtccgttatggctctgtagcggttggctatctcgtgcccttatgggtctgcccacctgggtttccccagtgctgccggttcggttgtggtctcccgatnnnnnnnnnnnnnnnnnnnnnnnnnnnnnnnnnnnnnnnnnnnnnnn

SEQ ID NO: 6238 - DNA, 656 bp, Zea mays
  misc_feature (1)..(18): n is a, c, g, or t
  misc_feature (619)..(656): n is a, c, g, or t
  Peptide Sequence Number=SeqID_11243
  Probeset Number=SeqID_20641
nnnnnnnnnnnnnnnnnnaattaatttaattagtctgtaattcaattttgcgcatccattttattgtgtgtaatggaaataaaacaaaaataaagctaaatggatggaaaaagaaaatctgttaacactataactttagaggaccgaatttagagaacgttgctggagactgagaagatatagaggacagaatcttttagagtgtgatgtaaaagacagagaatattcctttaggggatagaatttagaggacgctgctggagacagccttaggctagacccgagctgcagccccttagctcgggccaaaaactaccgtttctatgagctgcctcggcgagcgcctgtgccaccttcagagacgctggcctcagccgcgtcgggctctaaagtccggaatctgaccggtcaccctattaggctggctccaaactctaaagggtcctctactctaaatatagaggatcaaatggttctctacgcactccagcagcgtcctctaaacggtcctctaaatttagagaacgctgctggattctctatatatagagtttctctaaacgttcctctatctatattaatactttaaataaccggtttagcaaaactaaaatatgtnnnnnnnnnnnnnnnnnnnnnnnnnnnnnnnnnnnnnn

SEQ ID NO: 6239 - DNA, 456 bp, Zea mays
  Probeset Number=SeqID_20642
tcgatcgtccgcccgggcaggtacgcggggatgtgaggaaaaagaagttatcagatatgcttggttcttccagtggcagtgttttgagttcaggaacagctccaatcacaacatcaggagcagccacatctgctcgcggggttgcagatagcatgtcaatgaagagatctgctgcaagcatgcttagtggaaagaagcctgtccaggcagcggctgctaccaagaaattctggaccgtccaaatccactgcagcaaaaaagacagatggtgggtcacagtctaaggcatcagctgctcttgagattgaagacgttgagccggcagaaatgagtttggaggaaatagaagagaggttaaagtctgttgtgaaagctgagacaatttcccagctaaagagctctgtctggaaagagcgtcttgaagctattggagttcctcggccgcgccctcgctag

SEQ ID NO: 6240 - DNA, 521 bp, Zea mays
  Peptide Sequence Number=SeqID_11244
  Probeset Number=SeqID_20643
ggagaaaatctgccccatactatcaaggtcttcataagttatagagattactcattaaacaagtcaatgaatgtttcaaagttcagactttgcatgaggtccatattgaagtagagagtgagactacaatactaagacaagtaaattgaaaagtaaattgaagagtgacaggtgtgaatgaatccaaacacctcttgatgggtggattagattttcataagattgccttttttactttaaatgatgaaaacttcgcgaaccaattaatggcaaccaacggtcaaaccgaccagttcttcagcatactagtcgataccgaccagtattgtactggcactgcagcaccatgctactgcacaccgaggtcgaaaccaaacctaggcgcggcgaggaccggaacgcctgccttaaggtttggaccaagagcgaacgaggagttggtgggcatctcttaactttggatctgaccaacgagatgaggcaaagcagccaatcgacaacagctaaattgacgtcttacc

SEQ ID NO: 6241 - DNA, 521 bp, Zea mays
  Probeset Number=SeqID_20644
ggtaagacgtcaatttagctgttgtcgattggctgctttgcctcatctcgttggtcagatccaaagttaagagatgcccaccaactcctcgttcgctcttggtccaaaccttaaggcaggcgttccggtcctcgccgcgcctaggtttggtttcgacctcggtgtgcagtagcatggtgctgcagtgccagtacaatactggtcggtatcgactagtatgctgaagaactggtcggtttgaccgttggttgccattaattggttcgcgaagttttcatcatttaaagtaaaaaaggcaatcttatgaaaatctaatccacccatcaagaggtgtttggattcattcacacctgtcactcttcaatttacttttcaatttacttgtcttagtattgtagtctcactctctacttcaatatggacctcatgcaaagtctgaactttgaaacattcattgacttgtttaatgagtaatctctataacttatgaagaccttgatagtatggggcagattttctcc

SEQ ID NO: 6242 - DNA, 513 bp, Zea mays
  Peptide Sequence Number=SeqID_11245
  Probeset Number=SeqID_20645
tgtttttccggcggccggccggacgggcccagcgtgcctcgattctgtgagtaacatcaagagccttaggtgagtcgaagtacggccttgggaaaagcacctgggttgaaaacctacatgctatgtagcttcggactgcttgagtataggcggactactcaagcaaaagtaggtggtctgcaagactagactattgactaacatttggcagatgaacgtatcttaaagttagccgagcataccctgacttgtgtgccattcactcaatcgtttcacgtaatctcgttcgataccgtggatctgtgcatcgcgagtacagcgatggcttcactgtatcactctgagtctgacctggctcgtccatgcagctcctgtggataggtctggtcatgacatggcgaaggtcagcagctggatatgaagccattctggcccttgtcgcacacacggcaggactacttgagctcctcctcagaggcggtgtacttcatcttgcgtgcccccgcgtaatat

SEQ ID NO: 6243 - DNA, 513 bp, Zea mays
  Probeset Number=SeqID_20646
atattacgcgggggcacgcaagatgaagtacaccgcctctgaggaggagctcaagtagtcctgccgtgtgtgcgacaagggccagaatggcttcatatccagctgctgaccttcgccatgtcatgaccagacctatccacaggagctgcatggacgagccaggtcagactcagagtgatacagtgaagccatcgctgtactcgcgatgcacagatccacggtatcgaacgagattacgtgaaacgattgagtgaatggcacacaagtcagggtatgctcggctaactttaagatacgttcatctgccaaatgttagtcaatagtctagtcttgcagaccacctacttttgcttgagtagtccgcctatactcaagcagtccgaagctacatagcatgtaggttttcaacccaggtgcttttcccaaggccgtacttcgactcacctaaggctcttgatgttactcacagaatcgaggcacgctgggcccgtccggccggccgccggaaaaaca

SEQ ID NO: 6244 - DNA, 1076 bp, Zea mays
  misc_feature (1)..(1): n is a, c, g, or t
  misc_feature (935)..(935): n is a, c, g, or t
  misc_feature (946)..(946): n is a, c, g, or t
  misc_feature (964)..(964): n is a, c, g, or t
  misc_feature (966)..(967): n is a, c, g, or t
  misc_feature (969)..(969): n is a, c, g, or t
  misc_feature (971)..(971): n is a, c, g, or t
  misc_feature (990)..(1076): n is a, c, g, or t
  Peptide Sequence Number=SeqID_11246
  Probeset Number=SeqID_20647
natagcttgaccccacgagctcagctggtcaggaagttctgatcaagtcaaaagatagtgatgttcttgtcaaactgaagcagcagacaacaaaatgcaagcttgtttacactctaccctctggcatcggggatgcttctaattcctcgttgaaagacattaagaagtttgctgaatatgtagctgtggacagcaaatctgtttttactctaagctctgacttcatcataagacagaacagtcttgtgcaagatctgcagtcagcggggctagctttgtatgcagaggtgttccagaatgagtttgtagcacaaccattggatttcttcggagatgaaactgtggagatcaattactatattcaatcatttaatttatcaggcatcataactgatttcccgaagacagtcagaagatataaaagaaacacctgtacagttctgggaaaggatatgcccagctacatgcagcctcctcaggctggttcccttgcacagtttctacaaaccttcaaaacccagcctccatctctgccaccaatgtcgacgctgaattcttcaagcgtggaggagccacctcttcctactgttgcgttaaggagtgtatctgatggtagtgcctcgggggcgaccaagactcctggcacaccttctgatgctccaacggctacagtaaatgctggcatgctacttgtgatggttttcacagctttgctaatctgagaagccacatgagattgtatagtagacgactgaagctaatctgatctcccttggattaggtaagctttgactagtgatctggtactacccacacttggtttctttttccacctttcaaatttgcagtagaaaatgttaagatttccatttaagggtttgggggttaccccggtgtaattacccgcttacccctgtgtaatagggcaaaccganctaacttagtntattatacaacactgtantnnananatgggtaaatgttcttatnnnnnnnnnnnnnnnnnnnnnnnnnnnnnnnnnnnnnnnnnnnnnnnnnnnnnnnnnnnnnnnnnnnnnnnnnnnnnnnnnnnnnnn

SEQ ID NO: 6245 - DNA, 522 bp, Zea mays
  misc_feature (472)..(472): n is a, c, g, or t
  misc_feature (504)..(522): n is a, c, g, or t
  Peptide Sequence Number=SeqID_11247
  Probeset Number=SeqID_20648
atatccactattctctaggaagcaagggaatcacatcgccatggcagccaagatgtttgcattgtttgcgctcctagctctttgtgcaaccgccactagtgctacccatatcccagggcacttgtcaccactactgatgccattggctaccatgaacccatggatgcagtactgcatgaagcaacagggggttgccaacttgctagcgtggccgaccctgatgctgcagcaactgttggcctcaccgcttcagccgtgccagatgccaatgatgattgccaggtatgatgccaccgatgacaatggatgccgatgccgaatatgattgccatccgatggatggtgcccgactatgatgtcaccaattaatgatggatggccgagtatgatggcccttcgacgatgaccgcccgagtatgatgccaccggataatgattgccaagtatgttacccaccggatgatgatgcccnaagcatggtgtcatccaatgataatgccaaannnnnnnnnnnnnnnnnnn

SEQ ID NO: 6246 - DNA, 1213 bp, Zea mays
  misc_feature (580)..(580): n is a, c, g, or t
  misc_feature (671)..(679): n is a, c, g, or t
  misc_feature (682)..(684): n is a, c, g, or t
  misc_feature (690)..(692): n is a, c, g, or t
  misc_feature (699)..(705): n is a, c, g, or t
  misc_feature (714)..(714): n is a, c, g, or t
  misc_feature (779)..(779): n is a, c, g, or t
  misc_feature (1213)..(1213): n is a, c, g, or t
  Peptide Sequence Number=SeqID_11248
  Probeset Number=SeqID_20649
agactcgcaccacccaaaccgagctcgaggacaccaccacgaacaagaaagaaccgcacggtccccgttgcgtggttccgccgcgtcgcgtgtgcatttgcgcggccgcccaatccgatccggcgaagatcggccgcccgtccgacccggcgaagatcggccgctgctccgggagcacccccaccccaccaggtggtaggtaatcgttgctggttccagaagcgtccctgcagccggcgctagctgcacggcggtgacctttctcagcgaaacttgtgtcctcatggctcagtctcaacagatggcgagcaagaaacctcctggccttaggctattcggaggtgccggttcgctgagaacctaccagacgctagtcctggtcctcacattcttcgcatacgcatgcttccacatgactcggaagatcacgagcatcgtcaagagcgcgctggacccccagacgaagatggggttctcccactggggacggctgcacctgcacacgagcgaggctccggctcttaacactggctggctgccgttcaacaccgctgacggctcagcgttgctcggcgagatngacgtcgcgttcctcgctgcgtattccatcgggatgttcttcgccggacacatcggggaccgcatagatctaaggatctttctgacgatcnnnnnnnnncgnnnctgccnnnttcacgnnnnnnntcggcgctngcgacctgctgaacgtgagcttctcctcctccatggacgaaccgtagatcgcttctagctgcgcnccggctgtggtctcctggtgacatggaatggtggcgggagagtagatcacctgtgattttaggcctggtgggactgtggcagcaggtgcgcagtgcgcttctgtcccggaactgtgggatcttgctcctgccgtgccgtgcttcaccgcttctggttcgtcatggtatatactagtaaattgctcgcgccccggcgcgagtctttgatagatgtgtttgtacagttaaaatagcattgctttacacatataggaccatcaatatatatggatatatacacataagagtggcagaattatctgtacagaaatttgtttgtagtagtagaataattcggtctgcaaatgtaacaacaatagtctattgcgcgtcctcgcgtcctcgtgcctgggcgaatcacatggtaaacacgtgtataaaaatcgacagcaacn

SEQ ID NO: 6247 - DNA, 247 bp, Zea mays
  Peptide Sequence Number=SeqID_11249
  Probeset Number=SeqID_20650
gaaatatactagtctcttcagttactctagatatcttccagctttgctcctgcgttcaggaaaagattggccaatgcctagttgccaatattcaccatggctacctcattatacctcggaccctgcggtctcagcttctcaatcaggctgcgcatctcagagaggtcatcatctgttagatcaacatcgcgtgaagcccagttctcctcaaggcgcgagggctttgtcgtgcccgggcggccgctcg

SEQ ID NO: 6248 - DNA, 247 bp, Zea mays
  Peptide Sequence Number=SeqID_11250
  Probeset Number=SeqID_20651
cgagcggccgcccgggcacgacaaagccctcgcgccttgaggagaactgggcttcacgcgatgttgatctaacagatgatgacctctctgagatgcgcagcctgattgagaagctgagaccgcagggtccgaggtataatgaggtagccatggtgaatattggcaactaggcattggccaatcttttcctgaacgcaggagcaaagctggaagatatctagagtaactgaagagactagtatatttc

SEQ ID NO: 6249 - DNA, 251 bp, Zea mays
  Peptide Sequence Number=SeqID_11251
  Probeset Number=SeqID_20652
aggagtagccgctatcgcctccgcacttctcggtgagatgctcacaagcctgcttcagcacccattgaagcatgcggccccagctcctcagcctgtccatgggcaggatctcgagcgcgatcctccttcacacccgcttggcctcgtccctcaccagatcagaggctacgtatcgacattcaacaacattgtgattcgcgggcaatcctatgatagctgcagggcgtgcagtcccaagatcctggacgcgt

SEQ ID NO: 6250 - DNA, 251 bp, Zea mays
  Peptide Sequence Number=SeqID_11264
  Probeset Number=SeqID_20653
acgcgtccaggatcttgggactgcacgccctgcagctatcataggattgcccgcgaatcacaatgttgttgaatgtcgatacgtagcctctgatctggtgagggacgaggccaagcgggtgtgaaggaggatcgcgctcgagatcctgcccatggacaggctgaggagctggggccgcatgcttcaatgggtgctgaagcaggcttgtgagcatctcaccgagaagtgcggaggcgatagcggctactcct

SEQ ID NO: 6251 - DNA, 237 bp, Zea mays
  Peptide Sequence Number=SeqID_11265
  Probeset Number=SeqID_20654
actacacccccagtaattttgcactcgtgctcatttctgatttctgatcctgggtgagtctgcctattatacttccgcaattgttcgtgcttataccctggatgcacgtattttttttcacgggcttgttgaacatgatgctcgaagagtgcactaaacatgccatgcacgtattttttttcacgggcttgttgaacatgaatgctcgaagagtgcactaaacatgccgcttcatgt

SEQ ID NO: 6252 - DNA, 237 bp, Zea mays
  Probeset Number=SeqID_20655
acatgaagcggcatgtttagtgcactcttcgagcattcatgttcaacaagcccgtgaaaaaaaatacgtgcatggcatgtttagtgcactcttcgagcatcatgttcaacaagcccgtgaaaaaaaatacgtgcatccagggtataagcacgaacaattgcggaagtataataggcagactcacccaggatcagaaatcagaaatgagcacgagtgcaaaattactgggggtgtagt

SEQ ID NO: 6253 - DNA, 217 bp, Zea mays
  Peptide Sequence Number=SeqID_11266
  Probeset Number=SeqID_20656
gcatcacccgcgatgcaggtgcatgctggtgcgcatttctcgtaagcaccaactagcgtttggagacccctcatccctgcttcggcttttccttctccccgggcgaagcttctttctccgaagggtcttccgtttcattctcctcttcctcgacgccttcttctaggtccatctgaagctcctcggcctccgtgatgtgtgcccgggcggccgctcg

SEQ ID NO: 6254 - DNA, 217 bp, Zea mays
  Probeset Number=SeqID_20657
cgagcggccgcccgggcacacatcacggaggccgaggagcttcagatggacctagaagaaggcgtcgaggaagaggagaatgaaacggaagacccttcggagaaagaagcttcgcccggggagaaggaaaagccgaagcagggatgaggggtctccaaacgctagttggtgcttacgagaaatgcgcaccagcatgcacctgcatcgcgggtgatgc

SEQ ID NO: 6255 - DNA, 302 bp, Zea mays
  Peptide Sequence Number=SeqID_11267
  Probeset Number=SeqID_20658
gcgtggtcgcggcgagactttaaacgaatacagtagcttctgccagtggtagtaaaatatagtgtcagtttaaattaatatatgtcataacataccaaattacaaagaaattaaggtaacttgttgtcgcactatctagtcagattttttgttctttagcttaattggcatgttatacttacaaactgtaacaaatacaactcgtccatagcatatatatgaatatataactaaaacctcaacttcaaaattttctattggcaatatgaaaaaggcattatctgcagttgggtcacccagta

SEQ ID NO: 6256 - DNA, 842 bp, Zea mays
  misc_feature (1)..(203): n is a, c, g, or t
  misc_feature (366)..(366): n is a, c, g, or t
  misc_feature (804)..(842): n is a, c, g, or t
  Probeset Number=SeqID_20659
nnnnnnnnnnnnnnnnnnnnnnnnnnnnnnnnnnnnnnnnnnnnnnnnnnnnnnnnnnnnnnnnnnnnnnnnnnnnnnnnnnnnnnnnnnnnnnnnnnnnnnnnnnnnnnnnnnnnnnnnnnnnnnnnnnnnnnnnnnnnnnnnnnnnnnnnnnnnnnnnnnnnnnnnnnnnnnnnnnnnnnnnnnnnnnnnnnnnnnnnnnnttatttaaatattaaatggttttacagtcgggataccccttccatccctagaaataccaaagtcatttgagaatttatttcagtgttattccgatatgcagagtggaggaatagcatagtccccagcccccagagtaggaaagcaaaacatttatgagcttgnctcgcttggtttcctccttcttccgctgcagcagtagaagtgaggcagcttcactcggccgcagcacctgcagcgaataatgaccggcacagacttcaaggctttgggtccattcctcaaacccttcttgtacttggagacttcttcttagggacggccatgagctccatggctggcccggcggcggcgccgaggccggggaccacgagcgactgcgcctcggtgagagggccggggggaggaggcggtatgaggggaagtccggaaggcaggcggggcagcgacgccgccgccgccaccgcggggagctccagccatcccgccgccgccatggatccccttcgtggttccgggttaggagctctgggagtggcgtgggaatgttgttgatctggccgtagagtttttatcgggcgggttggattagatggagcgggnnnnnnnnnnnnnnnnnnnnnnnnnnnnnnnnnnnnnnn

SEQ ID NO: 6257 - DNA, 484 bp, Zea mays
  misc_feature (227)..(227): n is a, c, g, or t
  Peptide Sequence Number=SeqID_11268
  Probeset Number=SeqID_20660
ttatctaatgtggattgtctgcaaaaaagtactatactttaatcagtcgtttgtcttttcattattccaatctttattttaatagttttcatttccagtttttttcagttctaattacaagatgatcatgatgcatatgttcctctgttttttacatactacaacgatgtctgtccaattatcaagaagtgctcaactcggaggtatggcatgcgtgcgccggcccnacccgctcatctgcatttgttgtaccgaaatgttgcccaagaagtaaatggtatttggttttataaccaacattactgtgaagctgtcgcaagcttttttggaagctggctaaatcttcttgggacatatccaagtttgctatggtagcattagctgacatggactctgaggagattcaagtttacattgactactttgacattactttggttccagcaaccattttcttcttcaatgcccatcacatgaagatgga

SEQ ID NO: 6258 - DNA, 434 bp, Zea mays
  misc_feature (126)..(126): n is a, c, g, or t
  misc_feature (140)..(140): n is a, c, g, or t
  misc_feature (167)..(167): n is a, c, g, or t
  misc_feature (182)..(182): n is a, c, g, or t
  misc_feature (240)..(240): n is a, c, g, or t
  misc_feature (251)..(251): n is a, c, g, or t
  misc_feature (265)..(269): n is a, c, g, or t
  misc_feature (271)..(271): n is a, c, g, or t
  misc_feature (273)..(273): n is a, c, g, or t
  misc_feature (277)..(277): n is a, c, g, or t
  misc_feature (284)..(289): n is a, c, g, or t
  misc_feature (302)..(303): n is a, c, g, or t
  misc_feature (306)..(307): n is a, c, g, or t
  misc_feature (309)..(310): n is a, c, g, or t
  misc_feature (315)..(315): n is a, c, g, or t
  misc_feature (333)..(333): n is a, c, g, or t
  misc_feature (335)..(335): n is a, c, g, or t
  misc_feature (338)..(417): n is a, c, g, or t
  misc_feature (419)..(434): n is a, c, g, or t
  Peptide Sequence Number=SeqID_11269
  Probeset Number=SeqID_20661
agaagctactcccgaagagtcgctctcctgcgtccacgcctcgcttgcggcgactagggcgactgccgccgccgcccttcgcccagctgccaggtcttcgtcgggcgctttaccggtgaagagcgnccaccataccaggncccgcacctttaacaagttccagtcgngggggcgaggcctantcttcttccggcgccggcgcggcgcgaaaatcttctgggatcgcgtcgccgaatttcnagttcgaccgngaaaccctggaaannnnnangncccnccccccnnnnnncccggcccccccnnttnnannttccnggaaaaaagggggccccncnaannnnnnnnnnnnnnnnnnnnnnnnnnnnnnnnnnnnnnnnnnnnnnnnnnnnnnnnnnnnnnnnnnnnnnnnnnnnnnnnannnnnnnnnnnnnnnn

SEQ ID NO: 6259 - DNA, 341 bp, Zea mays
  Probeset Number=SeqID_20662
aagcatgcaatcggcaagacacatgtggagtgtttgtgacaagaatgacaaacagtgcagtgtccaaagatttacaaagagctcaatcaatcatgcatgattaattgacgtataaaggttcacaagttattatcctctactgggtgggagatctatataaccaattatgaaagttatgaaatgttaagttccaagcaaaatagcaagatctaagagaaactattcatctagccgaagtctgtgcatacaagtagatatgatagcaactgttttggagatcgccaggtgcagtgtccggtgtggtgccctagctacggctctgcttcgccgcgaccacgcta

SEQ ID NO: 6260 - DNA, 341 bp, Zea mays
  Peptide Sequence Number=SeqID_11270
  Probeset Number=SeqID_20663
tagcgtggtcgcggcgaagcagagccgtagctagggcaccacaccggacactgcacctggcgatctccaaaacagttgctatcatatctacttgtatgcacagacttcggctagatgaatagtttctcttagatcttgctattttgcttggaacttaacatttcataactttcataattggttatatagatctcccacccagtagaggataataacttgtgaacctttatacgtcaattaatcatgcatgattgattgagctctttgtaaatctttggacactgcactgtttgtcattcttgtcacaaacactccacatgtgtcttgccgattgcatgctt

SEQ ID NO: 6261 - DNA, 808 bp, Zea mays
  misc_feature (1)..(1): n is a, c, g, or t
  misc_feature (782)..(808): n is a, c, g, or t
  Probeset Number=SeqID_20664
ngtcagtccatccaccaaaccagcactcgcttcgctccaccaccagctcgaaacccatggaagcggaggcgttcccgatacggttcacgcggggcgtgcgcgcctactggcggcgccaaaagtaccaccgcctggcgggcgccgacggcaagcagccccgctcgcggcagctgggctccggcggcggcggcggcgcgcgcgtgcggcggcgggtgcgcgtgctcctggcgggcccgcggcgcgcgctggcgcgggcgcgggacgcgtacgtgggcggcatgctggcgctgggcaggcgcgcgtcggcgctcgcgctgccgggcgccgtcgaggcgctctgggccaagcggctgccgcgccacaagcagcagcagctgctgctcccggcgcccggcaagcccacggagttcgagcagcgcctcatcttggagatctacaagtccatcgtcgcgtccaaggagctcaccaccatgctccactcctccgccgcgcacctgccgcccgccgcctcggcgccgggcctcccgtccacgcacctcctcgacatgtgatgagccgcgccgctggaggaaaaaggagagaacgcgcgcgccgccggttgtcaattgtaatgtaacgagagaggtttagaggacaatcccaagctgtcaaatactagcgtcgtccgcgtttgtaatgatgcacgcatgcacacccacgtactgggcagtgagcatccatgcaggcggccgcaaaagttgcatgcagcagcctgtaaatttccaagaaaaatctagcgcccnnnnnnnnnnnnnnnnnnnnnnnnnnn

SEQ ID NO: 6262 - DNA, 247 bp, Zea mays
  Peptide Sequence Number=SeqID_11271
  Probeset Number=SeqID_20665
acagcttcgtccaatgcaattccctgcatcctattcctgctagcctagctactacctcccatgcagcatggtgacggtgagatcgcaggcggagtaggactcatcgaccttgtcgggcacccccccgtccttgtccgacgacgacgtgcactgcagcgtgaacgtgggcggcttgggcatcggcagcacggagctgtcgctgccgagcgccatgacgacgtaggggatgtccgggcgcccgctcgaa

SEQ ID NO: 6263 - DNA, 247 bp, Zea mays
  Peptide Sequence Number=SeqID_11272
  Probeset Number=SeqID_20666
ttcgagcgggcgcccggacatcccctacgtcgtcatggcgctcggcagcgacagctccgtgctgccgatgcccaagccgcccacgttcacgctgcagtgcacgtcgtcgtcggacaaggacgggggggtgcccgacaaggtcgatgagtcctactccgcctgcgatctcaccgtcaccatgctgcatgggaggtagtagctaggctagcaggaataggatgcagggaattgcattggacgaagctgt

SEQ ID NO: 6264 - DNA, 1001 bp, Zea mays
  misc_feature (984)..(1001): n is a, c, g, or t
  Peptide Sequence Number=SeqID_11273
  Probeset Number=SeqID_20667
cggcgtggtcgcggccgaggtaccccatttagatcacaaacggaaatcaagaagggttatctaaagatcgattggcaatcagataacactgattaaaccaaagagatacagaaacctaatgattacaccgtccctggatttaatagggatcacattgaacggcataaagagcacagggatctatactactgtatctcctgggttaaccagggtaccgatcatagatgttcagtctcttagatagcctcaatagaaatactacactgacctttggataacccagacgtcttttacgcctgcgctacacaaatccatttgaaaacgtaaccaatgttatcaaacggtgttgagttttagcgtgctcaacagttagtggagttatggattttcaaacactggtttgtcacgccaaatgtcatgaaatggcatgttggggtgctaacccagaatgcacttccatacaaacaatgacccccacacaacactgtgtggtcattcactctatcagtacctcggcggtacttgacaatgacaaccctttcgatagattaggtcgtcactgccaagtcgcggccttccaaggtccgcagccattcgactgttcgacgtctggatgagagaccataggtcacgataggaaatcctactgatgctgacattcatcagggaagggcctatcagacctacagaaactttccagcgtcaggtcgaactcgcccagtcgaggaatatcttgtactccccggggttggctctcactgatatgaggaaagttgctgtaaagtgattaactttacggacaactcacgcacgttgccgattcgatatccccctataaacccgggggcccggatcggtgcgtacctgggccgcctccccgccactcctatactctttcgagtagaggaataaatgatcagagacgcaggaagaggtatcagccccttccgagtagcgtattactacgctactcccccccgcgtnnnnnnnnnnnnnnnnnn

SEQ ID NO: 6265 - DNA, 1001 bp, Zea mays
  misc_feature (1)..(18): n is a, c, g, or t
  Probeset Number=SeqID_20668
nnnnnnnnnnnnnnnnnnacgcgggggggagtagcgtagtaatacgctactcggaaggggctgatacctcttcctgcgtctctgatcatttattcctctactcgaaagagtataggagtggcggggaggcggcccaggtacgcaccgatccgggcccccgggtttatagggggatatcgaatcggcaacgtgcgtgagttgtccgtaaagttaatcactttacagcaactttcctcatatcagtgagagccaaccccggggagtacaagatattcctcgactgggcgagttcgacctgacgctggaaagtttctgtaggtctgataggcccttccctgatgaatgtcagcatcagtaggatttcctatcgtgacctatggtctctcatccagacgtcgaacagtcgaatggctgcggaccttggaaggccgcgacttggcagtgacgacctaatctatcgaaagggttgtcattgtcaagtaccgccgaggtactgatagagtgaatgaccacacagtgttgtgtgggggtcattgtttgtatggaagtgcattctgggttagcaccccaacatgccatttcatgacatttggcgtgacaaaccagtgtttgaaaatccataactccactaactgttgagcacgctaaaactcaacaccgtttgataacattggttacgttttcaaatggatttgtgtagcgcaggcgtaaaagacgtctgggttatccaaaggtcagtgtagtatttctattgaggctatctaagagactgaacatctatgatcggtaccctggttaacccaggagatacagtagtatagatccctgtgctctttatgccgttcaatgtgatccctattaaatccagggacggtgtaatcattaggtttctgtatctctttggtttaatcagtgttatctgattgccaatcgatctttagataacccttcttgatttccgtttgtgatctaaatggggtacctcggccgcgaccacgccg

SEQ ID NO: 6266 - DNA, 686 bp, Zea mays
  misc_feature (452)..(452): n is a, c, g, or t
  misc_feature (529)..(530): n is a, c, g, or t
  misc_feature (532)..(532): n is a, c, g, or t
  misc_feature (537)..(538): n is a, c, g, or t
  misc_feature (551)..(552): n is a, c, g, or t
  misc_feature (555)..(556): n is a, c, g, or t
  misc_feature (561)..(562): n is a, c, g, or t
  misc_feature (575)..(576): n is a, c, g, or t
  misc_feature (578)..(592): n is a, c, g, or t
  misc_feature (594)..(594): n is a, c, g, or t
  misc_feature (602)..(608): n is a, c, g, or t
  misc_feature (610)..(610): n is a, c, g, or t
  misc_feature (617)..(617): n is a, c, g, or t
  misc_feature (619)..(621): n is a, c, g, or t
  misc_feature (625)..(649): n is a, c, g, or t
  misc_feature (651)..(654): n is a, c, g, or t
  misc_feature (660)..(673): n is a, c, g, or t
  misc_feature (676)..(684): n is a, c, g, or t
  misc_feature (686)..(686): n is a, c, g, or t
  Peptide Sequence Number=SeqID_11274
  Probeset Number=SeqID_20669
ctctggcatcggctgcaccgattccgtcataaagatcacgagcgctccttactcggctcgtttcgccgtgggcaatttttccacgcttcaaatccatgctgcttgtcccgtgtgcgctcgctcttcgtccatcgggtttcgggcgtgctcgcgtttggctgctctagaaggaacccgtcatccccttatgaaccacacctcgccagctcgctccagacacgatctcgttgtcgttccgtgcgtcgtcaagaaattccaagcgtcgggtgaagacgaagctagccgcgtggtgttcaccaagtgcacgacaaaaagctcgaacatcctgcgcgactcaagttcgattcgtcaaaattatttagtcgaggagaagatcttcatcaattgattatcgaagaaaagaaggcccctggatgacgtcaaccggataccgtcatcgtgcttccgactancgcgtcaaagtagtcagggtacattaattaatcgtgtaatgcggaagacgagccaagtcgaccccaagcgcgggctnntncgcannatgaagctgatgnnctnntctgnngatggatagacgnnannnnnnnnnnnnnnngnatgatcgnnnnnnnangtcgtcnannncacnnnnnnnnnnnnnnnnnnnnnnnnncnnnnatgcannnnnnnnnnnnnnttnnnnnnnnntn

SEQ ID NO: 6267 - DNA, 673 bp, Zea mays
  misc_feature (673)..(673): n is a, c, g, or t
  Probeset Number=SeqID_20670
agcagatcgactactcagctcaaggttgaaggcatggctgcatccaagttatacgtcgcgagctgcgccctcctcctaatcggtaaaattcgccattccgcctgccttcgtgcatatatatatatatatatatatatatatatatatatatatatgatcgaattactcatagagatagatcagctaatgagcggagaaagcacgctgtgtgtgaccgcaggcgtggtgctgctggggcagcagggtatagatggcgccgtcgctgcctgcccccagttctgcctcgacgtggactacgtgacctgcccgtcctccggctccgagaaactcccggcgagctgcaactgctgcatgacgcccaaaggctgcacgctccatctctccgatggcacgcagcagacctgcagctagctctgaaccaaagtgtgcgtgattcgatctgcgaataaagctttggcgcgtgtatatggctatccgaataaatgtgtgatcgtctatatagaaaagtgaaaaactagtcctttcccttttttttacagattgttgtgcagtgcatatttacctcctttagaatccggcctctatagcacagcccagagtttaccggagctcccaaaggcatttctttttctttatatacaaagcgcgcttcaaagcaaaaaaaaaaaaaaan

SEQ ID NO: 6268 - DNA, 555 bp, Zea mays
  misc_feature (95)..(95): n is a, c, g, or t
  misc_feature (116)..(116): n is a, c, g, or t
  misc_feature (130)..(130): n is a, c, g, or t
  misc_feature (147)..(147): n is a, c, g, or t
  misc_feature (235)..(235): n is a, c, g, or t
  misc_feature (335)..(335): n is a, c, g, or t
  misc_feature (337)..(337): n is a, c, g, or t
  misc_feature (339)..(339): n is a, c, g, or t
  misc_feature (353)..(354): n is a, c, g, or t
  misc_feature (367)..(367): n is a, c, g, or t
  misc_feature (370)..(370): n is a, c, g, or t
  misc_feature (417)..(417): n is a, c, g, or t
  misc_feature (419)..(419): n is a, c, g, or t
  misc_feature (427)..(427): n is a, c, g, or t
  misc_feature (457)..(457): n is a, c, g, or t
  misc_feature (464)..(464): n is a, c, g, or t
  misc_feature (470)..(470): n is a, c, g, or t
  misc_feature (482)..(482): n is a, c, g, or t
  misc_feature (491)..(491): n is a, c, g, or t
  misc_feature (496)..(496): n is a, c, g, or t
  misc_feature (507)..(507): n is a, c, g, or t
  misc_feature (513)..(513): n is a, c, g, or t
  misc_feature (523)..(523): n is a, c, g, or t
  misc_feature (529)..(529): n is a, c, g, or t
  misc_feature (531)..(531): n is a, c, g, or t
  misc_feature (538)..(538): n is a, c, g, or t
  misc_feature (547)..(547): n is a, c, g, or t
  misc_feature (553)..(553): n is a, c, g, or t
  misc_feature (555)..(555): n is a, c, g, or t
  Peptide Sequence Number=SeqID_11275
  Probeset Number=SeqID_20671
cgggagagagagagagagagagagatagagagagctccctagtcccccccccccccctgccgggtgtattactgggagaggttgagccaaagtcnaatgagcaacatgctaagggncgtgagcaatctantgagtccacttcagaanaagagactgaactacatgacgattttcaaacttctgcaactgaacatcaactagaagttaaattagatgggggagggaaagagagtgntgacaaagataaagagaagggaaaggatggagaaaaggaaaaaggaagagccctgggccggtggcaagtctggataacatcttgcagaggctaccgggangngnccggtcgtgatctnnttgatcagttganggntgagttttgctaccctaaattctaaaaggaaatcgaaagaaacttgngnggggcttnttcaatggtaaaaaggacctcccctggganctgtttnccctanctattctccttnggggggaanactanaaaactttgtntgaaanaggttccccngggatngnttttgtnttttgtttnaaaagnan

SEQ ID NO: 6269 - DNA, 497 bp, Zea mays
  Probeset Number=SeqID_20672
gctcaaatataaatgtttaatgtaaagaaaggattaagaatgtcttgatattttgataagatatcaaagagtcgatactctccactagtccttgttgaagcacccgcgaagaagtgtcacacccccttggcctgtgcaaggaccatgtgctttctatgagctagttcttcgtctcttcaacatggtgaaccgctcacaaccgtatacaaacttaagttagatcacccataagctctctagatgatcgttgcactcctgattgctatcgaaccatctagatgacgccaatcatcaagagtaacgagcacaaacttctcacttaaccttatcaaggctaataagaataatgggcccgcactagctactctcaatgtgttaatgaggctgctaatcaagtgattatcaactatcaagtctcactaggcaaagtctcttgctcacactcaaataggtttctttagctgttagaatcccgcgtacctcggccgcgaccacgc

SEQ ID NO: 6270 - DNA, 497 bp, Zea mays
  Peptide Sequence Number=SeqID_11276
  Probeset Number=SeqID_20673
gcgtggtcgcggccgaggtacgcgggattctaacagctaaagaaacctatttgagtgtgagcaagagactttgcctagtgagacttgatagttgataatcacttgattagcagcctcattaacacattgagagtagctagtgcgggcccattattcttattagccttgataaggttaagtgagaagtttgtgctcgttactcttgatgattggcgtcatctagatggttcgatagcaatcaggagtgcaacgatcatctagagagcttatgggtgatctaacttaagtttgtatacggttgtgagcggttcaccatgttgaagagacgaagaactagctcatagaaagcacatggtccttgcacaggccaagggggtgtgacacttcttcgcgggtgcttcaacaaggactagtggagagtatcgactctttgatatcttatcaaaatatcaagacattcttaatcctttctttacattaaacatttatatttgagc

SEQ ID NO: 6271 - DNA, 349 bp, Zea mays
  Probeset Number=SeqID_20674
tagcgtggtcgcggccgaggtccggcggctgatgtatatacactactattttgttgtcgaacctagaccacctggactatatattgctgaagaagaatgtgtgttccaggatgctgatactacgtttaaggggcaataattggagtgctgagtgatgacatagtagactcttatataacatgcgccactggaaaagagatgtgagatatattggattccaaatatggactatgtgacaccgataggtgagttgtatatcatggagcagttccatgactacaaaatgtcatatggtctttccacagtagaataagctcatgagatacatgtacctcggccgcgaccacgc

SEQ ID NO: 6272 - DNA, 349 bp, Zea mays
  Peptide Sequence Number=SeqID_11277
  Probeset Number=SeqID_20675
gcgtggtcgcggccgaggtacatgtatctcatgagcttattctactgtggaaagaccatatgacattttgtagtcatggaactgctccatgatatacaactcacctatcggtgtcacatagtccatatttggaatccaatatatctcacatctcttttccagtggcgcatgttatataagagtctactatgtcatcactcagcactccaattattgccccttaaacgtagtatcagcatcctggaacacacattcttcttcagcaatatatagtccaggtggtctaggttcgacaacaaaatagtagtgtatatacatcagccgccggacctcggccgcgaccacgcta

SEQ ID NO: 6273 - DNA, 826 bp, Zea mays
  Peptide Sequence Number=SeqID_11278
  Probeset Number=SeqID_20676
gtgggttaatgagcctatgaataagtttaattagaaatgatcatatcaaactcatgatatatgcgctgtcttgttgccctgttgaggaggaccgtgattgaaaaacaggggcaacaagttagcaaatacagccaacacttataagaaacagagcactccactcagctccaccactcagttcaccaaagacttaggcatcgagtcctctctcgaccagtttgtaatccatcccttttaaagactcagtgcagggtacacaaatcactcaactggacgtaaggacattctgtccgaaccagtataaaatcattgtgtcttccttgcacaccattcgcaccagacgcgtaaagcacatagattactagcaagtggtttcaaaacatcgacatctggtgcatcaggtaggtgaatatttgcatcccacaacacaaattttaccacatggttgtggatggctgaaaatgtcgtcaactgggtcctgagtgctggcgtgcgctttgggggccttcgattttatcgtcaccgctatgggagttctggcgtgggtcattgcaggaaacgatgacgcctaagaggggaggggtgaattaggacttctaaaaactatctctagactaggctacaaataaattcttaggacaaaacctatataaataactcacctagattgtgcaaacaagattttgtctatgtgttgctatgactatcacaaaaggacttatgcaacctaagttccaatcctatataaactacaccaagaatagtaaagattgcacttaagtagagagagtaatgtggaatattaagagctagcagagaagcaact

SEQ ID NO: 6274 - DNA, 826 bp, Zea mays
  Probeset Number=SeqID_20677
agttgcttctctgctagctcttaatattccacattactctctctacttaagtgcaatctttactattcttggtgtagtttatataggattggaacttaggttgcataagtccttttgtgatagtcatagcaacacatagacaaaatcttgtttgcacaatctaggtgagttatttatataggttttgtcctaagaatttatttgtagcctagtctagagatagtttttagaagtcctaattcacccctcccctcttaggcgtcatcgtttcctgcaatgacccacgccagaactcccatagcggtgacgataaaatcgaaggcccccaaagcgcacgccagcactcaggacccagttgacgacattttcagccatccacaaccatgtggtaaaatttgtgttgtgggatgcaaatattcacctacctgatgcaccagatgtcgatgttttgaaaccacttgctagtaatctatgtgctttacgcgtctggtgcgaatggtgtgcaaggaagacacaatgattttatactggttcggacagaatgtccttacgtccagttgagtgatttgtgtaccctgcactgagtctttaaaagggatggattacaaactggtcgagagaggactcgatgcctaagtctttggtgaactgagtggtggagctgagtggagtgctctgtttcttataagtgttggctgtatttgctaacttgttgcccctgtttttcaatcacggtcctcctcaacagggcaacaagacagcgcatatatcatgagtttgatatgatcatttctaattaaacttattcataggctcattaacccac

SEQ ID NO: 6275 - DNA, 923 bp, Zea mays
  misc_feature (4)..(6): n is a, c, g, or t
  misc_feature (56)..(58): n is a, c, g, or t
  misc_feature (142)..(142): n is a, c, g, or t
  misc_feature (144)..(144): n is a, c, g, or t
  misc_feature (173)..(176): n is a, c, g, or t
  misc_feature (601)..(923): n is a, c, g, or t
  Peptide Sequence Number=SeqID_11279
  Probeset Number=SeqID_20678
aagnnntggtaacaacgcagagtacttttttttttttttttttttttttttttccnnnttccttttttatttataatttaaaatttcaaatcctagtagaaaaataacatatttttattatatatatttttatacttatttngntcctcataatattttctttctcctcctcnnnnccatttaattctaaaatttttcttttccatttcaaagttcccacttcaaattcaattcaaattcaaaaatggagtttaggaattcacatttttaataaatactcaaaatcaattatgaagcaatagatatatatttattttaatttatttatttgtttggtagatgtttgaattatgaaaaacactcatatggtttactttcctttttagaaaaaaatagtattttgaatgggggataagaattaaaagttacttcaaaattaaatattcatgtaaataaatgcttatggtgcatcatttaatgatatgcttaatcattaagttgaataggaaacttttctattacttgttttctaagatatctgaattttactattttatttctttatatattttttcttatacaaattttaggccttacaggnnnnnnnnnnnnnnnnnnnnnnnnnnnnnnnnnnnnnnnnnnnnnnnnnnnnnnnnnnnnnnnnnnnnnnnnnnnnnnnnnnnnnnnnnnnnnnnnnnnnnnnnnnnnnnnnnnnnnnnnnnnnnnnnnnnnnnnnnnnnnnnnnnnnnnnnnnnnnnnnnnnnnnnnnnnnnnnnnnnnnnnnnnnnnnnnnnnnnnnnnnnnnnnnnnnnnnnnnnnnnnnnnnnnnnnnnnnnnnnnnnnnnnnnnnnnnnnnnnnnnnnnnnnnnnnnnnnnnnnnnnnnnnnnnnnnnnnnnnnnnnnnnnnnnnnnnnnnnnnnnnn

SEQ ID NO: 6276 - DNA, 448 bp, Zea mays
  Probeset Number=SeqID_20679
aaatcaacaatacgacagacacagactttggaatacggtgcggtggctggctttgggcgtgcagcaggtgtcggctagccgctttgggcgtgcggcgacacagcggcaccgacgcaccgtggtgggctggtggcactgcggcaggccggcagctgggcgctggcactgcggtctgcggcagctgggtgctggcactgcggtctgcggcagccgggcgccgacaggagcagccgagccctccggtcctccggtcctctgcgtctcctccggttctccctgcggcggtttcagatcagttaggaaatactgattgtgatccgtgacgatgtcaaacagtggaggcaagggatgtcgtccccgtgccaaatccatgccacccgagaagcaactaggtatttctagtttcttgcctgaacctccatcgctgccatcttctgggaaagatagc

SEQ ID NO: 6277 - DNA, 1301 bp, Zea mays
  Peptide Sequence Number=SeqID_11280
  Probeset Number=SeqID_20680
cttatcgaggggtttcatcactaaagaagtcgtaaaccaatatcatggctactacaattcactaattcatcgcacatatacttaaaatcaatcatttacacatatgaattccaaatcacaatattccaaaacacaagtaattaccaaattcatgaattaattcaaactgggattttggagttaataaaatatttgggttgccttcaaccttacgacgaacggcggacggggcttgggcgcgcgtctaggcgaagggttggcacgacagggggcatcgcttcggcaagcagggcacgaacgtggcgagggcaaggggcagggggacggtccggcgagttccacgggcggtccgagcacggcgaagtgatgtatggtccagccggggtgctgcgcagttgcgtcgacggcggtcggtgagcgccatatttacaaaatttagggaccaaaacagaaatcaattatcttctacctccgggtcttggcgtccacggcaaaggagacaacggactagagactgggtcggtttcactgcggcggacagcgttctgggcagggatccatcgaaggggacgcagtgacttgtgttcgtcttcgccggcgacggggaaggagcagggacctccagtcacacggcgagtggcacgatggcgtgaacacacacacgcaaacaagcgagcaatgaagaggagcgtgtgagagcgaggcagggaggcgggatggaatggagagagaggtccggtgtccaatttatagagaatagggagggagaggaaaggtcgagtcttcatggatgttgatggcgttcatggaggagagggagtaatgggggagggagaggaacggacgcattgaagttccaataacgcacggacggcgcggggttcgtcggttggccttcggtccttggcagggtgtcttggcgcggacgtcggggaagctgcaggggcacggtgtcccgggcgtcgcggctgcgcaggcgtggggagctgcgcgcggggtggcacgcggtcctggcggctggagcgggcgggtcgcggggagtctcgatgtcgggtgcgcgcggggtcgatcggtgcggggcggcgagcgtccgctctgggcatggcgctgggcgtcggggcttggtgcttcgggcggccttggcgagttcctggcagctcaagtcgctcggctccgcgggcggggcgctcggtgtaggtggcgcggggcagggcgcggctgctactcgcgtgcaggggcgcagctctgctggcggccgagagagagcaggggagagaagcgatgagagagaatagggaggg

SEQ ID NO: 6278 - DNA, 1301 bp, Zea mays
  Probeset Number=SeqID_20681
ccctccctattctctctcatcgcttctctcccctgctctctctcggccgccagcagagctgcgcccctgcacgcgagtagcagccgcgccctgccccgcgccacctacaccgagcgccccgcccgcggagccgagcgacttgagctgccaggaactcgccaaggccgcccgaagcaccaagccccgacgcccagcgccatgcccagagcggacgctcgccgccccgcaccgatcgaccccgcgcgcacccgacatcgagactccccgcgacccgcccgctccagccgccaggaccgcgtgccaccccgcgcgcagctccccacgcctgcgcagccgcgacgcccgggacaccgtgcccctgcagcttccccgacgtccgcgccaagacaccctgccaaggaccgaaggccaaccgacgaaccccgcgccgtccgtgcgttattggaacttcaatgcgtccgttcctctccctcccccattactccctctcctccatgaacgccatcaacatccatgaagactcgacctttcctctccctccctattctctataaattggacaccggacctctctctccattccatcccgcctccctgcctcgctctcacacgctcctcttcattgctcgcttgtttgcgtgtgtgtgttcacgccatcgtgccactcgccgtgtgactggaggtccctgctccttccccgtcgccggcgaagacgaacacaagtcactgcgtccccttcgatggatccctgcccagaacgctgtccgccgcagtgaaaccgacccagtctctagtccgttgtctcctttgccgtggacgccaagacccggaggtagaagataattgatttctgttttggtccctaaattttgtaaatatggcgctcaccgaccgccgtcgacgcaactgcgcagcaccccggctggaccatacatcacttcgccgtgctcggaccgcccgtggaactcgccggaccgtccccctgccccttgccctcgccacgttcgtgccctgcttgccgaagcgatgccccctgtcgtgccaacccttcgcctagacgcgcgcccaagccccgtccgccgttcgtcgtaaggttgaaggcaacccaaatattttattaactccaaaatcccagtttgaattaattcatgaatttggtaattacttgtgttttggaatattgtgatttggaattcatatgtgtaaatgattgattttaagtatatgtgcgatgaattagtgaattgtagtagccatgatattggtttacgacttctttagtgatgaaacccctcgataag

SEQ ID NO: 6279 - DNA, 472 bp, Zea mays
  Peptide Sequence Number=SeqID_11281
  Probeset Number=SeqID_20682
gccagcggcatcggccgtggcgaacgcatcctgcgtgtgtaagtacgacaatccccccgttttcctttccccctgaacagaatcccaaccggagcgaccatgaaagttttctacgacaaagactgtgatctgagcctcatcaagggcaagaccgtggccatcatcggctatggcagccaaggccacgcccatgcccaaaacctcaacgacagcggcgtgaaggtcgtggtcggcctgcgcaagggcggcgcttcgtgggacaaggtcggcaaggccggcctgacggtcaaggaagtgaacgacgccgtgaaggaagccgacgtcgtcatgatcctgctgcccgacgagcagatcgccgaggtctacaagaacaacgtcgagccccacatcaagcagggcgcctcgctggccttcgcccacggcttcaacgtgcactacaaccaagtcgtgccccgcgccgatctggatgatc

SEQ ID NO: 6280 - DNA, 754 bp, Zea mays
  Peptide Sequence Number=SeqID_11282
  Probeset Number=SeqID_20683
cgcgagcctccaacgagccgagtcgagcccctttttcaagctcgttgttgcagcgaggcgagccgagctggctcgtttcagctcgcgagccaaggtcgagccgagcctctctcgccagctcgtggattggacgagccgagccgagcttattcaggtatcgagccgcaccgtttccagtcctaggtggcaaggcctcttaataaaaataaatcgatttccataacgtctcgtttggattttggatttaaattttattctaataatagtaatttatgcacctatcaattaagctaaatatattactttattaagtaattttaattcctctaaaataaatggatgtaaaataaatcgattttattggcggttcttaattacctactgctctatacatgtaccgtttatgctgaaatttaagtatatagctacaatatcctaataatattttaatttcttcctaatatgtaatcaagaatcaagaaaccgaatcccattaacatttacctggaaatgcatctgactaattgattgcatttaatggatggctaaatcagacatcagcatttgatttgaatccaattgtagacactactagacagcaagacgggcggatattgatacgattaattcctgcttggatgcatacactatccatgtgtttggttgcctgtatttactggtgcttgcatcacgggatgcaataagttgggggtttggttgttgtcaaccaggctctacgcatgcgaggtatgtg

SEQ ID NO: 6281 - DNA, 754 bp, Zea mays
  Probeset Number=SeqID_20684
cacatacctcgcatgcgtagagcctggttgacaacaaccaaacccccaacttattgcatcccgtgatgcaagcaccagtaaatacaggcaaccaaacacatggatagtgtatgcatccaagcaggaattaatcgtatcaatatccgcccgtcttgctgtctagtagtgtctacaattggattcaaatcaaatgctgatgtctgatttagccatccattaaatgcaatcaattagtcagatgcatttccaggtaaatgttaatgggattcggtttcttgattcttgattacatattaggaagaaattaaaatattattaggatattgtagctatatacttaaatttcagcataaacggtacatgtatagagcagtaggtaattaagaaccgccaataaaatcgatttattttacatccatttattttagaggaattaaaattacttaataaagtaatatatttagcttaattgataggtgcataaattactattattagaataaaatttaaatccaaaatccaaacgagacgttatggaaatcgatttatttttattaagaggccttgccacctaggactggaaacggtgcggctcgatacctgaataagctcggctcggctcgtccaatccacgagctggcgagagaggctcggctcgaccttggctcgcgagctgaaacgagccagctcggctcgcctcgctgcaacaacgagcttgaaaaaggggctcgactcggctcgttggaggctcgcg

SEQ ID NO: 6282 - DNA, 459 bp, Zea mays
  misc_feature (433)..(433): n is a, c, g, or t
  Peptide Sequence Number=SeqID_11283
  Probeset Number=SeqID_20685
gttgttgtgtacatcaggctggcacatgatcgagcagacgggagagcagtacacgcgtgcgcttagctgtccagttcagaagtagcatacacgtacgtacgcacgtacatatatagctagaaacaaacgtcgagagacagtacatatgcaggcagacagtttggtgtggatcactactactgtactgacgaacaaaagctatctgaaacgagaacaagcaaagctcccctgcgttcagcatatcaatctatctacctatcaatcaatcaggagttacgtcacatggctgtgtcaagaagcgtccagagtcccagttcagctcgttatatttggcaaaagattcgtgcgtgtactgcatatatgcgcgcgtagtagggacaagaacaaagaaaaggaaccaaccaacctcgccgtcgctcgtacgtcctacaanaaaaaaaaaaaaaaaaaaaaaaaaaa

SEQ ID NO: 6283 - DNA, 510 bp, Zea mays
  misc_feature (38)..(38): n is a, c, g, or t
  misc_feature (148)..(148): n is a, c, g, or t
  Probeset Number=SeqID_20686
ttttttttttttttttagacataataaatctgatttgntacataagcaagcaatatatgagtacatagtgtttacacttgaaccaaacttcaaagtattcaaattattcaattcaacaaaacaaaacaaaacagcaaaggtcttttanagtcttggacagttcgacatgaacttggactgagcaaagaacaaaaacagcaaagaacaaaacaaaacagcaagtcttggtctcttgacagcaacacgtcttggagacttggactgttggctgttgctgttagacagcacagcaccacatggcgtgcagcactgcagcgtgtgcactaggcactggcgggcactggcgggcttgctgcttggagtgcttgctgtcacaatgttacatcatctttgaataccgagtctttgaaaaccgagtacaagtatttgaagcctctatgagtgtcttgcccagtgcaccgtatctatggatttcatcagtcagtactggtaatggtgagaacaaaaatg

SEQ ID NO: 6284 - DNA, 690 bp, Zea mays
  misc_feature (681)..(690): n is a, c, g, or t
  Peptide Sequence Number=SeqID_11284
  Probeset Number=SeqID_20687
atgtgctattgagagttactcccaaatatttaccagaagctgaggaaaacttgattctggtttcttcgcatattgacactgtttcgacaacgtagggctcaataccctcttcattaatatgcaggaaagaaattaacaacaattaacttggcattgactattggtgtgagttcaagagtatctaatgagaagacatttacaatatattttgaaggaaccatacgaataatgtgtgtgacatgcccaccggatcaacggttctggccctctccccctaccgacgacaccaggcgatggcgccccgagtccacgacagcgggttcgtcggagatggccgagttggcgccccgacccataatcccggttgccagtgtgtgtaatatgaagagtaggccatggcgaaatggggacacacacccttaccggttgttaaggcgatggcggggttctcctcagggaggtgcagatccatgggggtgcttactctaatgagcaattcatcgagcaccagtgtggctccacacccgcgtagtccccgagcacaatcctgtaagtgcggtgatgctcccgaccccgtcggtgaatccctattgacggcgtaggcacgcgaccatgatgacgtccaggttttctccgcggcagccagtggtgggtgcttctcggtgtggggtatggacctgnnnnnnnnnn

SEQ ID NO: 6285 - DNA, 690 bp, Zea mays
  misc_feature (1)..(10): n is a, c, g, or t
  Peptide Sequence Number=SeqID_11285
  Probeset Number=SeqID_20688
nnnnnnnnnncaggtccataccccacaccgagaagcacccaccactggctgccgcggagaaaacctggacgtcatcatggtcgcgtgcctacgccgtcaatagggattcaccgacggggtcgggagcatcaccgcacttacaggattgtgctcggggactacgcgggtgtggagccacactggtgctcgatgaattgctcattagagtaagcacccccatggatctgcacctccctgaggagaaccccgccatcgccttaacaaccggtaagggtgtgtgtccccatttcgccatggcctactcttcatattacacacactggcaaccgggattatgggtcggggcgccaactcggccatctccgacgaacccgctgtcgtggactcggggcgccatcgcctggtgtcgtcggtagggggagagggccagaaccgttgatccggtgggcatgtcacacacattattcgtatggttccttcaaaatatattgtaaatgtcttctcattagatactcttgaactcacaccaatagtcaatgccaagttaattgttgttaatttctttcctgcatattaatgaagagggtattgagccctacgttgtcgaaacagtgtcaatatgcgaagaaaccagaatcaagttttcctcagcttctggtaaatatttgggagtaactctcaatagcacat

SEQ ID NO: 6286 - DNA, 506 bp, Zea mays
  Peptide Sequence Number=SeqID_11286
  Probeset Number=SeqID_20689
agcgtggataaccgcgccggtgaaatctccagccagatagccgccgaactcagcggccagtccctggacaacagcggcggcaagctactggccgggaccaccctgcaattgactgtggcccaggtgatcaaccaggccaaggggctggtgttcgcccaggaggcgcggtttaccggtacgcgcctggacaacgcccaaggcacctttgccggccagcgtgcgctggcaattcaactggcagcggggttggacaacacccagggcaagctcagcagcgaaggcaccctgacgctgggcagccaacgtatcgacaacaccggcggcagtatttccagcgccggtacactgggcatcaccagcgccagtgatttgctcaaccagggcggtatcgttgaaaccgcccaaggcctcacgctgactagcacccgccttgacaacagtcagcagggcctgctcaaaagccagggcgccgcgaccctcaacaccgggctgttcgacaacacgct

SEQ ID NO: 6287 - DNA, 599 bp, Zea mays
  Peptide Sequence Number=SeqID_11287
  Probeset Number=SeqID_20690
ctgacggacccgaataaactcgcattcgccggcccattggcgggcgttgccggcaagaacaccggcaccggcacgttcacgccgccgcagttgacggtgccgctggatattcatggcggtgccgataccgcccaattgcgcaccgggatcgaaaactcgatgccggtgaaaatggtgttcggcgataaggccgcggacggcacacagccgtacaccgtcaccgacgcccaaggcttcaagatcggcaccggcagcatcattccgggccagggcaacaagatcaccatcaatgtgccgatgcgcgacgccaccggcgccgtgatcaccggcaagagcttcagttttgacaccaccgttggcggctcgccggccaataacgacagcaccaccttctccttcaacagtggcgccacctccgacggccgcaacgcccagtcgctgctggcgctgcaaaccaaggcaactgtcggtgtgacggacggcaacgggggcgtgagcctggtcagtgccaacagccgcctggtgtcccaagtgggttccaaggctgcccaggccaataccgacagcaccgcgaccggtgcgctgctgacggcgaacaa

SEQ ID NO: 6288 - DNA, 1092 bp, Zea mays
  misc_feature (1)..(208): n is a, c, g, or t
  misc_feature (1092)..(1092): n is a, c, g, or t
  Peptide Sequence Number=SeqID_11288
  Probeset Number=SeqID_20691
nnnnnnnnnnnnnnnnnnnnnnnnnnnnnnnnnnnnnnnnnnnnnnnnnnnnnnnnnnnnnnnnnnnnnnnnnnnnnnnnnnnnnnnnnnnnnnnnnnnnnnnnnnnnnnnnnnnnnnnnnnnnnnnnnnnnnnnnnnnnnnnnnnnnnnnnnnnnnnnnnnnnnnnnnnnnnnnnnnnnnnnnnnnnnnnnnnnnnnnnnnnnnnnnggtctgatcccggaatccgttggccgtctgccgtggtgacggtcgttggacgttttggatgaggctgcgttgatgcagattccttaccgagccgaaaaacgccctgaccaagcaatatgccaagctgttcgagatggaaggtgtggacctcgagttccgtgcggacgcgctcaaatcggtggccaagcgggcactggagcgcaagaccggcgcccgtggtttgcgctcgatcctcgaaggcgtactgctcgacaccatgtacgaaatcccctcgcagtccgaggtgagtaaagtggtgatcgacgaaagcgttatagaaggcaagtccaagccactgtatatctacgaaaacagtgagccggctgccaaggctgcgccagacgcgtaagcgttgcgccgccgagctgtacaaaataaaggggccttgacgggcccctttgtttttactgcgtttaactgatgccattacgcttgttttttttgcaggcagcccccatcttggtttcaagcttactttcatctgtcatagaggcgaaatcatgaagacaaccatcgaattgcctctcctgccgttgcgtgatgtcgtcgtctatccgcacatggttatcccgctgttcgtggggcgcgagaagtctatcgaagccctcgaggccgcgatgacgggcgacaagcagatcctgctgttggcccaaagaaatcctgctgacgatgatccgggcgaagacgccctgtatcgcgttggtaccgttgcaacggtcctgcaactgctcaagctgcctgatggcaccgtcaaggtgctggtggaaggtgagcagcgcggtgcggtcgagcgcttcatggaagtggacggccacctgcgcgccgaagtggcgctgatcgacgan

SEQ ID NO: 6289 - DNA, 631 bp, Zea mays
  misc_feature (601)..(631): n is a, c, g, or t
  Peptide Sequence Number=SeqID_11289
  Probeset Number=SeqID_20692
ggtgcccacgtgcatgggtgtgtcaagggttgtgttttcgctacgggtgccgcgctttgtcggcaccttgtactcaagcttgtgcttgatctttacctggtgcgattcgccgatttggctgaaatccaaggtgatcaccaccttcccggccttgccgtggtcaacaacaccggcggctacttcggaaagggcgtggccaatttggctcgcgaaggcgccgccgttgagttcttcaagaaactcggctgtatcggttgcggtggacatgggtgtatctccgggttggaattgattccgctggccggcagtgctagccaggtttgaagtttgcgctgctggatgtgggctatgcggcgcatgagtcgacgcgctggttcgtgaaggaaacaaggtcactggcgtgcaggctggggatgatattctcgaagcgaatgtggtgattctggctgatggcgttaactcgatgcttggccgctcgctgggaatggttcccgcttccgatccgcatcattacgctgttggtgttaaagaggttattggcctcacaccagaacagatcaacgatcgctttaatattacgggcgaagaaggtgccgcctgnnnnnnnnnnnnnnnnnnnnnnnnnnnnnnn

SEQ ID NO: 6290 - DNA, 989 bp, Zea mays
  misc_feature (1)..(6): n is a, c, g, or t
  misc_feature (904)..(904): n is a, c, g, or t
  misc_feature (980)..(989): n is a, c, g, or t
  Peptide Sequence Number=SeqID_11290
  Probeset Number=SeqID_20693
nnnnnnccgtgtcgtagtcggcgctaccactgaagaaatgctcgccctgggctacaagcccgtgggttcggacttccccgtctttcttgacccgaaaaacggcgacgagtacgccctcgcccgcacggagcgcaagagcggccggggttatggtgggtttgtgtttcacgccagtcccgaagtaaccctagaagaagacctgatccgccgcgacctgaccatcaatgcaatggcagaagatgacgagggcaacctgaccgatccttatcacggtcagcgcgacctggaagcacgcattctgcgccacgtttctcccgcgtttgccgaagatccgctccgagtcctgcgcgttgctcgctttgccgcgcgatacgccagccttggttttcgcgttgcgccagaaaccctcgaactgatgcgcgaactcagcaattcaggcgagctggaagccctgacacctgagcgcagctggaaagaaatttcccgcgccctgatggaagatcagccacaggtatttatccaagtgctacgcgattgcggcgcgttgaaaaccctgatgcctgaaatcgacgcgctgttcggcgtaccacaaccagaagcccatcaccccgagatcgataccggcatccacacgctgagcgtgctggagcaggcggccatccacgcccaaccactgaccgtgcgctgggcctgcctgctgcacgacctgggcaagggcctcacgcctgtggataaattgccgcagcacattgctcatgaacatcgcggcctggcactgatcaaggcggtgaacgagcgcttcaaggtgccaagggagtgccaggaactggcgttactggtggggcgaatatcacacccacggccatcgcgcgctggagctgaggccttcaacttttgctggggntgctgcaaagctttgacgtttatcgtcgcccgccgcgctttgaggaatttgtggtggcgtgcgaggtggacgcccnnnnnnnnnn

SEQ ID NO: 6291 - DNA, 799 bp, Zea mays
  misc_feature (704)..(706): n is a, c, g, or t
  misc_feature (727)..(727): n is a, c, g, or t
  misc_feature (729)..(729): n is a, c, g, or t
  misc_feature (731)..(731): n is a, c, g, or t
  misc_feature (737)..(740): n is a, c, g, or t
  misc_feature (745)..(761): n is a, c, g, or t
  misc_feature (767)..(770): n is a, c, g, or t
  misc_feature (772)..(775): n is a, c, g, or t
  misc_feature (777)..(781): n is a, c, g, or t
  misc_feature (791)..(795): n is a, c, g, or t
  misc_feature (798)..(799): n is a, c, g, or t
  Peptide Sequence Number=SeqID_11291
  Probeset Number=SeqID_20694
gaggcttttcattgttgttcctcctgtaaggatgtttgatcatgccctgtaggcccgcgacacactgtcaactggccgacaatcttcggagttcgcatggatgtagagaaatggcacccaaggttggccaccggtcactggtacagccacctgcctgatgatctacagaatagcttgctgaccagcgcccggttgcggcagctgacggcggggcaatacctgttcaagcgcggcgacccgccgtgtgggttgtacgtggtgctggaaggctccttgcgcatcagcgcggtgaacgagcagggcaaggaggcagtgttgagcctggcggagttgccgtactggttcggcgagatctccctgttcgatgggttgccccgcacccacgacgcctgcgcggtcgggccttgtacgttgttgcaggtgccgcaaccggcgttgctgcagatcctcgaagagactccgcgttactggcgcgacatggccctgttgatgagccagaagctgcgcctgacctttatcaatatcgagcaattgagcctgatgccggcgtcggtgcgggtggcgcaccgcttgttgatgatcgccgaaggctacggcgacatcgagcaggcccgacacgtactgcaattgccccaggaagacctggccgcgatgttgagcctgtcgcgccagaccaccaatgcgttgctcaaggacctgcaagnnnagggcatcgtgcgcctgggcnangncgagannnnaatcnnnnnnnnnnnnnnnnngcgcgnnnngnnnnannnnngagggtggtnnnnngcnn

SEQ ID NO: 6292 - DNA, 1219 bp, Zea mays
  misc_feature (1)..(3): n is a, c, g, or t
  misc_feature (1162)..(1219): n is a, c, g, or t
  Peptide Sequence Number=SeqID_11292
  Probeset Number=SeqID_20695
nnntcgtcggccttggcttcgaagccagggatgcgaatgccccgtgaggcacccggggtcatctcgatcgcacctttgcgggcgagggccttgaggtgttcttcagcggcgttgggcgacttgaatcccagttccagcgcaatttccgctcgggtcggcgggtagccgttgtcatcgaggcagcgcttgataaaagccagaatctcagcttggcgtggcgtcagttttagcatgttgatcgctctgtctttttatacagtgactgggattatatacagtggactgcgcttggcaatcaccgttttcagtcactccgctggacggtcgtttgtcatacgtcctacaggctgaaaacagcgctgcctacagaccttggcgaatgtgattaaatggccatgaaatagctgaccgaccagccgcaaaccgacctgcaggcttgacaagacatagcttgaaacgtatgtttcaaacaagtgtttgtcaggcggagtagccatggcccagtcggaaaccgttgaacgcattctcgatgctgccgagcagttgttcgcggaaaaaggatttgctgaaacctcattgcggctgattaccagcaaggccggggtcaacctggcagcagtgaactaccatttcggctccaagaaggcgctgatccaggccgtgttctcacgtttcctggggcctttctgtatcagtctcgaccgtgagctggaacgtcgccaggccaagcctgaaaacaagccaagcctggaagacctgctggaaatcctcgtcgagcaagccctggtggtccagcctcgcagcggcaacgacctgtcgatcttcatgcgcctgctgggcctggcgtttagccagagccagggtcacctgcgtcgctatcttgaagacatgtacggcaaggtgttccgccgctatatgttgctggtcaacgaagcggcaccgcgtattccgccgatcgaactgttctggcgcgtgcactttttgctcggtgctgctgcgttcagtttgtccgggatcaaagccctgcgtgcctttgccgagaccgactttggcccaaacacctccatcgagcaggtgatgcgcctgatggtgccgtttctcgccgccggcatgcgtgccgaaaccggccccaccgaccaggccatggccgcaacccagtacnnnnnnnnnnnnnnnnnnnnnnnnnnnnnnnnnnnnnnnnnnnnnnnnnnnnnnnnnn

SEQ ID NO: 6293 - DNA, 550 bp, Zea mays
  Peptide Sequence Number=SeqID_11293
  Probeset Number=SeqID_20696
ttactaacgggtggcccctcgtagtcggaggtgcttccctcacacgctctctcttaacgacgagccctaggggtccggggacaaaatccctgaaccctgaccctccatcattgtctactatgcaacggtttggtcggagggtggtgcacaggacataatccaggtgagggcgtgacacaatgagaagattttttaaccaagccagaaattcatcccgagggggattgaacccgagacttggaggtactatttgaaagtcttaaccattatgctagaggccctttcaccctttcaagccttaaatcactataaaaggccaatataaatataatacattaaataagtataaaaaactaaattataagagagtccaaaagctaaataattcatgacagattaggtgaaacgttttaataataaaataatgaaggcttaatttgaatatgcaaggaaaaggatagggaggtgacaataaatttaagccaaagaaaatatatccagaatacataaagttcatacaataggtcatatgaacacaagtccaaaaaaa

SEQ ID NO: 6294 - DNA, 550 bp, Zea mays
  Probeset Number=SeqID_20697
tttttttggacttgtgttcatatgacctattgtatgaactttatgtattctggatatattttctttggcttaaatttattgtcacctccctatccttttccttgcatattcaaattaagccttcattattttattattaaaacgtttcacctaatctgtcatgaattatttagcttttggactctcttataatttagttttttatacttatttaatgtattatatttatattggccttttatagtgatttaaggcttgaaagggtgaaagggcctctagcataatggttaagactttcaaatagtacctccaagtctcgggttcaatccccctcgggatgaatttctggcttggttaaaaaatcttctcattgtgtcacgccctcacctggattatgtcctgtgcaccaccctccgaccaaaccgttgcatagtagacaatgatggagggtcagggttcagggattttgtccccggacccctagggctcgtcgttaagagagagcgtgtgagggaagcacctccgactacgaggggccacccgttagtaa

SEQ ID NO: 6295 - DNA, 763 bp, Zea mays
  misc_feature (726)..(726): n is a, c, g, or t
  Peptide Sequence Number=SeqID_11294
  Probeset Number=SeqID_20698
ggcgcctcattctctcacctcgttaggctaatacggaaacggccgagggcatcgtggcgcacaaccttgccacgacgccgtgccggcatgcatctgggcaccagcctgaccacggccacacctctaaagcaatggagagcgtgaaatcatatattcactggtgtcgaaaccgcggcggcgtcgacccctggcttgcagcggctcgacgatgaactcctcgccgtgaagaactcccccgcgctactggactccttgcaggggctcgagcgatgatacagccaataatgacgacgacggctccctgcagaccctcttctcttcactctcggggcgcctgacgatgcctgggtctcgcgtggctatggcgacttggggaaaaaaattcggttacacaactagaacattatctgtttatacgctgctagggaatcctaacaaactccccatgatctacggaagtggttacatgtatacatatccaaatgggtcagcctgataatgggcccgtgacccggcacgagcacaggtccaacccgactagaagccgtgcccggaccgggccagcccgatagccgtgtcgggcttggaccggccgtttggcccgcgatacaggcacgggcccgccctagttaaagggtaggcacggtaacggtccgtttgagagactgattttgtaatggtcagtctgttttagctataatactgatgattctgttattatatganagcattcttcaaaaaaaaaaaaaaaaaaaaaaaaaaa

SEQ ID NO: 6296 - DNA, 763 bp, Zea mays
  misc_feature (38)..(38): n is a, c, g, or t
  Probeset Number=SeqID_20699
tttttttttttttttttttttttttttgaagaatgctntcatataataacagaatcatcagtattatagctaaaacagactgaccattacaaaatcagtctctcaaacggaccgttaccgtgcctaccctttaactagggcgggcccgtgcctgtatcgcgggccaaacggccggtccaagcccgacacggctatcgggctggcccggtccgggcacggcttctagtcgggttggacctgtgctcgtgccgggtcacgggcccattatcaggctgacccatttggatatgtatacatgtaaccacttccgtagatcatggggagtttgttaggattccctagcagcgtataaacagataatgttctagttgtgtaaccgaatttttttccccaagtcgccatagccacgcgagacccaggcatcgtcaggcgccccgagagtgaagagaagagggtctgcagggagccgtcgtcgtcattattggctgtatcatcgctcgagcccctgcaaggagtccagtagcgcgggggagttcttcacggcgaggagttcatcgtcgagccgctgcaagccaggggtcgacgccgccgcggtttcgacaccagtgaatatatgatttcacgctctccattgctttagaggtgtggccgtggtcaggctggtgcccagatgcatgccggcacggcgtcgtggcaaggttgtgcgccacgatgccctcggccgtttccgtattagcctaacgaggtgagagaatgaggcgcc

SEQ ID NO: 6297 - DNA, 677 bp, Zea mays
  misc_feature (1)..(9): n is a, c, g, or t
  Peptide Sequence Number=SeqID_11295
  Probeset Number=SeqID_20700
nnnnnnnnnatttgaaggaacctgaatatctatcagctgtatggtacgtagtattatattcccaataaaataagttaactaccttcctttactcttcttatcagccatccccgccggctggcaaattcgaattaggagtgcccatatgccacttccttcgcttccaaaaccttggtatcttcccagttcaacaatgaatcccctcagaagacccacaggaatcggggaacggctcgaatgaaaccctcgaccggcagctctcctttctcggcgtcactcacaactaacgacgactggactcactcgatcgctttcggtcaggagcatggaggcgcggggcaggggatatttatacaaaatactactactctcactatcccgaatgcaattctagcacaatatcatggtgtagtatcttatgtttgacaaaatatagataaaaaatcgaatcgctatgtcacccaaaatgtattactgtcctgtaccaacatccgtgacaaaaaaaagttttatgaggttgtacatgttggagaatacctatggtctaactataaatggataatgtagtataaatataccgccaacaacttcaacatgcaaaggcatgtttgtcaaaaatactgtagagccgccctacagtaattgcttaagaaatgaatactatcggctgtagattt

SEQ ID NO: 6298 - DNA, 459 bp, Zea mays
  misc_feature (412)..(414): n is a, c, g, or t
  misc_feature (434)..(435): n is a, c, g, or t
  misc_feature (442)..(444): n is a, c, g, or t
  misc_feature (449)..(450): n is a, c, g, or t
  Peptide Sequence Number=SeqID_11296
  Probeset Number=SeqID_20701
gcaaaggtggccttttcggcgacagcatcaagtggaacttttgctagatttcaggaacttgtagatgggcgcaccattgttaccgttgacgtcaacctacaagttcctgaaatctagcaaaggtggccttttcggcgacagcatcaagtggaacttttccaagttcttggttgacaaggagggacgtgttgtggatcgctatgctccaaccacctcacctctgagcattgagaaggatatcaagaagctgcttgggagctcttaaacaatatctgggtgcaaaactgtagaaaaacatgtatcaacaatgccctgagcgataaaatatatgataagctgtattaataaagtattgccgtacttgagaggttgcagtatctgctctatttcccttgcatacactctgtacttnnntatccccttcgaatgaattnnaatgctnnntcagnntgctacccc

SEQ ID NO: 6299 - DNA, 676 bp, Zea mays
  misc_feature (601)..(676): n is a, c, g, or t
  Peptide Sequence Number=SeqID_11297
  Probeset Number=SeqID_20702
gcggccgctacctctgcgccgagtccgtcctccaccgcgaggacgtcgtccgcatcctcgccaagctcttccccgagtaccccgtacccacaaggtgctccgacgtgcggatcccccggacgcgcccgtgccggcgctcgtcccgactgctcccgcacctcggcttggccctccccccggtctgcctgtcgcggttcggcgcgccgacgagccgcccccgcgggggcccccgggcggggccgcgagcccggagctccgggacctcggcttcgtcggccgcccgccgcgccgggcgcccggccgcccgccggcggccccccgggggaagcgccacccgcccgtgcggcgggggcacatgcaggcgtccaccacggcggcggcgcctggccgcgcggactgcccggccgccgtccgcctgccccggccggcctgcgccgtccgcgcctgcgactgggtgtcttgctggcttgctccctcgcggggacgcgtgttcgttcgtactgcccagctgccgtgcgcatgccccggccggcctgctgtgtgtaagcaaactagtgttttttttaattaattaatttctctggctgatacgtaccccggnnnnnnnnnnnnnnnnnnnnnnnnnnnnnnnnnnnnnnnnnnnnnnnnnnnnnnnnnnnnnnnnnnnnnnnnnnnn

SEQ ID NO: 6300 - DNA, 676 bp, Zea mays
  misc_feature (1)..(76): n is a, c, g, or t
  Peptide Sequence Number=SeqID_11298
  Probeset Number=SeqID_20703
nnnnnnnnnnnnnnnnnnnnnnnnnnnnnnnnnnnnnnnnnnnnnnnnnnnnnnnnnnnnnnnnnnnnnnnnnnnnccggggtacgtatcagccagagaaattaattaattaaaaaaaacactagtttgcttacacacagcaggccggccggggcatgcgcacggcagctgggcagtacgaacgaacacgcgtccccgcgagggagcaagccagcaagacacccagtcgcaggcgcggacggcgcaggccggccggggcaggcggacggcggccgggcagtccgcgcggccaggcgccgccgccgtggtggacgcctgcatgtgcccccgccgcacgggcgggtggcgcttcccccggggggccgccggcgggcggccgggcgcccggcgcggcgggcggccgacgaagccgaggtcccggagctccgggctcgcggccccgcccgggggcccccgcgggggcggctcgtcggcgcgccgaaccgcgacaggcagaccggggggagggccaagccgaggtgcgggagcagtcgggacgagcgccggcacgggcgcgtccgggggatccgcacgtcggagcaccttgtgggtacggggtactcggggaagagcttggcgaggatgcggacgacgtcctcgcggtggaggacggactcggcgcagaggtagcggccgc

SEQ ID NO: 6301 - DNA, 238 bp, Zea mays
  Peptide Sequence Number=SeqID_11299
  Probeset Number=SeqID_20704
agactaggaggttggcgaggcagacggcggcgagcagccagtagaagttgtcgaggcggcccttgttgaggtcgttggcgatccaggacatgcccttctccctctccctctcgctcaccctcagcgccgtcgtctggttcctctacggcctgctcatcaaggacaaatacgtcgcgcttccaaacatcctggggttcaccttcggcgtggtccagatggtgctctacgtgttgtctcg

SEQ ID NO: 6302 - DNA, 804 bp, Zea mays
  Peptide Sequence Number=SeqID_11300
  Probeset Number=SeqID_20705
aatgaaaacagcacctccaatttcggtttatttctatgaaaacagcaactgaacataagttcacacactaatgaaaacagcacctccaattttggtttatttctatgaaaacagcaactgaacataagttcacacactaatgaaaacagcacctccaatttcggtttatttctttgaaaacagcagctgaacataagttcacacactaatgaaaagacaatatctgaaattataaatgagatgtttcacaactctaatctcatggctggctactcccgaaacggcgagctaaaatctcatctttcaacaactgaaagtattgctttgattggtcgtccattgtgcttgtgtcggttgtcatgattattttgtcatgctggtcttgctccaattgtagcttctttttctcaagctccaagaacttgtcatcacggtcctttcggtctttctcaatttctatccttgattctctcatttttttaacttcatcaatgaaaggatcagattcatcatcaccatgcttttttgcctttgccttttccttttcagcttttcttcctggtggcctttgaacaacaggatgaacttcaccagtgccattgttacattctggaagtgtcttgcctacatagtttgctttatttggtgaccactttggctccaacctaagaatgttccatgcatgaaaaagggagaaagcctttttgtgtagttctaggaacattgcctttgcttcaacaatcttggcattacttgtttttccactttcattcttcctttctatgctgtcatggaaaaccgcaa

SEQ ID NO: 6303 - DNA, 804 bp, Zea mays
  Probeset Number=SeqID_20706
ttgcggttttccatgacagcatagaaaggaagaatgaaagtggaaaaacaagtaatgccaagattgttgaagcaaaggcaatgttcctagaactacacaaaaaggctttctccctttttcatgcatggaacattcttaggttggagccaaagtggtcaccaaataaagcaaactatgtaggcaagacacttccagaatgtaacaatggcactggtgaagttcatcctgttgttcaaaggccaccaggaagaaaagctgaaaaggaaaaggcaaaggcaaaaaagcatggtgatgatgaatctgatcctttcattgatgaagttaaaaaaatgagagaatcaaggatagaaattgagaaagaccgaaaggaccgtgatgacaagttcttggagcttgagaaaaagaagctacaattggagcaagaccagcatgacaaaataatcatgacaaccgacacaagcacaatggacgaccaatcaaagcaatactttcagttgttgaaagatgagattttagctcgccgtttcgggagtagccagccatgagattagagttgtgaaacatctcatttataatttcagatattgtcttttcattagtgtgtgaacttatgttcagctgctgttttcaaagaaataaaccgaaattggaggtgctgttttcattagtgtgtgaacttatgttcagttgctgttttcatagaaataaaccaaaattggaggtgctgttttcattagtgtgtgaacttatgttcagttgctgttttcatagaaataaaccgaaattggaggtgctgttttcatt

SEQ ID NO: 6304 - DNA, 545 bp, Zea mays
  Peptide Sequence Number=SeqID_11301
  Probeset Number=SeqID_20707
cccacgcgtccgacgagaatcctgccttctgcaacttcaccaagggaccggcggccgttcaccccgcgttcgcgtggctgcgctgcgacagggaggacgtggaggactgcgcgagcttcctgcgcggccacgggatcctgacgcggagcgggagccagttcggcgcggacccgaggtacgtccgggtcagcatgctcgaccgggacgatgcctacgacatcttcgtcaagcgcctctcctccctgcactgaacaggccgggtcgggctacacgcatgcatggcatggagatgggaggaggatcgatgccatgccgcccggccggcgtcggcattgccggtccgtggaccagtgtgagcatgagccatgagtagtagagggcagcagtgttggtacttggtaggaccaagggcaggaggagaagcgcaggaggagcgacgatttgttttgcctttcctgctgtatgtttttgcggtgttccggatgtcgcatcgtctcaaaggtttcttttggtttcttgctaaaaaaaaaaaaacccaacacaat

SEQ ID NO: 6305 - DNA, 503 bp, Zea mays
  Peptide Sequence Number=SeqID_11302
  Probeset Number=SeqID_20708
attgtttggggagacatccaggcgaaggaaggttgcggcggcgagcgctgactgtatctaaacctcgatgatcatggtgtccgcttccaagcgcttctgctgaggcgcaatctacttcacatccagaagacaccgaagaaactcaagacatggacattgaaccaactgggtatgagtaagataaacttcattcttaccttctatactaaatcttaatatctttcaaataataccattttatattgaatttccataatgaactatatgtgtgtgtatgtgcataaaaagattatacttatttgattgatctgctataaaaatatatttgagttcattgaaatattgcatattagtttaacatatttattaacatctttaatagcttatgtcattcttacactatgaaccaccaagacataaatagtgacctcggagacaccatagcactcttatttcgcaaacgagctaacaaggtggcatgtatgtgttaacttgttcatctc

SEQ ID NO: 6306 - DNA, 1155 bp, Zea mays
  misc_feature (1)..(7): n is a, c, g, or t
  misc_feature (267)..(268): n is a, c, g, or t
  misc_feature (468)..(469): n is a, c, g, or t
  misc_feature (514)..(516): n is a, c, g, or t
  misc_feature (561)..(563): n is a, c, g, or t
  Probeset Number=SeqID_20709
nnnnnnnacagcaccgcttccacggcccccgggtgcagtgtgcccccctgccttgtctcgtagctctctaagaaagagccatggaagctgacgcactactccatgcgcccatgacttcctcttcctcctcttcttcctcctcctccgactccgtcggcggctcgtgcgtcgtcaatggcgcgcaggagctaccgtccaataccggcaagccgcacaagaacgtgaaacggaagagaaccgcgtccccgtccgctgctccaggtggcnncgtggcgccggcgccgcccgaggccgccatagcggacgacgactgcggcggccggcggcgcaagagggggagcgccggcaccaggcacccgacgttccgcggcgtgcgcatgcgcgtctggggcaagtgggtgtccgagatcagggagccgcgcaagaagtcgcgcatctggctcggcacgttcccgaccgccgagatgnncgcgcgcgcccacgacgtggcggcgcttgccatcaagggccgcgnnncgcacctcaacttcccgcacctcgcgcacgacctccctcgcccgnnntccacctcgcccgccgacatccaggccgcggcagccaaggctgctgccgccgccgccgatgccgacgtagaggtagagcaatgcgagtcctcccatgcggtcgagacgccatcgtcgtcagccaccagttcggaggaggtcgccgcggccagcaacgcggaggagatgagcgtgctgttcgacttgcccgaccttctgatggacctgagcgacggcctctggtcacccatctgggcggcagctccggcggcggtcgaagaatacgacggcggtgacagcctgagcgagccgcttctgtgggcccacgaacactgctggctggacgccgccgcgccggtgcagccggactagccgttccgttcggacgcaccggccgtcaactgccggtggttgcctgaaacggacgaccgatgccacgtgctttttgcttcgtgtgtgcgttgtgcaggctagagagatagaaacgcatggtttcctgtgccctgtgtggtctccggatggcaagtcgttgtaggatgcggtgaaactgtggcttgcctacttgcctgtatgaacacacacttatatatattggtttctaatgactttggcc

SEQ ID NO: 6307 - DNA, 644 bp, Zea mays
  misc_feature (1)..(2): n is a, c, g, or t
  misc_feature (10)..(17): n is a, c, g, or t
  misc_feature (19)..(31): n is a, c, g, or t
  misc_feature (37)..(37): n is a, c, g, or t
  misc_feature (40)..(47): n is a, c, g, or t
  misc_feature (63)..(69): n is a, c, g, or t
  misc_feature (71)..(72): n is a, c, g, or t
  misc_feature (98)..(100): n is a, c, g, or t
  misc_feature (127)..(130): n is a, c, g, or t
  misc_feature (137)..(138): n is a, c, g, or t
  misc_feature (142)..(147): n is a, c, g, or t
  misc_feature (300)..(300): n is a, c, g, or t
  misc_feature (302)..(304): n is a, c, g, or t
  misc_feature (324)..(326): n is a, c, g, or t
  misc_feature (333)..(334): n is a, c, g, or t
  misc_feature (345)..(347): n is a, c, g, or t
  misc_feature (352)..(354): n is a, c, g, or t
  misc_feature (382)..(382): n is a, c, g, or t
  misc_feature (460)..(460): n is a, c, g, or t
  misc_feature (462)..(472): n is a, c, g, or t
  misc_feature (498)..(499): n is a, c, g, or t
  misc_feature (532)..(533): n is a, c, g, or t
  misc_feature (535)..(535): n is a, c, g, or t
  misc_feature (537)..(537): n is a, c, g, or t
  misc_feature (550)..(554): n is a, c, g, or t
  misc_feature (561)..(561): n is a, c, g, or t
  misc_feature (566)..(566): n is a, c, g, or t
  misc_feature (613)..(613): n is a, c, g, or t
  misc_feature (615)..(616): n is a, c, g, or t
  misc_feature (632)..(636): n is a, c, g, or t
  misc_feature (638)..(638): n is a, c, g, or t
  misc_feature (644)..(644): n is a, c, g, or t
  Peptide Sequence Number=SeqID_11303
  Probeset Number=SeqID_20710
nnaagtgcannnnnnnntnnnnnnnnnnnnncgctanctnnnnnnnnagcgaccggaccaacnnnnnnngnncggcaaaacgcgtcatctcaacaacnnnttattcgatttcatggcatcaacaacnnnnaaaaccnnaagnnnnnnagaatagggaagtgagcgcatgaaattgcacgtccttgggtgtccatggggacgatgttgcacaggtcatcatcgcaaccgtcgaccccatccttgctttggactttgcctcatgaggcctcgaagttggtagagaatgggctctcctcctcnannntgttggattaagccacttcnnnggcttgnnagcctcttcannntatgnnncattgcttagtaaatctatctccttggncaattcacgtagaagttgcaaagttggtgtcgaccaagttaggggagggcaggagccggcgaccggcaggccgtgcgntnnnnnnnnnnntggggcgatggttggaggccatggtnnagggcgaggcgagccagtggagcaggcccatgnncnangatggggacatgnnnnnaaggcgnggtcnggaagagaagggggttgacaggactagcgtagagggcagtgaccggntnnaagccaccacgcgggnnnnnancaggcn

SEQ ID NO: 6308 - DNA, 644 bp, Zea mays
  misc_feature (1)..(1): n is a, c, g, or t
  misc_feature (7)..(7): n is a, c, g, or t
  misc_feature (9)..(13): n is a, c, g, or t
  misc_feature (29)..(30): n is a, c, g, or t
  misc_feature (32)..(32): n is a, c, g, or t
  misc_feature (79)..(79): n is a, c, g, or t
  misc_feature (84)..(84): n is a, c, g, or t
  misc_feature (91)..(95): n is a, c, g, or t
  misc_feature (108)..(108): n is a, c, g, or t
  misc_feature (110)..(110): n is a, c, g, or t
  misc_feature (112)..(113): n is a, c, g, or t
  misc_feature (146)..(147): n is a, c, g, or t
  misc_feature (173)..(183): n is a, c, g, or t
  misc_feature (185)..(185): n is a, c, g, or t
  misc_feature (263)..(263): n is a, c, g, or t
  misc_feature (291)..(293): n is a, c, g, or t
  misc_feature (298)..(300): n is a, c, g, or t
  misc_feature (311)..(312): n is a, c, g, or t
  misc_feature (319)..(321): n is a, c, g, or t
  misc_feature (341)..(343): n is a, c, g, or t
  misc_feature (345)..(345): n is a, c, g, or t
  misc_feature (498)..(503): n is a, c, g, or t
  misc_feature (507)..(508): n is a, c, g, or t
  misc_feature (515)..(518): n is a, c, g, or t
  misc_feature (545)..(547): n is a, c, g, or t
  misc_feature (573)..(574): n is a, c, g, or t
  misc_feature (576)..(582): n is a, c, g, or t
  misc_feature (598)..(605): n is a, c, g, or t
  misc_feature (608)..(608): n is a, c, g, or t
  misc_feature (614)..(626): n is a, c, g, or t
  misc_feature (628)..(635): n is a, c, g, or t
  misc_feature (643)..(644): n is a, c, g, or t
  Probeset Number=SeqID_20711
ngcctgntnnnnncccgcgtggtggcttnnanccggtcactgccctctacgctagtcctgtcaacccccttctcttccngaccncgccttnnnnncatgtccccatcntngnncatgggcctgctccactggctcgcctcgccctnnaccatggcctccaaccatcgccccannnnnnnnnnnancgcacggcctgccggtcgccggctcctgccctcccctaacttggtcgacaccaactttgcaacttctacgtgaattgnccaaggagatagatttactaagcaatgnnncatannntgaagaggctnncaagccnnngaagtggcttaatccaacannntngaggaggagagcccattctctaccaacttcgaggcctcatgaggcaaagtccaaagcaaggatggggtcgacggttgcgatgatgacctgtgcaacatcgtccccatggacacccaaggacgtgcaatttcatgcgctcacttccctattctnnnnnncttnnggttttnnnngttgttgatgccatgaaatcgaataannngttgttgagatgacgcgttttgccgnncnnnnnnngttggtccggtcgctnnnnnnnnagntagcgnnnnnnnnnnnnnannnnnnnntgcacttnn

SEQ ID NO: 6309 - DNA, 484 bp, Zea mays
  misc_feature (1)..(26): n is a, c, g, or t
  Peptide Sequence Number=SeqID_11304
  Probeset Number=SeqID_20712
nnnnnnnnnnnnnnnnnnnnnnnnnncccgggattcgggcattatgggcgggggccccaagcttgctctctactgtgcgcacagcgacgctggcactcctccgctcccgcgacattgcgttgcgtggttggcgggcctgttgtgcccgtgcggcgcggcttcatcgtggagcgggaggtgcctttcacctcaacggaggtcagcatcacgacattggcaggggctttgggcccaactcggtccgggccggaggtcggcggcacgaagccgggcggtcgattcggatccctggggtccttcctcacggagacaccacggcgatcggttttctggccacatggtgatgacagaagactagcctatttttggaagctacccctctatggctataggtaatatcggttagattcctgcgatggttggatttttatttaactggataattggaatcaaaatgaaataagaataattttggtaggttcat

SEQ ID NO: 6310 - DNA, 484 bp, Zea mays
  misc_feature (459)..(484): n is a, c, g, or t
  Probeset Number=SeqID_20713
atgaacctaccaaaattattcttatttcattttgattccaattatccagttaaataaaaatccaaccatcgcaggaatctaaccgatattacctatagccatagaggggtagcttccaaaaataggctagtcttctgtcatcaccatgtggccagaaaaccgatcgccgtggtgtctccgtgaggaaggaccccagggatccgaatcgaccgcccggcttcgtgccgccgacctccggcccggaccgagttgggcccaaagcccctgccaatgtcgtgatgctgacctccgttgaggtgaaaggcacctcccgctccacgatgaagccgcgccgcacgggcacaacaggcccgccaaccacgcaacgcaatgtcgcgggagcggaggagtgccagcgtcgctgtgcgcacagtagagagcaagcttggggcccccgcccataatgcccgaatcccgggnnnnnnnnnnnnnnnnnnnnnnnnnn

SEQ ID NO: 6311 - DNA, 561 bp, Zea mays
  misc_feature (1)..(4): n is a, c, g, or t
  Peptide Sequence Number=SeqID_11305
  Probeset Number=SeqID_20714
nnnnttctctctataaatatctcgccctcgcctcgtggagccagttcccggccaccttgcccctctccccatgcccctgttcgctggccgagcgaagcccccgtcgacgctgctgttcgccgacgccaggacgccccggtcgtctgtcgaccttggtgactgccccgacaagctcctcggtcgcgcctctgtgcccgacgtccttctctgccgccattgccgaggcccgaacgaccaacgtccttcattgttcccctgcccgttcattcacgttgcagcaagaagctgattgtgtggtagaggatccgaattcgtttgaggacgacccgtaggacacttttgtgcaagagggtgatgctggagactttgatggagattttatcgacgacgatgatttctaagtctaacgatgcgccggtcatcttcctgtgggagattgccccatgttatttatattccgctttactttgatgtgatacttgttaaagatacaatgattcagatgatgtaataaagtattctactctctttaaaaaaaaaaaaaaaaaaactcgagcccgg

SEQ ID NO: 6312 - DNA, 561 bp, Zea mays
  misc_feature (558)..(561): n is a, c, g, or t
  Probeset Number=SeqID_20715
ccgggctcgagtttttttttttttttttttaaagagagtagaatactttattacatcatctgaatcattgtatctttaacaagtatcacatcaaagtaaagcggaatataaataacatggggcaatctcccacaggaagatgaccggcgcatcgttagacttagaaatcatcgtcgtcgataaaatctccatcaaagtctccagcatcaccctcttgcacaaaagtgtcctacgggtcgtcctcaaacgaattcggatcctctaccacacaatcagcttcttgctgcaacgtgaatgaacgggcaggggaacaatgaaggacgttggtcgttcgggcctcggcaatggcggcagagaaggacgtcgggcacagaggcgcgaccgaggagcttgtcggggcagtcaccaaggtcgacagacgaccggggcgtcctggcgtcggcgaacagcagcgtcgacgggggcttcgctcggccagcgaacaggggcatggggagaggggcaaggtggccgggaactggctccacgaggcgagggcgagatatttatagagagaannnn

SEQ ID NO: 6313 - DNA, 411 bp, Zea mays
  Peptide Sequence Number=SeqID_11306
  Probeset Number=SeqID_20716
tcaccccacaaagcaataacccggccctctcctttcgtcaccatcacatccagccagccaacaaaaatgtcgcgcgtcacagctgcggtgctcttttacatcctcgccgttgctgccctcagcgcggccgaggccccggcagagtcaccgaaggaaggcagtgctgccaaggcacctgaggctgccaagagaactgctgcccccgctgaagcacccggagccgcgtactagctgtccgtagtcgagccccgctctccgtcgatccgtccccgtcacacgcacgaacccgaggttgatgacgacccaaatttattttatgtattttataaagcgcttttgattcgattcatgtgtatagtttgtttgttgtaatatatacacatgtgattccgattcaaaaaaaaaaaaaaa

SEQ ID NO: 6314 - DNA, 953 bp, Zea mays
  misc_feature (1)..(39): n is a, c, g, or t
  misc_feature (953)..(953): n is a, c, g, or t
  Peptide Sequence Number=SeqID_11307
  Probeset Number=SeqID_20717
nnnnnnnnnnnnnnnnnnnnnnnnnnnnnnnnnnnnnnncttcctcccctcgtcgtttcctattattcttgcgtcgctcgccggagtccgtcttcgttcgtcagtgacgtgatgctgctctgctgtcgacatcccctgccctatgacggattccttgtgccctgccactcaatctcaacgatgctctgtttctctattgcggtgcgccgacgatcaccatcgccggactgctgcatcatcgtcataaatccgcaggtgcccgtcgccaaggcctcaccgtcgctgctgcttgccggagacctatccctcgacgccaacaaccgcgttcgactcctcaccgaccgtcgagtccctgttctgccctcgtggagacattgcacgtgctcgttcagctcagccgtcgttcgtcgctcactcgccgtcatcgagatctcatcggtgtcttgctaccctgcatccccatcggtcctgtgctccgatctcctcgtgtaccatccgaagtggttgatctagtagttaagaatcaagatctattccgatccgtggaagaacctcaagttttcaataagcaaggcaagtggacttctccctctgcatactctgtttgatcccaaacaatacatttaataaagtttattcttttggatatatatgcataatttgacgggttacctatttagataacctttccaaccttattccttgatcaaacctgggaattatactttaccttcataggtatgctattgctacaacttaactttatgcagtcactcttatatgatactaatgttccaaatggtaagtttacattattgttgttaacccgatggttaaacaagattattgcatattaattggaacatgggagtgaccacccgggaaaacagtgctaccatgagaactatcatggctctggtcttggctaaataactagggaagtcttatgttgn

SEQ ID NO: 6315 - DNA, 546 bp, Zea mays
  misc_feature (1)..(20): n is a, c, g, or t
  misc_feature (515)..(546): n is a, c, g, or t
  Probeset Number=SeqID_20718
nnnnnnnnnnnnnnnnnnnngtgtctctgtggtctgtgttgcaagccaaagctcttgtccccagccaccaagttagctctctccagttcatcaattgccactccattatctggtgaccaaagcagccatccttccacctcaccgtggccaaggatcttcgagaggtgtttcgatcatgctgtgcccgttctctactcctcacaggtgatgtggataggtgacatggcaggtgatgtggaaaaatgatgtggcaagtgatgtggaaaggtgacgtgtcagctgaactggcgagtgacacattttatagtaatgccaaaacgcgtgttaacaaaagtagaaacaatactatagccacgtttgtattgtgtgcctacgcatatcaatacgttatatagtaacgtcaaagtgtgtattaagacctgtagaaacacttataaaagatgttttcacttataaaagatgttttgtacatacatctatatttgtttgtaataatatagacacgttatactgcnnnnnnnnnnnnnnnnnnnnnnnnnnnnnnnn

SEQ ID NO: 6316 - DNA, 546 bp, Zea mays
  misc_feature (1)..(32): n is a, c, g, or t
  misc_feature (527)..(546): n is a, c, g, or t
  Peptide Sequence Number=SeqID_11308
  Probeset Number=SeqID_20719
nnnnnnnnnnnnnnnnnnnnnnnnnnnnnnnngcagtataacgtgtctatattattacaaacaaatatagatgtatgtacaaaacatcttttataagtgaaaacatcttttataagtgtttctacaggtcttaatacacactttgacgttactatataacgtattgatatgcgtaggcacacaatacaaacgtggctatagtattgtttctacttttgttaacacgcgttttggcattactataaaatgtgtcactcgccagttcagctgacacgtcacctttccacatcacttgccacatcatttttccacatcacctgccatgtcacctatccacatcacctgtgaggagtagagaacgggcacagcatgatcgaaacacctctcgaagatccttggccacggtgaggtggaaggatggctgctttggtcaccagataatggagtggcaattgatgaactggagagagctaacttggtggctggggacaagagctttggcttgcaacacagaccacagagacacnnnnnnnnnnnnnnnnnnnn

SEQ ID NO: 6317 - DNA, 461 bp, Zea mays
  misc_feature (381)..(381): n is a, c, g, or t
  misc_feature (418)..(418): n is a, c, g, or t
  misc_feature (421)..(421): n is a, c, g, or t
  misc_feature (426)..(426): n is a, c, g, or t
  misc_feature (428)..(428): n is a, c, g, or t
  misc_feature (434)..(434): n is a, c, g, or t
  misc_feature (438)..(438): n is a, c, g, or t
  misc_feature (461)..(461): n is a, c, g, or t
  Probeset Number=SeqID_20720
ttttttttttttttttggaagaaccctgtttgaacttgtatataaggttcctctctgcaataaacatacaacagttattctgtctcattcatttgtctctctcaactctctttgtcactgaatattacaacaaattatcagcactgctcaagaaatcaaaggaagaaaggggaagaacacttgttgttcctatgcagcggcttcaaatcaacaggaaaggtatgtaccaaaccatttctcttcgcatccgtcgtatgcgtgaatctctccatgttgttgatgacgcactgttggaggtattcgctgttgggcaagacgcagcgatcccaccagtgcacgtcatccctgaacgccacgtacaagtgcaaaatgtggatttcngtgtgatccacggatggacagcgatcgtaccgctgcnggngggtnangcggantcancgacaactaccccgatggatgtn

SEQ ID NO: 6318 - DNA, 619 bp, Zea mays
  misc_feature (601)..(619): n is a, c, g, or t
  Peptide Sequence Number=SeqID_11309
  Probeset Number=SeqID_20721
ttcccctccctgcctcctcgtctcctcggtctcccctccctgtcttccagagacacagagcagggcgctcttcggtcggaggagaagcgcgaccacgaccatgggctttatctcgttcgtcggccgggttctcttcgcctccctcttcctcctctcggcctaccaagagttcattgaatttggaaatgacggtggacctgcagcgaagaccttgaagccaaagttcaatttgttcgtcaagctagtgtccaagaatactggactggggctgccgcatatggatataaaaactgtcattgcagctaccatgtttcttaaaggctttggtggtcttctgttcatagtcagcagctcatttggagcatccctcctggttagcatctaagtattggttttttctggcatgcttagtgccttgtggttaaaaacataaagggcttatagagggtattgccaaaaaagggactaaatatactctcatatggaatttactaattggggactctggcggcatttctcccagggggcatctggatgtcaagatttcttgtagcatgtctttctcaacatcaaactatttgctcatttacttgggcgttannnnnnnnnnnnnnnnnnn

SEQ ID NO: 6319 - DNA, 513 bp, Zea mays
  misc_feature (490)..(492): n is a, c, g, or t
  misc_feature (508)..(508): n is a, c, g, or t
  misc_feature (511)..(512): n is a, c, g, or t
  Peptide Sequence Number=SeqID_11310
  Probeset Number=SeqID_20722
agtaatagatattatgccctccattttagatatagattggaagtgtatgtgtggtgtataactgtatagaatttcttcaattcatggtgagattgttggaaagaaagaaagaaaaaactccttgaattaatccattgttgctgcccaatataatgcatggtcagaggtatccactcttgtcgactgaatatatatcctcccagcagctttgtatccaaatcagatcgaccaccgcatgcaaaaccccttgaactaatcaaccacgtcccagctaggcacagcatctcgtgtgcgtccacgagcagatgaaactgcacagcatgatctgatcgctagctgcttccatatatatgctgtggacacctcagatcatgctggcagcttcagctactagaggacacaccaaccaatcaacattcggagctcggagctcggagagagagagagagacgcgagcgagctaggaacggagcgaaggaggaggacgcgnnngatcgagcccggcggntcnng

SEQ ID NO: 6320 - DNA, 513 bp, Zea mays
  misc_feature (2)..(3): n is a, c, g, or t
  misc_feature (6)..(6): n is a, c, g, or t
  misc_feature (22)..(24): n is a, c, g, or t
  Probeset Number=SeqID_20723
cnnganccgccgggctcgatcnnncgcgtcctcctccttcgctccgttcctagctcgctcgcgtctctctctctctctccgagctccgagctccgaatgttgattggttggtgtgtcctctagtagctgaagctgccagcatgatctgaggtgtccacagcatatatatggaagcagctagcgatcagatcatgctgtgcagtttcatctgctcgtggacgcacacgagatgctgtgcctagctgggacgtggttgattagttcaaggggttttgcatgcggtggtcgatctgatttggatacaaagctgctgggaggatatatattcagtcgacaagagtggatacctctgaccatgcattatattgggcagcaacaatggattaattcaaggagttttttctttctttctttccaacaatctcaccatgaattgaagaaattctatacagttatacaccacacatacacttccaatctatatctaaaatggagggcataatatctattact

SEQ ID NO: 6321 - DNA, 653 bp, Zea mays
  misc_feature (1)..(53): n is a, c, g, or t
  Peptide Sequence Number=SeqID_11311
  Probeset Number=SeqID_20724
nnnnnnnnnnnnnnnnnnnnnnnnnnnnnnnnnnnnnnnnnnnnnnnnnnnnncgacgccagctcgttcacgggcgacgcctacatcgagctggtgtgctcgccgaacaaccccgacggcgccatccgcgaggccgtcctcgcggcaccgtactactcggtatacccggccgtgacggcctactaccggccggggctgttccggtgggccggcgacgccagctcgttcacgggcgacgcctacatcgagctggtgtgctcgccgaacaaccccgacggcgccatccgcgaggccgtccttccctccggcggatccggcgtagcggtccacgacctggcctactactggccgcagtacacggccatcaccagacgggccgaccacgacatcatgctcttcaccgtgtccaagagcacgggccacgccggcacgcggatcgggtgggcgctggtgaaggaccgcgacgtcgccaagaggatggccaagttcatcgagctgaacagggtctccaaggacaaggagctgcgcgcgcgcgccgccaagggcgcgggctccgacgccgacgagctcgcggaggcggagggggcccagcacctcgactacgggcgggggcggcgcatggagcgctagcgcgtgcggcgcgagcgcgaggc

SEQ ID NO: 6322 - DNA, 574 bp, Zea mays
  misc_feature (1)..(3): n is a, c, g, or t
  misc_feature (8)..(19): n is a, c, g, or t
  misc_feature (26)..(30): n is a, c, g, or t
  misc_feature (36)..(46): n is a, c, g, or t
  misc_feature (48)..(57): n is a, c, g, or t
  misc_feature (63)..(69): n is a, c, g, or t
  misc_feature (72)..(84): n is a, c, g, or t
  misc_feature (89)..(94): n is a, c, g, or t
  misc_feature (103)..(108): n is a, c, g, or t
  misc_feature (110)..(115): n is a, c, g, or t
  misc_feature (120)..(123): n is a, c, g, or t
  misc_feature (126)..(128): n is a, c, g, or t
  misc_feature (134)..(136): n is a, c, g, or t
  misc_feature (144)..(152): n is a, c, g, or t
  misc_feature (159)..(159): n is a, c, g, or t
  misc_feature (161)..(161): n is a, c, g, or t
  misc_feature (166)..(166): n is a, c, g, or t
  misc_feature (170)..(173): n is a, c, g, or t
  misc_feature (177)..(179): n is a, c, g, or t
  misc_feature (181)..(186): n is a, c, g, or t
  misc_feature (189)..(189): n is a, c, g, or t
  misc_feature (191)..(191): n is a, c, g, or t
  misc_feature (193)..(193): n is a, c, g, or t
  misc_feature (195)..(196): n is a, c, g, or t
  misc_feature (198)..(199): n is a, c, g, or t
  misc_feature (203)..(207): n is a, c, g, or t
  misc_feature (214)..(216): n is a, c, g, or t
  misc_feature (224)..(226): n is a, c, g, or t
  misc_feature (228)..(232): n is a, c, g, or t
  Peptide Sequence Number=SeqID_11312
  Probeset Number=SeqID_20725
nnnctacnnnnnnnnnnnngcgaccnnnnnccccannnnnnnnnnngnnnnnnnnnncttgcnnnnnnnggnnnnnnnnnnnnnggtgnnnnnncccaacggnnnnnngnnnnnnaaagnnnngtnnnccggtnnngtcccgtnnnnnnnnngtccccncngcccngccnnnnggtnnncnnnnnngcncngncnnanntccnnnnngggtacnnncccggtgnnncnnnnncacccgtgctctgggagcacagggtagccccgtcgtgcggtgatgggattttccatggagtaaattgaaaagggtaagcccaatttgagattaatgcttacgtgtactattcaattccatcgctgcaacgcttggttgaaaccaaaattcctccgtcatgtaatggtgagaggaaattgtgactcttgtcggcgatgggcatcaattgcagaggctgctgcgtcgcaacatgtccttctgttctttttcttgcgctcagtgaagaaacggtgctgataacgtgttgaaatatactcagtggagagagacagagagaatacaaatgacagaactattgtttgt

SEQ ID NO: 6323 - DNA, 466 bp, Zea mays
  Probeset Number=SeqID_20726
gcggccgcccgcgacgccgcgcgccggtgcgtcgccgtgcaggccgagaacgcgatgctgcacgcccggaccgtggagctcagcgcgcgcctccagtccctcgtcgacctcatccagtgcatgcaagcaggcgacgccatgtaccagtaccagcagcagcagttgccgctggtcgacgccaccatgtacaactactactagctagctagctagtgtccatcgtgctaaggctaagctatgcctgctgtgactactctgtgtgtctgctgctttgtctactctactctactcccggtcgggtcgtgttgttattggttgcttgggcacattgtggaaagcaggccaaagtagctagtagcccctactcttgtggtggtgtcatggtgtgtcactttatatataatagcgtgacatggacggcaaaagcaaagtattatgtggtaaatatggattccctaactgatcg

SEQ ID NO: 6324 - DNA, 662 bp, Zea mays
  misc_feature (9)..(9): n is a, c, g, or t
  misc_feature (17)..(18): n is a, c, g, or t
  misc_feature (50)..(50): n is a, c, g, or t
  misc_feature (113)..(113): n is a, c, g, or t
  misc_feature (248)..(248): n is a, c, g, or t
  misc_feature (334)..(334): n is a, c, g, or t
  misc_feature (343)..(343): n is a, c, g, or t
  misc_feature (424)..(424): n is a, c, g, or t
  misc_feature (444)..(444): n is a, c, g, or t
  misc_feature (513)..(513): n is a, c, g, or t
  misc_feature (591)..(591): n is a, c, g, or t
  misc_feature (599)..(599): n is a, c, g, or t
  misc_feature (601)..(662): n is a, c, g, or t
  Peptide Sequence Number=SeqID_11313
  Probeset Number=SeqID_20727
ccccgcggnggaggagnncttcctcaaacggatcccccgggctgcagggnttttcctcactagtccccccccccccccccccccgaacattttacagaccagatgacattttnatcagccaaagcctatgcatctgacatcagagaggtctactatagtgaggatgtaattgatgtgcctgtggatatgatagagcgaaaatgtgaggttagaaagaaaaacgatcttgcaagttcagaccttccagngatgtttggaacatggtatttttctgcgaactcatatatggaccgtgccagtgggagctctcaagcagttgccctccaaatgttanggcttatgnccatggggcaaaagggacaagtggcgtttgaaaaagaaccaagggaaggcagagcggggagccctgatccaaatagattcnagggaaatgggttgggatgntggcctaaagagaaaaccggcctagctactcctggacatttttgccggcctggcgggaggtttatccanacaagggctgcagccaagctggggggcatcctttttacacaaaatggggcgattgggaaaaaccaaagagccccggcnggtggaanannnnnnnnnnnnnnnnnnnnnnnnnnnnnnnnnnnnnnnnnnnnnnnnnnnnnnnnnnnnnn

SEQ ID NO: 6325 - DNA, 785 bp, Zea mays
  misc_feature (1)..(1): n is a, c, g, or t
  misc_feature (172)..(172): n is a, c, g, or t
  misc_feature (183)..(183): n is a, c, g, or t
  misc_feature (229)..(229): n is a, c, g, or t
  misc_feature (241)..(241): n is a, c, g, or t
  misc_feature (518)..(520): n is a, c, g, or t
  misc_feature (524)..(526): n is a, c, g, or t
  misc_feature (542)..(544): n is a, c, g, or t
  misc_feature (551)..(562): n is a, c, g, or t
  misc_feature (567)..(569): n is a, c, g, or t
  misc_feature (582)..(584): n is a, c, g, or t
  misc_feature (586)..(586): n is a, c, g, or t
  misc_feature (595)..(595): n is a, c, g, or t
  misc_feature (606)..(610): n is a, c, g, or t
  misc_feature (626)..(628): n is a, c, g, or t
  misc_feature (647)..(647): n is a, c, g, or t
  misc_feature (649)..(651): n is a, c, g, or t
  misc_feature (657)..(659): n is a, c, g, or t
  misc_feature (674)..(682): n is a, c, g, or t
  misc_feature (684)..(684): n is a, c, g, or t
  misc_feature (779)..(785): n is a, c, g, or t
  Peptide Sequence Number=SeqID_11314
  Probeset Number=SeqID_20728
natcttccaagtcaccaacgcaaattgcaccaagaaatccatcgagaggccgtcgacaggggaattaatggcgtcgtcgtctagcagcagccaccgccgcctcatcctcgcagccgccgtcctgctctccgtgctcgcggctgccagcgccagcgccgggacctcctgcgtngccgggtgggncattccgcacaacccgctcccgagctgccgctggtacgtgaccagnccggactgcggnatcggggccgcgctccccgtggcggaactgaaaaggagatgctgcccggaagctggcgaaaatccccggggtactggcggtgcacggggcttaacatcctcatggacggggggatccccccgggcccggacggcaaattgaaggcccccctaaaaaaccttgccggtttcccccgggaagggcaaaaggggattcccccccccccctcccccgggggccggggggaaacctggcccccctaaggggggtcccccaaatgcccctggattttcggcgnnngaannntgccccccaagtaacnnngaaaagnnnnnnnnnnnnggaannngcttgtagctagnnnanatgtttgantaataagcccnnnnnaaaaatgaatgccttnnncggatcgttcatccggaanannnattaannnggatccggatttgtnnnnnnnnntntaaaaaaaaaaaaaaaaaaaaaaaaaaaaaaaaaaaaaaaaaaaaaaataaaaaaaaaaaaaaaataaaaaaaaaagaaaaaaaaaaaaaaaaannnnnnn

SEQ ID NO: 6326 - DNA, 879 bp, Zea mays
  misc_feature (1)..(28): n is a, c, g, or t
  misc_feature (874)..(879): n is a, c, g, or t
  Peptide Sequence Number=SeqID_11315
  Probeset Number=SeqID_20729
nnnnnnnnnnnnnnnnnnnnnnnnnnnncatcgacgattgctccatccccaccagccgccgaccagctgctacatcctgcaacacgaggacaagtgctgcatcctacagtccgttcgtcgtagagttcttcatccccgctgtgactcgatctcctccgctctttctatgttcatccccgcgaatccacccccaattcgtcggtcaatttcgaggtcgagttccccatgaatccacacccatccccaccattctactgatgctgtgagggagaaacatggaggaggaggcatggcatacacctgaatcaaagagttcacacataatcactgcagacagggcattgccgccataaaacttcctcattccctattatttttttatcaaataaaccattttagataaaatcaatattctatatgcacctgcattctagctatagatgtagcatttcgtgggatgcttatttctgtgctgaatggaggctggctagagaaagaagccgcattgcaggaggacgcagctgggcgaccctgctgatgtagcactctcgtcaagctgtagcacattgcgctgattttggcatataagaatacttatatattcacctatattcatcaaaggatataaacaatttcattggttgtgagaagaaaatagaaggcatgcatatctttgaatatacatcacggctagcaatttaagatgataaataaaaaaaaccatgtaaattttgtctattatgttggagtgtgcataaaacagtagaatggtttattaaataatcttgaagatgttccttgaaactggtcgccaccccacatacgtaattggactgactgcttaatcataaaattatgggcatgtttggttgcnnnnnn

SEQ ID NO: 6327 - DNA, 879 bp, Zea mays
  misc_feature (1)..(6): n is a, c, g, or t
  misc_feature (852)..(879): n is a, c, g, or t
  Probeset Number=SeqID_20730
nnnnnngcaaccaaacatgcccataattttatgattaagcagtcagtccaattacgtatgtggggtggcgaccagtttcaaggaacatcttcaagattatttaataaaccattctactgttttatgcacactccaacataatagacaaaatttacatggttttttttatttatcatcttaaattgctagccgtgatgtatattcaaagatatgcatgccttctattttcttctcacaaccaatgaaattgtttatatcctttgatgaatataggtgaatatataagtattcttatatgccaaaatcagcgcaatgtgctacagcttgacgagagtgctacatcagcagggtcgcccagctgcgtcctcctgcaatgcggcttctttctctagccagcctccattcagcacagaaataagcatcccacgaaatgctacatctatagctagaatgcaggtgcatatagaatattgattttatctaaaatggtttatttgataaaaaaataatagggaatgaggaagttttatggcggcaatgccctgtctgcagtgattatgtgtgaactctttgattcaggtgtatgccatgcctcctcctccatgtttctccctcacagcatcagtagaatggtggggatgggtgtggattcatggggaactcgacctcgaaattgaccgacgaattgggggtggattcgcggggatgaacatagaaagagcggaggagatcgagtcacagcggggatgaagaactctacgacgaacggactgtaggatgcagcacttgtcctcgtgttgcaggatgtagcagctggtcggcggctggtggggatggagcaatcgtcgatgnnnnnnnnnnnnnnnnnnnnnnnnnnnn

SEQ ID NO: 6328 - DNA, 1194 bp, Zea mays
  misc_feature (1)..(2): n is a, c, g, or t
  misc_feature (4)..(8): n is a, c, g, or t
  misc_feature (15)..(17): n is a, c, g, or t
  misc_feature (29)..(32): n is a, c, g, or t
  misc_feature (42)..(43): n is a, c, g, or t
  Peptide Sequence Number=SeqID_11316
  Probeset Number=SeqID_20731
nngnnnnnctcgagnnnggccgggccgtnnnnccctcctgcnnacctcacatccctccctctcctctcctctccctcttccctctctacgccccaaacaaacaaagctaaggaagaaaccgagaaatctccctcctgttgtcttggcggtgaggcaaggtccaacggtgaggatcatgtctgcggcgtgggaaggcgggaaggagaaaggcgcggccacccccgcccccgggggcgcgtgcgagctgtgcggcgccatggccagggtgtactgcggtgccgacgaggccacgctctgctggggctgcgacgcgcaggtgcacggcgccaacttcctggtggcgcgccacgcgcgcgcgctgctgtgccggggctgcgcgcgccccacttcgtggcgcgccgcgggcccgcgcctcggcccctctgcctccctctgcgaccgctgcgtccgccgcggctcgggtgccgtcggcgtgggcggtgacgtggagatgggcggcacgggcgacggccgcggggacgacgaggaggaggaggatgacgacgaggatgacgacgatgttgtggtcgaggatgacgacgatgaggaagaaggggagggggagaaccaggtcgtgccctggacggaggaggccgaggcgacgccgccgcccgtcgccagctccacgtccagcagcagccgtgaggcccccgccaacggcgcgagtggtggagagtgcgcaaaggaaaacatgccgtgctccacatcgcagacgggcgtgctgtgccacaactggtcgtcagcgcgccacggcggcccgaacggtgaggttcacgtctgccggaacggtgggcggttcctcgcctggggccacaggaagagatcaccctcagacgacattagaagatcacttttagtgtatcgaatactggggaagacgtggatcacgactagatcagcttccacaaggcatacaccttccttcggccatcgaatcggggcgtgcaacttttttcgcagtcaaccttgcacgttggggagttagttgtcagggcagctgcgcgaggaccatgatagtattcctaaatggtgacggttatgttggagattgtatatgtccccattactttgtgctgtttaaattccttgccgtcccttgtgtttgtggatgatgcggattcgctgacctaagagaaatgacgtagggtttcattt

SEQ ID NO: 6329 - DNA, 393 bp, Zea mays
  Peptide Sequence Number=SeqID_11317
  Probeset Number=SeqID_20732
attgtgtagggggcgaaagcttttaggtcaaagaaagaaaagaagcgggcgcgcacgcacgcacggggggcactggcgcaaagcgaagcggtgcgcccggcttgccgacgcggacgccgggccccccccgccccccccccccatggaagggtggtggtggtggttggtgttggtgttgcgcgcgcggtggggctgcccgtgctgggtttgtgcggggagatgatatgatttgatttgatttgaccaggatcgcatcacgccattgtaaaatccgccatatatttttttctctttttttttgttgggtttgtaccgttgcgttcaacaaaagaaaaggaacgtacaagattgtttcgcagattacgaaagattaaatgcaatgattatgcacgc

SEQ ID NO: 6330 - DNA, 839 bp, Zea mays
  misc_feature (1)..(2): n is a, c, g, or t
  misc_feature (715)..(839): n is a, c, g, or t
  Peptide Sequence Number=SeqID_11318
  Probeset Number=SeqID_20733
nngggagggaagacggatagatttcacatataccccgcccgcggccagcactagcagtaagccagcaacagcaagaatcatcgctgcgctgtttccttcctcggtccccctccctcgtgctcgcctctctctcccacctctctcgccgccgtggccttttgcgctcggcggacagcacaaaagttacccttttttctcctgtgctttttttttttgcttcgccaaacggcggaacgagcaggcagctctgccccagggcattgtccccttcgtcttcgcaaaggagtacaacgtgcaccctgacattctcagcaccgcgtaagttccccgtgtcggaagacacgagcacaccaagatcggacaaccagatctctccaagatctgtcaaagatcctgacaccagtcgcctgctgctaaccctttctttttcctgctcgccggatgcttggggagtcatttttggcatgctcatcgccctgccgatcacgctcgtctactacatcctactcggcctgtgaccgtctcatccccaattccccatggaggacgccaccccctgcattgctgcaactgtaaagaccactgctgccgtcacttcccgttcatgggagacaaggccaggaaggacgggagatagagctgctacgacattgtttggcgcttgcaaaagagtggcgtgttttctctctctctatctatctagaagtaggtatgnnnnnnnnnnnnnnnnnnnnnnnnnnnnnnnnnnnnnnnnnnnnnnnnnnnnnnnnnnnnnnnnnnnnnnnnnnnnnnnnnnnnnnnnnnnnnnnnnnnnnnnnnnnnnnnnnnnnnnnnnnnnn

SEQ ID NO: 6331 - DNA, 442 bp, Zea mays
  misc_feature (2)..(3): n is a, c, g, or t
  misc_feature (5)..(6): n is a, c, g, or t
  misc_feature (8)..(12): n is a, c, g, or t
  misc_feature (14)..(20): n is a, c, g, or t
  misc_feature (27)..(28): n is a, c, g, or t
  misc_feature (34)..(34): n is a, c, g, or t
  misc_feature (38)..(53): n is a, c, g, or t
  misc_feature (57)..(59): n is a, c, g, or t
  misc_feature (62)..(73): n is a, c, g, or t
  misc_feature (75)..(78): n is a, c, g, or t
  misc_feature (80)..(80): n is a, c, g, or t
  misc_feature (86)..(87): n is a, c, g, or t
  misc_feature (91)..(99): n is a, c, g, or t
  misc_feature (105)..(107): n is a, c, g, or t
  misc_feature (109)..(109): n is a, c, g, or t
  misc_feature (129)..(144): n is a, c, g, or t
  misc_feature (149)..(154): n is a, c, g, or t
  misc_feature (177)..(179): n is a, c, g, or t
  misc_feature (186)..(187): n is a, c, g, or t
  misc_feature (189)..(189): n is a, c, g, or t
  misc_feature (191)..(193): n is a, c, g, or t
  misc_feature (198)..(200): n is a, c, g, or t
  misc_feature (208)..(209): n is a, c, g, or t
  misc_feature (427)..(431): n is a, c, g, or t
  misc_feature (434)..(438): n is a, c, g, or t
  misc_feature (441)..(442): n is a, c, g, or t
  Peptide Sequence Number=SeqID_11319
  Probeset Number=SeqID_20734
gnntnncnnnnncnnnnnnnccccatnncccccncatnnnnnnnnnnnnnnnntggnnnaannnnnnnnnnnntnnnnangctgannccannnnnnnnnaaaggnnntntatgccccctggggccatcnnnnnnnnnnnnnnnnccgannnnnnctcagggtttagggccggagccnnnccccccnntngnnngttgnnnttaagctnntccaaggaaaatgttttgggggggcatgatggtccagttcgttgtgtggaaaacttttatgctgcagaaacttttatttttatggatttgcttttggattttttttttagggttttttttttttttgcaaggtacttttgcagcctgatgcagctataaatagaaccccttgatagctatttttggacttgaattcccaaaaccctataaaaagttannnnnttnnnnnttnn

SEQ ID NO: 6332 - DNA, 615 bp, Zea mays
  misc_feature (615)..(615): n is a, c, g, or t
  Probeset Number=SeqID_20735
cttatctcttccccgccgtactcaggtttttcagccgctagcttatcttctacgcgccgcgcgtgcccaccctctgtcctcgccgccatgtcctcttcctgccggcgctcctccagggagcttcctagctcacccaggtcgccgccgttcgcctccagctcgcgacgccccctgcttttctctctctcccacacggccgcgccttgccaagatccgtgctgagctcccatcgccgcgcgcccccttctcctccatagccgtgcgagctgagctccctgctcgcgcccgtcgccctgcctgctcgagcgcgcgcccggccccagctccaaccttcctcccatggctctcgggcttctccaggtccgaccggagcttcctctatgcggcgctcctgctccccggcttgcccctctgcccgccccatctcccaggtgctggccgcgagctcctcgtccggcccggcccaccgacctgtctgtgctcgtcctggtctcggacgccaccgcgcctcaactcggcatgaccctgggtgtgtctgtccgctgctccagctcgttgggggtcatggcctcacccgggcttcagctcgcctttggcctcgggctggcacattcn

SEQ ID NO: 6333 - DNA, 584 bp, Zea mays
  misc_feature (26)..(26): n is a, c, g, or t
  misc_feature (37)..(37): n is a, c, g, or t
  misc_feature (60)..(60): n is a, c, g, or t
  misc_feature (68)..(68): n is a, c, g, or t
  misc_feature (76)..(76): n is a, c, g, or t
  misc_feature (83)..(84): n is a, c, g, or t
  misc_feature (266)..(266): n is a, c, g, or t
  misc_feature (317)..(317): n is a, c, g, or t
  misc_feature (457)..(459): n is a, c, g, or t
  misc_feature (481)..(481): n is a, c, g, or t
  misc_feature (483)..(483): n is a, c, g, or t
  misc_feature (488)..(488): n is a, c, g, or t
  misc_feature (490)..(490): n is a, c, g, or t
  Peptide Sequence Number=SeqID_11320
  Probeset Number=SeqID_20736
cgaaaaattcgaaagatccctccagngaaagattttntcttccctcctccgacgccccangcccaccnaacacacntctatannaagcagccctcagtcacacacagaacgcacaagcgcaagccgggcaagaaaactccgtaggccagtctgcgagttggatggccttcttcttggccctcgtgtgcatcctcatcttgctagccatcgcctcctacgtccagtacactcgctggcaaaaaaggggaaaggaccgcttcgccggncatgggaggtctgctcccctggaagctgccctcctggctccatgggctggncttaccttggcgagaccctccagctttacatcccaggaccccagtcttcttctcgcttcaaacagaggaaaaggtacggcgagaatctccaagacgcaccttccggggtgcccggggggtaatgtggaaaaccgaaaaannnccccggtttaatttgagggggngnggggncngtttttgcgccgctttccccccggcgcgggaggggtgtggtgggctcctcgtttcttttttcccagggggggtaacccccccccccccccgagg

SEQ ID NO: 6334 - DNA, 584 bp, Zea mays
  misc_feature (95)..(95): n is a, c, g, or t
  misc_feature (97)..(97): n is a, c, g, or t
  misc_feature (102)..(102): n is a, c, g, or t
  misc_feature (104)..(104): n is a, c, g, or t
  misc_feature (126)..(128): n is a, c, g, or t
  misc_feature (268)..(268): n is a, c, g, or t
  misc_feature (319)..(319): n is a, c, g, or t
  misc_feature (501)..(502): n is a, c, g, or t
  misc_feature (509)..(509): n is a, c, g, or t
  misc_feature (517)..(517): n is a, c, g, or t
  misc_feature (525)..(525): n is a, c, g, or t
  misc_feature (548)..(548): n is a, c, g, or t
  misc_feature (559)..(559): n is a, c, g, or t
  Probeset Number=SeqID_20737
cctcgggggggggggggggttaccccccctgggaaaaaagaaacgaggagcccaccacacccctcccgcgccggggggaaagcggcgcaaaaacngnccccncnccccctcaaattaaaccggggnnntttttcggttttccacattaccccccgggcaccccggaaggtgcgtcttggagattctcgccgtaccttttcctctgtttgaagcgagaagaagactggggtcctgggatgtaaagctggagggtctcgccaaggtaagnccagcccatggagccaggagggcagcttccaggggagcagacctcccatgnccggcgaagcggtcctttccccttttttgccagcgagtgtactggacgtaggaggcgatggctagcaagatgaggatgcacacgagggccaagaagaaggccatccaactcgcagactggcctacggagttttcttgcccggcttgcgcttgtgcgttctgtgtgtgactgagggctgcttnntatagangtgtgttnggtgggcntggggcgtcggaggagggaaganaaaatctttcnctggagggatctttcgaatttttcg

SEQ ID NO: 6335 - DNA, 615 bp, Zea mays
  misc_feature (125)..(126): n is a, c, g, or t
  misc_feature (128)..(131): n is a, c, g, or t
  misc_feature (134)..(134): n is a, c, g, or t
  misc_feature (149)..(149): n is a, c, g, or t
  misc_feature (188)..(188): n is a, c, g, or t
  misc_feature (615)..(615): n is a, c, g, or t
  Peptide Sequence Number=SeqID_11321
  Probeset Number=SeqID_20738
gaggtggagagatcgcacgcgccctctgccgcttgttcgttcctcgcgcttgccaccaggcaccaccacacacatcccaatctcgcgaggcggcgagggcaagcagcaggggtcctgcggcggtnnannnnaanccctcgtcccatccnatcgtcccccaaagtacaccatcgagtatctccccgaanacccacctttccacccgcgtcataatctggacgtctatggtcgatgcttgacaagcgaggacgcagattcttgtgtttcttaccaaaggaggaagaatcagcaaccggatgggcctctacgcactagaatgccagcactgcgttgatgcaaactcatatgcagctcaagctcaagactcctgatgagctgcttcagccactcactgatcagtgccttctcaggcaagaggcctggcgctcgcatgggttttggcatcttgggtctgtaaggcagttacacgttgcggatgtcaataagactgtgcaagagttttccttggctaactatgacgcagaggcaactgctgcttttaatcaaaaggtgtctcatgcttctacaaggaaagagaggcatccttctcatatattccccaagggcaccacctgn

SEQ ID NO: 6336 - DNA, 783 bp, Zea mays
  misc_feature (733)..(733): n is a, c, g, or t
  misc_feature (752)..(752): n is a, c, g, or t
  misc_feature (761)..(761): n is a, c, g, or t
  Peptide Sequence Number=SeqID_11322
  Probeset Number=SeqID_20739
gaagcgtcttgaccaacttaagaagaaggtcgtgaagcaagaaccaagcaataattcagaagcctaaccattttataacttcgatgatgaaggtcgcctgataatatacattgtcgaacaaagaaacaataagttccttatatttagaaaagtctgttgtgaaccaaaaacctacaaataaccatgaatcaccttgttgtcttgctggcattccctaatctcgaggaaaagattctttttagtggggtagattttgtaacaccctaaatccatcaattaaaagaaatctagtttaatcatttagtttctattagaaaggaaagtatttgtgttttcaaataatgaaatgggatataattaaaccgcacaatttcttgaatagataaaattttaccaagtgattgatgcattcatgctgaagcatatgttttgtttgatttggatttcaaaaccaattcttgaattttattttgtgagaaaagatctcattctataaaataataatgagctgtgaaaatattattcttggactacacattttgataggctaataatttttgtttgtaggtatttatgaaagttctgttttattgttttttattttagagctcagtttatttaaataatagaaattgcgtaaaaattatttattataaattttatttattaaatattattattagatttggttatacttttgaaattattaaaccatatttattaatgaatatgnatcctaagaaataaagaantaagtttcnaaaaaaaaaaaaaaaaaaaaaa

SEQ ID NO: 6337 - DNA, 783 bp, Zea mays
  misc_feature (23)..(23): n is a, c, g, or t
  misc_feature (32)..(32): n is a, c, g, or t
  misc_feature (51)..(51): n is a, c, g, or t
  Probeset Number=SeqID_20740
ttttttttttttttttttttttngaaacttanttctttatttcttaggatncatattcattaataaatatggtttaataatttcaaaagtataaccaaatctaataataatatttaataaataaaatttataataaataatttttacgcaatttctattatttaaataaactgagctctaaaataaaaaacaataaaacagaactttcataaatacctacaaacaaaaattattagcctatcaaaatgtgtagtccaagaataatattttcacagctcattattattttatagaatgagatcttttctcacaaaataaaattcaagaattggttttgaaatccaaatcaaacaaaacatatgcttcagcatgaatgcatcaatcacttggtaaaattttatctattcaagaaattgtgcggtttaattatatcccatttcattatttgaaaacacaaatactttcctttctaatagaaactaaatgattaaactagatttcttttaattgatggatttagggtgttacaaaatctaccccactaaaaagaatcttttcctcgagattagggaatgccagcaagacaacaaggtgattcatggttatttgtaggtttttggttcacaacagacttttctaaatataaggaacttattgtttctttgttcgacaatgtatattatcaggcgaccttcatcatcgaagttataaaatggttaggcttctgaattattgcttggttcttgcttcacgaccttcttcttaagttggtcaagacgcttc

SEQ ID NO: 6338 - DNA, 937 bp, Zea mays
  misc_feature (1)..(1): n is a, c, g, or t
  Peptide Sequence Number=SeqID_11323
  Probeset Number=SeqID_20741
ntgaactttgtttctagcagcatatgatgttagtgttgtgcaatgaaatgttacatgtttgtggaatgtatgatgaattgctttataatgatgcttgttgctattttattataataagggtctgttaatatgtaagttaatatatatttggttatttaatttaatatcaaaagttagaagctagtatgatgattcgataataatattataaaggttttaggtttgtagcgttaaacactcaaaatatgatttttcggttatatatatatttatgtacatagatctttgtatttagttgtgtggctcgcgagcctaatgagctggctcgagcttcctaacgagccgagccgagctagatgtttagctcgttagtataacgagccgagccgagctggctcgttacaataacgagctataacgagccgagccataacgagtcgagctggctcgatatccacccctagtcgtgacaattaggttgaagacgacgcgaaagtgatcgatcagtcgcgcagagtgtttcccaaaaactttattcgctctctcccaatgcgaaatcgttgagggggactgttctggagacctgctctcccgatcgcctatgcatgccaaatgatagggacgaagtagcgtacgcgtcgacacaatagacaggaagagacggggctagatacgttggttgttggtatgtttgatggcagcacatgtaggtaggtacttatataagaatatcacgtccgattcaaaaaatccgtaattgacagggaaccatatcaggtaaggatcgtaccagataaggacctgttgatccgatccacatctaataagccttgtcagataaggatttcggaattaacttatcaaataatgattctgtaataagcgacaaaacgaaaccacaaaaaatgattatggagtaagtggcaaaacaaaacta

SEQ ID NO: 6339 - DNA, 418 bp, Zea mays
  misc_feature (1)..(4): n is a, c, g, or t
  Probeset Number=SeqID_20742
nnnnaccttcaagccgaccagcctgatcagcgatgcccacaaggccggtttgttcgtccatatcttcaccttccgcaacgaagcgaagtacctagccggtgcctacaagggcaatccggcggccgaatacctggccttcttccgggcgggcgttgatggtgtatttacggacttcacgccgacggccgttgcggcccgaaacacctaccttaaagaagtcgcgcgctaaacagtcatcaaggtaaatggcgggcttctcgggcgcgctatagaagatacaattttatataccgcgcgtatgacacgatatatcttttatatagtgccacctaaataaaatacactgcgcgctttatacaacgtgactagtgaaaaaccctggtgtccccaaattaatctcgtagcacaaaaaaaaaaa

SEQ ID NO: 6340 - DNA, 418 bp, Zea mays
  misc_feature (415)..(418): n is a, c, g, or t
  Peptide Sequence Number=SeqID_11324
  Probeset Number=SeqID_20743
tttttttttttgtgctacgagattaatttggggacaccagggtttttcactagtcacgttgtataaagcgcgcagtgtattttatttaggtggcactatataaaagatatatcgtgtcatacgcgcggtatataaaattgtatcttctatagcgcgcccgagaagcccgccatttaccttgatgactgtttagcgcgcgacttctttaaggtaggtgtttcgggccgcaacggccgtcggcgtgaagtccgtaaatacaccatcaacgcccgcccggaagaaggccaggtattcggccgccggattgcccttgtaggcaccggctaggtacttcgcttcgttgcggaaggtgaagatatggacgaacaaaccggccttgtgggcatcgctgatcaggctggtcggcttgaaggtnnnn

SEQ ID NO: 6341 - DNA, 716 bp, Zea mays
  misc_feature (1)..(6): n is a, c, g, or t
  misc_feature (714)..(716): n is a, c, g, or t
  Peptide Sequence Number=SeqID_11325
  Probeset Number=SeqID_20744
nnnnnnggccagggtcacgttgaagccggcctcgtaggcctggcgcgcggtggactccacgccggtcccggtagcaacgccggtgatcaccacttgggtcacgccgagtgctttgagttgcgcctcaagatcggtgctggcgaaggcgccccaggtgcgtttggtcaccccaatgtcgccgggttgctgatcgagttcgggcaacaggtcggcccatcctggtggaaacacatcactgcgccgtggccgctcggtgcgcccgggggcgaagcctgtgacgttgaccagcaccaccggcatgccgcgctcgcggaaagcgtcgagcagtgcacgggagcgttccaccacgccgccgatggggtggatgaacgggtattcggcgatgcctttctgcaagtccacgatgatcagcgcggtgttgggatccagcaaggtgacggccatggaatgtcctcgaacgggtagggcggttcagaaatcagcgaggcgctccagcagctttaccgctgccgcgagttcagcttgctcttcggcagacagttgctcctgcagcgcccgcagcagccaatcgtccttggctgcgcggctggcgatgaggtgtttacgaaagccgggagtcagctcgatcagggtttggcgcccatcgctggggtcgggtttgcccctgatcgctttcatcgtttccagcccggccacggtgatgcgcatggactnnn

SEQ ID NO: 6342 - DNA, 716 bp, Zea mays
  misc_feature (1)..(3): n is a, c, g, or t
  misc_feature (711)..(716): n is a, c, g, or t
  Peptide Sequence Number=SeqID_11326
  Probeset Number=SeqID_20745
nnnagtccatgcgcatcaccgtggccgggctggaaacgatgaaagcgatcaggggcaaacccgaccccagcgatgggcgccaaaccctgatcgagctgactcccggctttcgtaaacacctcatcgccagccgcgcagccaaggacgattggctgctgcgggcgctgcaggagcaactgtctgccgaagagcaagctgaactcgcggcagcggtaaagctgctggagcgcctcgctgatttctgaaccgccctacccgttcgaggacattccatggccgtcaccttgctggatcccaacaccgcgctgatcatcgtggacttgcagaaaggcatcgccgaatacccgttcatccaccccatcggcggcgtggtggaacgctcccgtgcactgctcgacgctttccgcgagcgcggcatgccggtggtgctggtcaacgtcacaggcttcgcccccgggcgcaccgagcggccacggcgcagtgatgtgtttccaccaggatgggccgacctgttgcccgaactcgatcagcaacccggcgacattggggtgaccaaacgcacctggggcgccttcgccagcaccgatcttgaggcgcaactcaaagcactcggcgtgacccaagtggtgatcaccggcgttgctaccgggaccggcgtggagtccaccgcgcgccaggcctacgaggccggcttcaacgtgaccctggccnnnnnn

SEQ ID NO: 6343 - DNA, 710 bp, Zea mays
  misc_feature (1)..(104): n is a, c, g, or t
  misc_feature (704)..(710): n is a, c, g, or t
  Peptide Sequence Number=SeqID_11327
  Probeset Number=SeqID_20746
nnnnnnnnnnnnnnnnnnnnnnnnnnnnnnnnnnnnnnnnnnnnnnnnnnnnnnnnnnnnnnnnnnnnnnnnnnnnnnnnnnnnnnnnnnnnnnnnnnnnnnnnaagtgaaagccgttgaccgggtttccatcgatatccaggacggcgagttcttttccatgctcggcccttcaggctcgggcaaaaccacgtgcctgcgcctgatcgccgggttcgagcaaccgagtgccggctccatccgtattcacggcgaagaagctgccggtttgccgccctaccagcgcgacgtgaacaccgtgttccaggattacgcgctgttcccccacatgaacgtgcgggacaacgtggcctacggcctcaaggtcaaaggcgtgggcaagaccgaacgtctcaaccgcgctgaagaagccctcggtatggtcgccctgggcggctacggcgaccgcaagccggtgcaactctccggtggccagcgtcaacgggtggcattggcccgcgcactggtcaatcgtccgcgcgtattgctgctggatgagcccctcggcgccctcgacctgaagctgcgcgaacagatgcaaagcgagctgaagaagctgcaacgccaactcggcatcacgttcattttcgtcacccacgaccagactgaggcgctgtcgatgtccgaccgcgtggcggtgttcaacaagggccgcatcgaacagnnnnnnn

SEQ ID NO: 6344 - DNA, 760 bp, Zea mays
  misc_feature (76)..(78): n is a, c, g, or t
  misc_feature (82)..(84): n is a, c, g, or t
  misc_feature (760)..(760): n is a, c, g, or t
  Peptide Sequence Number=SeqID_11328
  Probeset Number=SeqID_20747
atttggcgctgataagactcgagtggaggcggcaagcgaggccaccagtgttcaaaaactgtgaaaattcccaccnnncccnnnctctctcgcgcgtccgcgcccgcgcccgcggcctcgttcaatccgccagcgctcccccgccccccggtggtagcgggctctacggcagcgctcctctccggttcccctgcgctccgcgtcttcatctgtggcggccgacgctccgtcggtgtctcgtcggacggagcgagcggagctagggttccgtttcatgctcaggatcggcgagatctagggtctcgatttcagggtgattgtactggatagctgctgctgatattgcaagacaatgaaagctcatcagcagaagggtaatgcatctggcacaggagcaaagaccaaatcttttttttgaaaaaatacaaagcctgaaagttgggtgcccctattcaaacaaatcctccgggcaatggggcttggcaaagcgaaaaaagggtctccccccttttgaaatccctaccccaaaaggcaagatatgccctccaaagacctggggggtttttattggaaagccccccaaaacgggggagcctaaagttgtgctggctcgggccaccttaaaacccctctggggaaagaacaaaaagtctaccacctttttccccctttaaagtgagaacctccttcgcaaggaggatttacggccaaaaaaaaaaaacaaccccaccccgtctacccctgggaatggcgccctttn

SEQ ID NO: 6345 - DNA, 776 bp, Zea mays
  misc_feature (1)..(175): n is a, c, g, or t
  misc_feature (736)..(738): n is a, c, g, or t
  misc_feature (772)..(776): n is a, c, g, or t
  Probeset Number=SeqID_20748
nnnnnnnnnnnnnnnnnnnnnnnnnnnnnnnnnnnnnnnnnnnnnnnnnnnnnnnnnnnnnnnnnnnnnnnnnnnnnnnnnnnnnnnnnnnnnnnnnnnnnnnnnnnnnnnnnnnnnnnnnnnnnnnnnnnnnnnnnnnnnnnnnnnnnnnnnnnnnnnnnnnnnnnnnnnnnnnaggataagtaatgaccggcgctcagaagtggttgccaccttattcgacccctaataatcatttcccctcaactaattttaagattcaaggtcccaatcgctctgcccacggtgatagtgcgatcaacggataacctgaggcgttcccggtgatctaccccagtctagtgcaattggttgggtccatgagcttcaaggacatatcagagtactgaaacaaaggaacagagggtgggaatggacctgtaacgcgctggccatggtgagagtctttcacggcagcggaaaaccgatttgggggaagtgagcaattcagaggctcaggtgaacaattggaggctgtaacatcacaaaatcccacccaagatttgaaaccctaacctcctaaattcctcccccccttagtttacctttctcccttaaccctacccttagaaccccttctcatgtgcatacacttgaaataattagagcacctcacatagactatgtttctcactcaagatcacttagaaaatatttttggtctccaaagaaaaaaaaacaaaaagaaaaaaaaatnnnaaaaggagaagaaaggaattagaattagaaaaannnnn

SEQ ID NO: 6346 - DNA, 719 bp, Zea mays
  misc_feature (324)..(324): n is a, c, g, or t
  misc_feature (479)..(481): n is a, c, g, or t
  misc_feature (497)..(499): n is a, c, g, or t
  misc_feature (719)..(719): n is a, c, g, or t
  Peptide Sequence Number=SeqID_11329
  Probeset Number=SeqID_20749
aaaaagaaagggcgtgggtggtctccagaggcgtcttcctcctgttcatcctcggcccgcgccgctgtgtccatggtccatgggccgcctccctcgcgctcccccgcacagtacggtcctctgggaggtcgccttcggtcgtggcccagggtgtcacgcgcgacgagtcggcgcgtggtggagggtcgtcttctgctgcttctggctggattcctgggctattcaacagagaaagagggagcaaaaaatggtggtccaaggaagcaagctaatccgaaagatagcaagtgaagcgtttggccgggcgtttgggtggtgcccganagacaggcgaatttctgggtgatcaatgctggaatatggattctggaattggagatagcctttcttttggttgatgtattgaatcagggccttttgtgtttactgctctcttctgcagatcatcagtgtcgatctcagtgtgatggcatcctgtnnngtgaaaggactgcttnnnagtaaacactactgcccttggttactctaaagacggacatgttcttaggttcatcgcagtttgtaatccagtacatgattaattgaagactagaaattcctagcgtaaagctctgctgagagcgtttgtcctggctgttcgcctgattgttttattgactgtagctcaagtgtctgaccttatctggaaaaatatggtgacggaaaatggtcttggagtn

SEQ ID NO: 6347 - DNA, 673 bp, Zea mays
  misc_feature (1)..(1): n is a, c, g, or t
  misc_feature (96)..(96): n is a, c, g, or t
  misc_feature (119)..(119): n is a, c, g, or t
  Probeset Number=SeqID_20750
ncagactcgctttgggcaaccggagtctacgctactcgaggcagtgacccttcgggtgctcccaaaccgcccagtaacagtggcggagaataaganggagtgtcaccgtcataactggnggaaagtagcaaccttgaagcgacagttggtggatactggccattgtcagcagagcagagtgaatttgaagcctatgaaaagagaagccaaagaagccaaatgtaaagccaaagaagaggccagaggcggagccaatggtagagacgccgctggcaaagctgcggccaggaagactggaacaagtaagtcaacaaaagaagatgccagagctgtggaaagtgctgtcgacaacacgggagaatatagtgccactgtttgtaacaccgatgctggatacgaggatgcggtcgcggacagcgagggaggagccacggatgcggaggctaactatgatgtcgagagtgccagacgcaaaggagcggggggcggacgctgccggccgtcaatgagttggtgctgtaataagaccgtagctgtatatgaagaataatgatattatataggtcctgtcatatcatggattgtgtctctgatgagtatattgtataatatgttatctgggctttggtggcctcggccgttaggcttctgcctaaccccgggtgattttgcg

SEQ ID NO: 6348 - DNA, 673 bp, Zea mays
  misc_feature (673)..(673): n is a, c, g, or t
  Peptide Sequence Number=SeqID_11330
  Probeset Number=SeqID_20751
atagggtaaaccaaaagctacaagacagacagtaacgccgtactaattaagttagattagtatccccgctaattcaaataacatcaacccagatcataataatggaacagcaaccggtacctatatcatggcttcgcaaagggacacatactggataattttagctaccatcccaacgggcttatgcgcaaagtaattagctctataaactaggctatccccgatatatagcaaagcataatccggcggtatcaggtacatagactatctactacctaccccaccagaatgggccgcactctattactatccctagtacggcttattcaataccgactttacccaacacttattcttaccactactcgccattggccggcaaccatccgttcgaactgtcgcttcaaggttgctactttcccccagttatgacggtgacactccttcttattctccgccactgttactggggcggtttgggacgcacccggaagggtcactggcctcgaagtagccgtagactgcgggttgcgcgcaaaggccggagttctgtataaggttatataatagatcacttccaactagaaacgcgaaacttgccccgcttgaagcacgcactgaatgtataggaaggctcggctctgtatgctttctgggttacgtcccaaattgn

SEQ ID NO: 6349 - DNA, 1269 bp, Zea mays
  misc_feature (1)..(5): n is a, c, g, or t
  misc_feature (750)..(753): n is a, c, g, or t
  misc_feature (808)..(810): n is a, c, g, or t
  misc_feature (816)..(817): n is a, c, g, or t
  misc_feature (820)..(821): n is a, c, g, or t
  misc_feature (834)..(838): n is a, c, g, or t
  misc_feature (849)..(853): n is a, c, g, or t
  misc_feature (855)..(855): n is a, c, g, or t
  misc_feature (857)..(862): n is a, c, g, or t
  misc_feature (864)..(875): n is a, c, g, or t
  misc_feature (877)..(878): n is a, c, g, or t
  misc_feature (880)..(883): n is a, c, g, or t
  misc_feature (888)..(889): n is a, c, g, or t
  misc_feature (892)..(898): n is a, c, g, or t
  misc_feature (904)..(912): n is a, c, g, or t
  misc_feature (914)..(1269): n is a, c, g, or t
  Probeset Number=SeqID_20752
nnnnngtagtactggtaggtgcgggcatcatgagtgccaccctcgccgtactgctcaaagagctcgaccccggcctcaagctggaagtcgttgagctgatggattcgggtgccgcggaaagttccaacccgtggaacaacgccggtaccggccacgccgggctgtgtgagctgaactacacaccgcaggccgctgacggctccatcgacatcaagaaagctgtgcacatcaacacccaattcgaggtgtcgaagcagttctgggcttacttgaccaagaaaggcacctttggctcgtccaagtcctttatcagccccgtgccgcacctgagtttcgtgcagggcgagaaaggcgtgtcgttcctcaagaagcgttttgaaaccctcagccagcaccacgcgttctcggacatgcactacaccgaagaccgcagcgaaatggccgagtggatgccgctgatgatgcccggccgccccctggacgaaaaaatcgctgccacccgcgtgatgaacggcaccgacgtcaacttcggcgccctgaccaaccaactgctctcgcacctgaccagcgcaccggatgcccaggtcaagtacagcaagcgcgtcaccggcctcaagcgcaacggcgccggctggaccgtgagcatcaaggacgtcaacagcggcaactcccgtgatgtggacgccaagttcgtgttcctcggcgccggtggcgcggccctgccgctgctgcaagcctcgggcatcgaannnngcaaaggcttcggcggtttccccgtaagcggccagtggctgcgttgcgacaaccnnngaagtnntcnngcaccaccaggcnnnnntctacagccannnnngncnnnnnntnnnnnnnnnnnntnncnnnncgcannctnnnnnnnccgatnnnnnnnnncnnnnnnnnnnnnnnnnnnnnnnnnnnnnnnnnnnnnnnnnnnnnnnnnnnnnnnnnnnnnnnnnnnnnnnnnnnnnnnnnnnnnnnnnnnnnnnnnnnnnnnnnnnnnnnnnnnnnnnnnnnnnnnnnnnnnnnnnnnnnnnnnnnnnnnnnnnnnnnnnnnnnnnnnnnnnnnnnnnnnnnnnnnnnnnnnnnnnnnnnnnnnnnnnnnnnnnnnnnnnnnnnnnnnnnnnnnnnnnnnnnnnnnnnnnnnnnnnnnnnnnnnnnnnnnnnnnnnnnnnnnnnnnnnnnnnnnnnnnnnnnnnnnnnnnnnnnnnnnnnnnnnnnnnnnnnnnnnnnnnnnnnnnnnnnnnnnnn

SEQ ID NO: 6350 - DNA, 625 bp, Zea mays
  misc_feature (236)..(236): n is a, c, g, or t
  misc_feature (298)..(298): n is a, c, g, or t
  misc_feature (361)..(361): n is a, c, g, or t
  misc_feature (380)..(380): n is a, c, g, or t
  misc_feature (452)..(452): n is a, c, g, or t
  misc_feature (455)..(455): n is a, c, g, or t
  misc_feature (475)..(475): n is a, c, g, or t
  misc_feature (492)..(492): n is a, c, g, or t
  misc_feature (501)..(503): n is a, c, g, or t
  misc_feature (505)..(506): n is a, c, g, or t
  misc_feature (508)..(508): n is a, c, g, or t
  misc_feature (510)..(513): n is a, c, g, or t
  misc_feature (515)..(515): n is a, c, g, or t
  misc_feature (519)..(519): n is a, c, g, or t
  misc_feature (525)..(525): n is a, c, g, or t
  misc_feature (527)..(528): n is a, c, g, or t
  misc_feature (530)..(530): n is a, c, g, or t
  misc_feature (532)..(533): n is a, c, g, or t
  misc_feature (535)..(535): n is a, c, g, or t
  misc_feature (547)..(547): n is a, c, g, or t
  misc_feature (549)..(549): n is a, c, g, or t
  misc_feature (552)..(553): n is a, c, g, or t
  misc_feature (555)..(555): n is a, c, g, or t
  misc_feature (557)..(557): n is a, c, g, or t
  misc_feature (564)..(564): n is a, c, g, or t
  misc_feature (566)..(567): n is a, c, g, or t
  misc_feature (570)..(571): n is a, c, g, or t
  misc_feature (581)..(581): n is a, c, g, or t
  misc_feature (585)..(585): n is a, c, g, or t
  misc_feature (589)..(589): n is a, c, g, or t
  misc_feature (591)..(591): n is a, c, g, or t
  misc_feature (596)..(596): n is a, c, g, or t
  misc_feature (601)..(625): n is a, c, g, or t
  Peptide Sequence Number=SeqID_11331
  Probeset Number=SeqID_20753
agctagccagtagctggctgaatggtcctcgcgcgagccatggtgatggagcacaggaagaagtcgaattatcttgttgccctcgtcttggcttcgctcttgctctccgccatggcaggagggcatcggaagaagcttctgaacaaagacgacgcatcagaatcaatggagacattggaatccacgccagccagctgcaggaaagacgacgaaaatggctgtggcggcccacgaanagaatttctcaggcaaggcgaagatgaacgactaccgggagctacgaactccttcgccggancatgggctaagccctccacttccaagggaacctacccttaaccttagcccaggccccaattanccctacctatattactttnggagggggctcgcttcgggcaagccccaaggtcccccctcccccccccggccccctcttaaaacaaagtcanaanccttggcccttaaataaaanttcccctggcttttctntccccccgnnncnntnannnngngganacgaantnncnanngncaccttgccccngnatnnanangtcacancnnggnngcacccatgntggntcanantttanccccnnnnnnnnnnnnnnnnnnnnnnnnn

SEQ ID NO: 6351 - DNA, 769 bp, Zea mays
  misc_feature (1)..(77): n is a, c, g, or t
  Probeset Number=SeqID_20754
nnnnnnnnnnnnnnnnnnnnnnnnnnnnnnnnnnnnnnnnnnnnnnnnnnnnnnnnnnnnnnnnnnnnnnnnnnnnnggaaaggaccagaagaatccagaggcgactccaggttcgtgggcgatgctgcgcgcgggagccaggcggctcctcgccccggggctccggcggctcggtctgggcaccggcgccgccggccaggcgggcccggccgccgcggcggcgtggatgagggcgcaccacgagcgggtggtggaccactacaacaacccgcggaacgccggttccttcgacaaggaggaccccaacgctcggtactggccctgctcggtgcgccggtcctgcgccgcccgccaggaggggggcggatcccgcgatcaacaaggactccgaaaccaatcgtccgaccgcctgctttcaagaccttttgggcttgcgcgttccgcccacaggcgtccctccgcccgtacgaacacatgaatcgggcggacagggaaataccccaagggccccccccctctccgcacacctccaagacatccctgacgatccggtacggccccctcggcccccctttcccaccagcaataacgctgcccttcgccccacaatgtttatgccaccacggtatgtccctctctaagacctcgcctcgtgtactaagcccccacccaaggccccatacatagggcccgcaaatagtggcgtcgccaccaacacaggcggcaccaacccaccctccactctgattgacgaaacgcgccccccct

SEQ ID NO: 6352 - DNA, 769 bp, Zea mays
  misc_feature (1)..(92): n is a, c, g, or t
  misc_feature (693)..(769): n is a, c, g, or t
  Peptide Sequence Number=SeqID_11332
  Probeset Number=SeqID_20755
nnnnnnnnnnnnnnnnnnnnnnnnnnnnnnnnnnnnnnnnnnnnnnnnnnnnnnnnnnnnnnnnnnnnnnnnnnnnnnnnnnnnnnnnnnnngccttgggtgggggcttagtacacgaggcgaggtcttagagagggacataccgtggtggcataaacattgtggggcgaagggcagcgttattgctggtgggaaaggggggccgagggggccgtaccggatcgtcagggatgtcttggaggtgtgcggagagggggggggcccttggggtatttccctgtccgcccgattcatgtgttcgtacgggcggagggacgcctgtgggcggaacgcgcaagcccaaaaggtcttgaaagcaggcggtcggacgattggtttcggagtccttgttgatcgcgggatccgcccccctcctggcgggcggcgcaggaccggcgcaccgagcagggccagtaccgagcgttggggtcctccttgtcgaaggaaccggcgttccgcgggttgttgtagtggtccaccacccgctcgtggtgcgccctcatccacgccgccgcggcggccgggcccgcctggccggcggcgccggtgcccagaccgagccgccggagccccggggcgaggagccgcctggctcccgcgcgcagcatcgcccacgaacctggagtcgcctctggattcttctggtcctttccnnnnnnnnnnnnnnnnnnnnnnnnnnnnnnnnnnnnnnnnnnnnnnnnnnnnnnnnnnnnnnnnnnnnnnnnnnnnn

SEQ ID NO: 6353 - DNA, 511 bp, Zea mays
  Probeset Number=SeqID_20756
actcatcccttcactgtccgtctgtccccggcgcgactcggaccgaatcttaggcccgcctgccgccgccgctggctccagatggaaacgagatactgaaactcaactttcacgagaggaaggagaacgcttgggaagattcaagctcagatgacatttctggtgttatcgcacgctttgatggtgctgaccttcaggtatatctggccgcgcttctgtcgtgatggggtcgcgcttcaagaagtccgggaagatgttcccagctggtgtcgtgtcccttgtatccctggtcatggtccgaggctacttccacggcattttgcgtagctcgcacgcctgattcacaacacctgcgcttcacattactattaggcaccgtttgttttgttggaattgaattccattttaataattataatttagacaaaactaattaagttcatatattatatatgtaacatatttgtatattatcttaaatcatatatttagactaaaaaaaaaaaaaaaa

SEQ ID NO: 6354 - DNA, 358 bp, Zea mays
  Peptide Sequence Number=SeqID_11333
  Probeset Number=SeqID_20757
ttttttttttttttttggatcgatcgctcagactctggctccctcgaccgaggaacgtggtagacggggcctctgcaccgggtcagctgcacggacgagcgagcagatctgtcgtccccggagcggcagcagcacgtcacggtgtggccgtggagctgaaccggactgccgctagatatccgacaaggcaggatcgcacgcgctgggcgatggatgggtcatgggtcggcgccgacttgggctgcttggacggctccagcagctccgcgccgttgctgccgtacaccgtcaccacgccgctgccgtcggacgccatgggtttggttcgcttgtgcctagccttgtgtggaatggaatg

SEQ ID NO: 6355 - DNA, 606 bp, Zea mays
  misc_feature (564)..(564): n is a, c, g, or t
  misc_feature (601)..(606): n is a, c, g, or t
  Probeset Number=SeqID_20758
cggcacgaggagcggccatgaagtacgtgctggtgaccggaggggtggtgagcgggctcggcaagggcgtgacggccagcagcatcggcgtcgtgctcaaggcctgcggcctccgcgtcaccaccatcaagatcggtacccctcgtctcaaatgcgcttgcttggttgttgttagtacttcgtggccgacgaaatggaaatgcgcgcatgtttgctgaacactttgtgttatcggagaacaatcgggaatttgagcttggtgtcgcgctcttcttggtcccttcgatttcgtcgcctcaagcattaaatttcgatcgatgaatgcgcaagtaatacggatcttccaaagtggttgggaacttgtccttgttcttcttttctctatttttccccctacgtcttacgagtccgttaaagaatttagctgcccacataaatgatccaggtatgaaaagggtaagtgtaaacaaaattatgaaagatgtattttgacgaacgaaacgtaaatgaattgtatcataaggggttataatgaataaaatatattgggttatatgaagaagntttttaaaaaaaaaaaaaaaaaaaaaaaaaactcgannnnnn

SEQ ID NO: 6356 - DNA, 606 bp, Zea mays
  misc_feature (1)..(1): n is a, c, g, or t
  misc_feature (43)..(43): n is a, c, g, or t
  misc_feature (602)..(606): n is a, c, g, or t
  Peptide Sequence Number=SeqID_11334
  Probeset Number=SeqID_20759
ncgggctcgagttttttttttttttttttttttttttaaaaancttcttcatataacccaatatattttattcattataaccccttatgatacaattcatttacgtttcgttcgtcaaaatacatctttcataattttgtttacacttacccttttcatacctggatcatttatgtgggcagctaaattctttaacggactcgtaagacgtagggggaaaaatagagaaaagaagaacaaggacaagttcccaaccactttggaagatccgtattacttgcgcattcatcgatcgaaatttaatgcttgaggcgacgaaatcgaagggaccaagaagagcgcgacaccaagctcaaattcccgattgttctccgataacacaaagtgttcagcaaacatgcgcgcatttccatttcgtcggccacgaagtactaacaacaaccaagcaagcgcatttgagacgaggggtaccgatcttgatggtggtgacgcggaggccgcaggccttgagcacgacgccgatgctgctggccgtcacgcccttgccgagcccgctcaccacccctccggtcaccagcacgtacttcatggccgctcctcgnnnnn

SEQ ID NO: 6357 - DNA, 534 bp, Zea mays
  Probeset Number=SeqID_20760
ccgggctcgagttttttttttttttttttttcgctaaaaatctgaaccatgaatgtgcatgcatcaggccaaatacaaacattcaggtcacacacgtactgtaataataatgatatttataacagagacaggatcatcgaaaacacacacaacaacaacaacatgcgatggacgacgagatgcattgcatgcatggacatataatactacaccatatatatcaacgtacgtatactagcttggacaaattatttagcctgcagatggatcgatgggcgtgatcagaagcactggaagcccgaggggacgcgcctgccgcagtagttgacgaggaggctgaggtcttgggcgggtgcgacggcttgggcgccttgggtttgtcgcagtcgcaggctacctcgtcgtctggcactgacagcgagaggatgggcgtcacggcggtggagagcccagcagcagcgtgaggaggaacggctggagcttcttgctgctgccttccatggcggctgctgctgctgttattagagggcgtcg

SEQ ID NO: 6358 - DNA, 878 bp, Zea mays
  misc_feature (640)..(878): n is a, c, g, or t
  Peptide Sequence Number=SeqID_11335
  Probeset Number=SeqID_20761
aacacaacaacaacaaccatctccaacgcagcaagcagacacagggacaggcaggcagcgagtgcaaccgcgagagcgatcagcgatgggctccttcttctcgaccttagtgacgccccctccgcccgccgccgacgacccgaactgcgccgtggtggccgcgcactccaaggccacctacgacgagcagtgggcggcccacaagagcagcagcaagctgatggtgatcgacttctcggcgtcctggtgcgggccctgccgcttcatcgagccggccttcaaggagctggcctcccgcttcaccgatgccatcttcatcaaggtcgacgtcgacgagctcgcggaggtcgcaaggacatggaaggtagaggcgatgccaacgttcgtgctggtcaaggatgggaaggaggtaggccgtgtgacgagcggtcgttgcccccgtggacgcgctgaagctgggcgtgtgcgccaacttgctgaacgggctgatcaacgcgaccctggggaccccgcccaggaccccgtgctgcacgctgatccaggggctggcggacctggaggcggcggtgtgcctttgccccgtcctcagggccaaagttttggggatcaacctcaacctgcccatcaacctcagcctccnnnnnnnnnnnnnnnnnnnnnnnnnnnnnnnnnnnnnnnnnnnnnnnnnnnnnnnnnnnnnnnnnnnnnnnnnnnnnnnnnnnnnnnnnnnnnnnnnnnnnnnnnnnnnnnnnnnnnnnnnnnnnnnnnnnnnnnnnnnnnnnnnnnnnnnnnnnnnnnnnnnnnnnnnnnnnnnnnnnnnnnnnnnnnnnnnnnnnnnnnnnnnnnnnnnnnnnnnnnnnnnnnnnnnnnnnnnnnnn

SEQ ID NO: 6359 - DNA, 682 bp, Zea mays
  misc_feature (1)..(8): n is a, c, g, or t
  misc_feature (35)..(35): n is a, c, g, or t
  misc_feature (38)..(38): n is a, c, g, or t
  misc_feature (42)..(42): n is a, c, g, or t
  misc_feature (48)..(48): n is a, c, g, or t
  misc_feature (57)..(57): n is a, c, g, or t
  misc_feature (63)..(63): n is a, c, g, or t
  misc_feature (65)..(65): n is a, c, g, or t
  misc_feature (67)..(67): n is a, c, g, or t
  misc_feature (71)..(71): n is a, c, g, or t
  misc_feature (77)..(77): n is a, c, g, or t
  misc_feature (88)..(88): n is a, c, g, or t
  misc_feature (90)..(90): n is a, c, g, or t
  misc_feature (438)..(438): n is a, c, g, or t
  misc_feature (495)..(495): n is a, c, g, or t
  misc_feature (506)..(506): n is a, c, g, or t
  misc_feature (524)..(524): n is a, c, g, or t
  misc_feature (542)..(542): n is a, c, g, or t
  misc_feature (545)..(545): n is a, c, g, or t
  misc_feature (563)..(563): n is a, c, g, or t
  misc_feature (590)..(590): n is a, c, g, or t
  misc_feature (601)..(601): n is a, c, g, or t
  misc_feature (607)..(607): n is a, c, g, or t
  misc_feature (609)..(682): n is a, c, g, or t
  Peptide Sequence Number=SeqID_11336
  Probeset Number=SeqID_20762
nnnnnnnnagctccccgcggtggcgggcgctctanaantaangggatnccccccctncccggngnanaganagaganagagtcactantncccccccccccgctgggctgactcaaaatggcggttcccttaaggtgagatgggatgaagcttctttctgttcctcgtcctgaaagagtttctccttggcaaatagaacctgctgttagcccatctcctgtggaaccctcttccagtcagattcaagaggtctccgtttcaagtgttaatgcctcaccatctgatggtgtctactggaaacagagaagttgcttctaaagtcatggtagagtcgcaacaaaataatctcccaagggcccttgcacaatcaaggaaggacacaattggacagggtcccatacccggggataggcacttgatgtggaaaactggcctcangatcttaccatggtggtctttcagggaactggagcaacagaagaaaacaattattgnctgcccagacnaaaaccgaatgtcttggnagggttttgggaacgcanatnctaaaaaactcccggaanggttaccaatccaacttgggttctccnggcatttttcnaccacntnnnnnnnnnnnnnnnnnnnnnnnnnnnnnnnnnnnnnnnnnnnnnnnnnnnnnnnnnnnnnnnnnnnnnnnnnn

SEQ ID NO: 6360 - DNA, 750 bp, Zea mays
  misc_feature (45)..(45): n is a, c, g, or t
  misc_feature (47)..(47): n is a, c, g, or t
  misc_feature (51)..(52): n is a, c, g, or t
  misc_feature (74)..(76): n is a, c, g, or t
  misc_feature (127)..(129): n is a, c, g, or t
  misc_feature (750)..(750): n is a, c, g, or t
  Probeset Number=SeqID_20763
cggacacgacgcccctatcgctcgctgcttccggtgccgcgtgtnancgtnngcaaagctcaccctcatcgccnnngccaccgccgccgccgctcaacccatcccgccggccccgccctgttccatnnncgccaagtgggcccagaagaccgtcgtcatccctgcccagcgccgcggctgccacctcatcacccccaaggttttgagggagattgagggcgatctctccgggttcaagtgcggtcttggcgcatctgttcctgcagcacacaagtgcttccctgaccatcaatgaaaactatgactctgatgtgcaggctgacaccgaaacattccttaacaaaattgtcccagaggtctgctccttggaagcatactatggaaggacctgatgacatgccagcacatattaaatcttcaatgtttggttgttccctgacgattcctataactgatggacatctcaatacgggcacttggcaggtgagggaatggacatctgatattcaagcttagttcatgtatctcaatttgcattggtataccatgattagggcatatggctgtgcgaacataaaaaccatgccagccctcgcaaaattgtgattactctcagcggtgttgaacttgaagatcttatatgctgccaggaaatagggccaatgcattttggacctgaatgtgtttcagttaccatgtactatgttgagttgtaatgtatgctataaattccaataaattcatcgttan

SEQ ID NO: 6361 - DNA, 662 bp, Zea mays
  misc_feature (662)..(662): n is a, c, g, or t
  Peptide Sequence Number=SeqID_11337
  Probeset Number=SeqID_20764
ggccagggggcgggagttggttaacacgcacgacgaaccccccagggcggcggtccggcacgagccgcctaccgagcccctctttacaacaaccgtcgtgtggtggttgcttcttagtagtttgggtgaccctacctggttcaccctttaccaccggtggtgctggtgcctctttggtattttggctaatacccagtagttgctccattactaccagtggtggtgtgacctccttcctacattaggtagtgctagctagttagcccgttgctgctgcgggtagtagtacccgcctactattttggactgtattaaccggttggcccgttcctcctggtggtggtggtctctgcttactgctagctagttagcccgttgccgctggtggtagtacccgcctactactttggactgtgctcactggttggtccgttcctcccggtggtggtattctctgctttctcccttgggtaactctagcaggttggtcgacacttgctacatctggtagtactagtggtgtaaagtcgttgggtgcaaccgtcagtacaacccccgctttagttatcggtggtcacaccacctttatcgcccttgcgtggtaggtagtatcggtaggtggtcctaagcgcgttggtcctctagtttggggacacgcagtn

SEQ ID NO: 6362 - DNA, 643 bp, Zea mays
  misc_feature (1)..(28): n is a, c, g, or t
  misc_feature (598)..(598): n is a, c, g, or t
  misc_feature (608)..(608): n is a, c, g, or t
  misc_feature (643)..(643): n is a, c, g, or t
  Peptide Sequence Number=SeqID_11338
  Probeset Number=SeqID_20765
nnnnnnnnnnnnnnnnnnnnnnnnnnnngcgggagaacccccggacctcgaacacccgaaccacagtcacgtgagccgctaggcctggaacccctgcacgccctgctacgcagagtagccgtcgccctcctagggctcctggaccaaaccatggtaacgtgcgaaccgacccaagaagttcattgacccaagtttttcctctcggtaggaccaggtgggtaaggagactacgatccgcataccctttgtgcacctgcaggttccactattcaaggtccaggtcaccacgaaggtagaagaggtcgaggacagtcgatttacgaaggaagaagatattgtctccttcccgaaggccgagacgttcgagtaggattacgaggagatatctcaagttcccgataatctagaggaggagctattattccggatcgagagggggggtttgggttgttttgcgaggacgacgatccgctcgctggcgcgcacgacgaacggtgctgttgcggcccacgaaagtgctgtcggaacccatatggcgcatactgggttgaatgaaccaacttgtcactgttggggtccggcggcaacgacgaccggngcagctaatntcgggacggcggacgtcctggcgacgtccatggcn

SEQ ID NO: 6363 - DNA, 643 bp, Zea mays
  misc_feature (1)..(1): n is a, c, g, or t
  misc_feature (36)..(36): n is a, c, g, or t
  misc_feature (46)..(46): n is a, c, g, or t
  misc_feature (616)..(643): n is a, c, g, or t
  Probeset Number=SeqID_20766
ngccatggacgtcgccaggacgtccgccgtcccganattagctgcnccggtcgtcgttgccgccggaccccaacagtgacaagttggttcattcaacccagtatgcgccatatgggttccgacagcactttcgtgggccgcaacagcaccgttcgtcgtgcgcgccagcgagcggatcgtcgtcctcgcaaaacaacccaaaccccccctctcgatccggaataatagctcctcctctagattatcgggaacttgagatatctcctcgtaatcctactcgaacgtctcggccttcgggaaggagacaatatcttcttccttcgtaaatcgactgtcctcgacctcttctaccttcgtggtgacctggaccttgaatagtggaacctgcaggtgcacaaagggtatgcggatcgtagtctccttacccacctggtcctaccgagaggaaaaacttgggtcaatgaacttcttgggtcggttcgcacgttaccatggtttggtccaggagccctaggagggcgacggctactctgcgtagcagggcgtgcaggggttccaggcctagcggctcacgtgactgtggttcgggtgttcgaggtccgggggttctcccgcnnnnnnnnnnnnnnnnnnnnnnnnnnnn

SEQ ID NO: 6364 - DNA, 565 bp, Zea mays
  Peptide Sequence Number=SeqID_11339
  Probeset Number=SeqID_20767
ggggggggggggggggaaggcttcgggccagctccgccctaagtcatttttgccactacaaacgatcgaatactgaacgtagttggtcgtacgtttgagtagttctaatcttcgtccacactacagccaccagtcacactctatcaaggaccgacccccacactcgtttaccaccacccacatctcatccatcctcgcccacagagttcagctttgcccaccacattgctatccacttcgccaggttaatatatttaaaacaatagactggaagaactggaaatgattctggtaatgctaataataacattggtaacaataatgctaataataacaacaacagatgtaatccggatcgagagggggggtttgggttgttttgcgaggacgacgatccgctcgctggcgcgcacgacgaacggtgctgttgcggcccacgaaagtgctgtcggaacccatatggcgcatactgggttgaatgaaccaacttgtcactgttggggtccggcggcaacgacgaccggggcagctaatgtcgggacggcggacgtcctggcgacgtcca

SEQ ID NO: 6365 - DNA, 565 bp, Zea mays
  Probeset Number=SeqID_20768
tggacgtcgccaggacgtccgccgtcccgacattagctgccccggtcgtcgttgccgccggaccccaacagtgacaagttggttcattcaacccagtatgcgccatatgggttccgacagcactttcgtgggccgcaacagcaccgttcgtcgtgcgcgccagcgagcggatcgtcgtcctcgcaaaacaacccaaaccccccctctcgatccggattacatctgttgttgttattattagcattattgttaccaatgttattattagcattaccagaatcatttccagttcttccagtctattgttttaaatatattaacctggcgaagtggatagcaatgtggtgggcaaagctgaactctgtgggcgaggatggatgagatgtgggtggtggtaaacgagtgtgggggtcggtccttgatagagtgtgactggtggctgtagtgtggacgaagattagaactactcaaacgtacgaccaactacgttcagtattcgatcgtttgtagtggcaaaaatgacttagggcggagctggcccgaagccttcccccccccccccccc

SEQ ID NO: 6366 - DNA, 757 bp, Zea mays
  misc_feature (5)..(5): n is a, c, g, or t
  misc_feature (7)..(11): n is a, c, g, or t
  misc_feature (601)..(757): n is a, c, g, or t
  Peptide Sequence Number=SeqID_11340
  Probeset Number=SeqID_20769
ggtancnnnnngatgaagtccggtcgaccgaattttgtagttccttgattgttgcttccttagtcctttgtactgatcggcgctccggtcggctcctcgcgcttgcgggttccccgtccccaccccacgccgggggcaagagatggagaacggggtggcgctccggaagtggtttgaccgcggcgacgccggtcgtaccggttacatccccgctgcccagctccagggagtgatcgctgccggaaacctcaacttccccatctccgccgagcagcagatgattaggatgtatgacttcaatcggaatgtatccatgaagttcgaagagtttctggctcttataaattcctagagaaggtggaaaatgtgtttttccgccctggataggggtcgaggatttcttagtcttgaggaggcgtaccaggcagtaatcaaactgggcttctcgtgagattccccagccttctatactgtttgagagagctttgacgaaaccagaaagggtatgattcaattgattaaaactatatcactctggaatttttgggcagcccgcccgaaaccggttgaattcccttctatacaagtggccaggcagaannnnnnnnnnnnnnnnnnnnnnnnnnnnnnnnnnnnnnnnnnnnnnnnnnnnnnnnnnnnnnnnnnnnnnnnnnnnnnnnnnnnnnnnnnnnnnnnnnnnnnnnnnnnnnnnnnnnnnnnnnnnnnnnnnnnnnnnnnnnnnnnnnnnnnnnnnnnn

SEQ ID NO: 6367 - DNA, 757 bp, Zea mays
  misc_feature (1)..(157): n is a, c, g, or t
  misc_feature (747)..(751): n is a, c, g, or t
  misc_feature (753)..(753): n is a, c, g, or t
  Peptide Sequence Number=SeqID_11341
  Probeset Number=SeqID_20770
nnnnnnnnnnnnnnnnnnnnnnnnnnnnnnnnnnnnnnnnnnnnnnnnnnnnnnnnnnnnnnnnnnnnnnnnnnnnnnnnnnnnnnnnnnnnnnnnnnnnnnnnnnnnnnnnnnnnnnnnnnnnnnnnnnnnnnnnnnnnnnnnnnnnnnnnnnnnnttctgcctggccacttgtatagaagggaattcaaccggtttcgggcgggctgcccaaaaattccagagtgatatagttttaatcaattgaatcataccctttctggtttcgtcaaagctctctcaaacagtatagaaggctggggaatctcacgagaagcccagtttgattactgcctggtacgcctcctcaagactaagaaatcctcgacccctatccagggcggaaaaacacattttccaccttctctaggaatttataagagccagaaactcttcgaacttcatggatacattccgattgaagtcatacatcctaatcatctgctgctcggcggagatggggaagttgaggtttccggcagcgatcactccctggagctgggcagcggggatgtaaccggtacgaccggcgtcgccgcggtcaaaccacttccggagcgccaccccgttctccatctcttgcccccggcgtggggtggggacggggaacccgcaagcgcgaggagccgaccggagcgccgatcagtacaaaggactaaggaagcaacaatcaaggaactacaaaattcggtcgaccggacttcatcnnnnngntacc

SEQ ID NO: 6368 - DNA, 457 bp, Zea mays
  misc_feature (455)..(455): n is a, c, g, or t
  Peptide Sequence Number=SeqID_11342
  Probeset Number=SeqID_20771
gtgcctcttcctaatccatcgcagagcgccgccggcgggtagcgctactgctagaggagaggaagcggaaagggcggcggcggcgcttgtggtcagtcaaagatccaacctccggactcgcgatggggcggcggatcctcaacgatgctctgcgcacgatggtcaacgcagaccggcgggggaacgcgtcggcgcttctccgacccatctccggcgtcatggtctccttcctcaacatcatgaagtaccgagggtatatcaaaaaatttgaggtcattgatgagaatagagttgggaaaattagagtggagcttgatggacgtcttaaagattgcaaagctctcacctacaggcaagacctcaaagctaaggagatagatccgctctgccatggtgggcctgctatcatacgttatttataccagtgaaaattttccaaaaaaaaaaaaaaaaangc

SEQ ID NO: 6369 - DNA, 882 bp, Zea mays
  misc_feature (522)..(522): n is a, c, g, or t
  misc_feature (529)..(531): n is a, c, g, or t
  misc_feature (535)..(542): n is a, c, g, or t
  misc_feature (547)..(593): n is a, c, g, or t
  misc_feature (604)..(606): n is a, c, g, or t
  misc_feature (620)..(622): n is a, c, g, or t
  misc_feature (882)..(882): n is a, c, g, or t
  Peptide Sequence Number=SeqID_11343
  Probeset Number=SeqID_20772
tacggagggtgccccatcgtggacaacgacgtgaccatcccgcaggacgcctagttgtccctcctccacaacgtcactacctcttcttcttggtcggctgctccttcagcctggaggctgtcagtcttctctcttggataaatggaatgccgtataaaattgtctcttcttcaagcaagagatggagctttctttggtcgggctcaaaaatgctaggaaaacatcacttgcagcagctcgcagcgacacccccgcctcctcatcatggaagctacaagaacactttgagtaggtgaagaggatttgcgacactaccacattgtctttggccatgcatcatctcagtgataagataacaatccaacttgatatttcaaaattgactgccaagctacggtaagggaaggtagactcaagtgcattgacaccaaaggagaagtatgaaacttggaaggagattaaaattatgagtttcagaaaaacagtttctcccatgtggggggcaacatcagcttatcttgnatggtannntttnnnnnnnnggtannnnnnnnnnnnnnnnnnnnnnnnnnnnnnnnnnnnnnnnnnnnnnnatccccttgtnnncaaatgaaccctcnnngcctctaacatccaccacctcgtggtccatataagggctttttcggttattcctgtccatgtggattagatgagattgtgaaaaaatatgaaggattttaacttgtttgagatttaaacccacccaatcccattcaatccacatggattgagagaaaagcgaacaaaccctaaatagaagaaaaacaaattactattggattaagttgtaaattttgatatgtttttatggaccttcaagtggtgtatgtgagtggctgn

SEQ ID NO: 6370 - DNA, 828 bp, Zea mays
  misc_feature (1)..(6): n is a, c, g, or t
  misc_feature (624)..(629): n is a, c, g, or t
  misc_feature (647)..(650): n is a, c, g, or t
  misc_feature (664)..(664): n is a, c, g, or t
  misc_feature (673)..(675): n is a, c, g, or t
  misc_feature (678)..(680): n is a, c, g, or t
  misc_feature (685)..(686): n is a, c, g, or t
  misc_feature (697)..(697): n is a, c, g, or t
  misc_feature (699)..(699): n is a, c, g, or t
  misc_feature (701)..(703): n is a, c, g, or t
  misc_feature (708)..(709): n is a, c, g, or t
  misc_feature (718)..(718): n is a, c, g, or t
  misc_feature (723)..(725): n is a, c, g, or t
  misc_feature (736)..(738): n is a, c, g, or t
  misc_feature (744)..(746): n is a, c, g, or t
  misc_feature (762)..(765): n is a, c, g, or t
  misc_feature (773)..(783): n is a, c, g, or t
  misc_feature (790)..(790): n is a, c, g, or t
  misc_feature (792)..(796): n is a, c, g, or t
  misc_feature (798)..(799): n is a, c, g, or t
  misc_feature (821)..(828): n is a, c, g, or t
  Peptide Sequence Number=SeqID_11344
  Probeset Number=SeqID_20773
nnnnnntgcattcaaaactcctatagatgacgaatcccatctctccctcttttcccggacatcgatcccagtctcttcttcaagcaagagatggagctttccttggtcgggctccaaaatgctaggaaaacatcacttgcagcagctcgcagcgacacccccgcctcctcatcatggaagctacaagaacactttgagtaggtgaagaggatttgcgacactaccacattgtctttggccatgcatcatctcagtgataagataacaagccaactagatatttcaaaattgactgacaagctacagtaagggaaggtagactcaactgcattgacaccaaaggagaagtatgaaacttggaaggagattaaaattatgagtttcagaaaaatagtttctccaatgtgggcaatgacattgcttagcttgtatgttagagttcatgtcaccatattaggcagaatctgacgcctttaatgtaaatggacacaagaccttcgttgcaatggatgattatcttgtcactgacaaaatcactgcattcatagtgcaaacggtacatgcagcaactgaagtcccgaaagactagcaacaaaaagactgtatgacatgtaccggaggggnnnnnnaagggaaatgttaggttnnnncaaggaggttgttnatgatttcnnncannnccttnntttaaatgttngncnnnccgtnnagggttttngttannncccttgtaatnnncgttannncccctgtgtaatgggnnnngcccaatnnnnnnnnnnnattaatntnnnnncnncccctggttagggtatgggttnnnnnnnn

SEQ ID NO: 6371 - DNA, 918 bp, Zea mays
  misc_feature (55)..(57): n is a, c, g, or t
  misc_feature (66)..(71): n is a, c, g, or t
  misc_feature (73)..(75): n is a, c, g, or t
  misc_feature (80)..(82): n is a, c, g, or t
  misc_feature (147)..(148): n is a, c, g, or t
  misc_feature (523)..(523): n is a, c, g, or t
  misc_feature (680)..(918): n is a, c, g, or t
  Peptide Sequence Number=SeqID_11345
  Probeset Number=SeqID_20774
gcagattgcacaaatgccgtcgaccttgatccaaagagcgtgaaggcctatttannnaggggcacnnnnnngnnnatgcnnngttatacaaggatgctggtgatgatttgaaccatgcccttgttctagaaccaatgaacaagacgnntggtgttgccattaacaggataaagaaattatttccgtagatatgatcacagcatgggctagagggaacagatcttctcagtgatcacgtttgcctattatggcattgttcttctgacatcagagctcagtaatggaaacaggatatgtgccaaagaggatgttgaatcagttcattcaaccaatgcaagcctatataagaatgttttcatatctagttttgcaggtcggttactggtgtgcatagtatggttatcataactaccttcaaaagcatgtgatgagttgctgaccaatgctgccatgttttctcgagaacagagatcccagggtcatttccgcattgcatgatcgtggatagatttcatcggaagcnagtcttgaatgggcaactacacactagctagaagtgctaacatccactgtggttctccctcttagatatactaacgctatttgagttgggaaaactgttattgatgatatggcatacagtatccatggtgagcatatatattttgatacaccaaacnnnnnnnnnnnnnnnnnnnnnnnnnnnnnnnnnnnnnnnnnnnnnnnnnnnnnnnnnnnnnnnnnnnnnnnnnnnnnnnnnnnnnnnnnnnnnnnnnnnnnnnnnnnnnnnnnnnnnnnnnnnnnnnnnnnnnnnnnnnnnnnnnnnnnnnnnnnnnnnnnnnnnnnnnnnnnnnnnnnnnnnnnnnnnnnnnnnnnnnnnnnnnnnnnnnnnnnnnnnnnnnnnnnnnnnnnnnnnnn

SEQ ID NO: 6372 - DNA, 487 bp, Zea mays
  misc_feature (1)..(1): n is a, c, g, or t
  misc_feature (13)..(17): n is a, c, g, or t
  misc_feature (20)..(31): n is a, c, g, or t
  misc_feature (34)..(34): n is a, c, g, or t
  misc_feature (36)..(42): n is a, c, g, or t
  misc_feature (44)..(49): n is a, c, g, or t
  misc_feature (51)..(57): n is a, c, g, or t
  misc_feature (59)..(66): n is a, c, g, or t
  misc_feature (68)..(73): n is a, c, g, or t
  misc_feature (75)..(78): n is a, c, g, or t
  misc_feature (103)..(107): n is a, c, g, or t
  misc_feature (117)..(125): n is a, c, g, or t
  misc_feature (129)..(129): n is a, c, g, or t
  misc_feature (131)..(134): n is a, c, g, or t
  misc_feature (166)..(180): n is a, c, g, or t
  misc_feature (184)..(186): n is a, c, g, or t
  Peptide Sequence Number=SeqID_11346
  Probeset Number=SeqID_20775
nccacgctggatnnnnnggnnnnnnnnnnnngcntnnnnnnncnnnnnntnnnnnnncnnnnnnnncnnnnnntnnnngcttgcctcaaaacccctggcgccnnnnnaaaaccctannnnnnnnnttcntnnnnctggccgggcggagcagacgagcctgagcccnnnnnnnnnnnnnnngggnnnctcaggggccctttacctctgggtaccaatttggtcatcgcgggcagaaccctggagtaggggaagaagaattcccacactaccacccggtctttggcgatgcatcatctcagtgataagataacaatccaacttgatatttcaaaattgactgccaagctacggtaagggaaggtagactcaagtgcattgacaccaaaggagaagtatgaaacttggaaggagattaaaattatgagtttcagaaaaacagtttctccaatgtgggcaatgacattgcttagcttgtatgttagagttc

SEQ ID NO: 6373 - DNA, 597 bp, Zea mays
  misc_feature (109)..(109): n is a, c, g, or t
  misc_feature (184)..(184): n is a, c, g, or t
  misc_feature (198)..(198): n is a, c, g, or t
  misc_feature (215)..(215): n is a, c, g, or t
  misc_feature (275)..(275): n is a, c, g, or t
  misc_feature (278)..(278): n is a, c, g, or t
  misc_feature (302)..(302): n is a, c, g, or t
  misc_feature (308)..(308): n is a, c, g, or t
  misc_feature (320)..(320): n is a, c, g, or t
  misc_feature (329)..(329): n is a, c, g, or t
  misc_feature (344)..(344): n is a, c, g, or t
  misc_feature (354)..(354): n is a, c, g, or t
  misc_feature (360)..(361): n is a, c, g, or t
  misc_feature (366)..(366): n is a, c, g, or t
  misc_feature (368)..(368): n is a, c, g, or t
  misc_feature (385)..(386): n is a, c, g, or t
  misc_feature (390)..(390): n is a, c, g, or t
  misc_feature (393)..(393): n is a, c, g, or t
  misc_feature (399)..(399): n is a, c, g, or t
  misc_feature (408)..(408): n is a, c, g, or t
  misc_feature (410)..(410): n is a, c, g, or t
  misc_feature (413)..(413): n is a, c, g, or t
  misc_feature (420)..(421): n is a, c, g, or t
  misc_feature (430)..(430): n is a, c, g, or t
  misc_feature (433)..(433): n is a, c, g, or t
  misc_feature (444)..(445): n is a, c, g, or t
  misc_feature (447)..(448): n is a, c, g, or t
  misc_feature (451)..(451): n is a, c, g, or t
  misc_feature (456)..(456): n is a, c, g, or t
  misc_feature (458)..(459): n is a, c, g, or t
  misc_feature (462)..(464): n is a, c, g, or t
  misc_feature (470)..(470): n is a, c, g, or t
  misc_feature (479)..(479): n is a, c, g, or t
  misc_feature (483)..(483): n is a, c, g, or t
  misc_feature (485)..(485): n is a, c, g, or t
  misc_feature (491)..(491): n is a, c, g, or t
  misc_feature (494)..(495): n is a, c, g, or t
  misc_feature (497)..(497): n is a, c, g, or t
  misc_feature (500)..(500): n is a, c, g, or t
  misc_feature (502)..(502): n is a, c, g, or t
  misc_feature (514)..(514): n is a, c, g, or t
  misc_feature (517)..(517): n is a, c, g, or t
  misc_feature (525)..(529): n is a, c, g, or t
  misc_feature (533)..(533): n is a, c, g, or t
  misc_feature (537)..(537): n is a, c, g, or t
  misc_feature (546)..(546): n is a, c, g, or t
  misc_feature (562)..(562): n is a, c, g, or t
  misc_feature (568)..(568): n is a, c, g, or t
  misc_feature (575)..(576): n is a, c, g, or t
  misc_feature (578)..(578): n is a, c, g, or t
  misc_feature (589)..(589): n is a, c, g, or t
  misc_feature (591)..(591): n is a, c, g, or t
  misc_feature (594)..(594): n is a, c, g, or t
  Peptide Sequence Number=SeqID_11347
  Probeset Number=SeqID_20776
gagagagagagagagagagcttactcccccccccccctttgaacaacgtgaagaggattgtgttggaagcggatggctatcaaccctatttgatatctccagagaaggntttacgttccttaataaaaggagttcttgaaatgcccaagggagccatcaccgactctgtgtttgaagaggtacnccgagttttgttanacatagtaaaatgctgntgcaaatgctacccccagggacttagggaaagataccctcccattccaggcgggggaggnccntttgcaatttgcccttctaatgcntttaanatggccttctcnaaaaggggntcgccaaaaaaaagntggggggggntgggcnnctttngnttaaaattgggaagccnnagcnttnttggcnccctccacnanaantttcccnncccgaattnagnaaccagaaggnncnnaanggcanannacnnncggccngcgccggantgantntgaaanaannanacncnctcctgccccanganaggccagnnnnncaanaggnttttccccnagatggaacccggggncttttnaatgccnntntaacgggggcncncgntgg

SEQ ID NO: 6374 - DNA, 501 bp, Zea mays
  misc_feature (3)..(3): n is a, c, g, or t
  misc_feature (25)..(25): n is a, c, g, or t
  Peptide Sequence Number=SeqID_11348
  Probeset Number=SeqID_20777
gcncgagaccattacctagaacatntaatcgaaaaatctcctttctcccgtgcgcttcccagcctcgctccctctggcgctgtgggcccgacatgcaggcgtggttctcctccggctccgggccctcctcctcgtctgcggcgtcctcatcgcagccgtcgctgctcgcagagtggaactcctacgctgccgcccgctccgctgaggacgcgggcgatggcttcgggatcgacatcgaggcggccgtccgctccgccaacgaccgcgtcgccggcaccttcggcgtggtctcaaaaggtgttaaagggtttccaggcagaggagaccacaacggaaatatgacggcgtgagtttgagatcgtcgttaacggaaatatgacggcgtgagtttgagatcgtcgttacttgttaatagagttgtcatgttcattttagagtgttggctatacccagcttttctaaaaaaaaaaaaaaaaaaaaaaaagaaaaaaaaaaaaaaaa

SEQ ID NO: 6375 - DNA, 659 bp, Zea mays
  misc_feature (659)..(659): n is a, c, g, or t
  Peptide Sequence Number=SeqID_11349
  Probeset Number=SeqID_20778
agcgggctcacgggggggcgctctgactgggatccccgggctgcggaattcggcacgaggttgagcacgccggcgtcgcgggcctgcctgcgggagtactccagggggcttcgccggaccatggggatcgcttccgtcgtgtttccaagcttcgagagtgtgtggtggcgaggtaattcctcgtcggtgtatacacggcgtcgccagtccgccatgtgatgtcgccaaagccctgcactgcatgatttctggttgtccccactatactcagtgctcaggaggtgatgctggcaacatggaggactttgaggagttccaggactacgacgagttctagtttttcttagtggcaaacccccagtcagctgcctgtgaaggccttatcttctacgtttcgtattccacactttgatattaatgttaatgactttggctatgtattagactctgtggatgtctcggacatcttattgtaataaattacctttccgctatttactttgagcattgtgtgatgatgtccaattatgtaatcgctatatacgtgagtttctgatcctgacacgtacatggctcgcattcggtctgccttccaaaaccgggtgtgacacttctattacctaataatggtctttattatcactattcaaaaaaaacan

SEQ ID NO: 6376 - DNA, 487 bp, Zea mays
  Probeset Number=SeqID_20779
acaaccgcccttctccatccggtctccaagccgcacagagtgaaccggagcttcttgcttgctggtctcgccaagtagcaagagtaggactgtaggagctggtctctcgccaagtcgcgcctctccctcctctcttcccttttctccctcgcgtcgcgcgctccacatgctgagcctgaggtcagtatccggctccaactcctcgaggggcatcgccgccgtggtcggcgtgggtcccaggctgggctcggcggtggcgcgcaagttcgcctccgagggctacaccatcgccatccctctcgcgcgacctcggcacgtcctccctcccatcctctctctttcgatcggcggagcacaaagctgagtccttgctgcacgcgtggcgtcgcagtaagtaagtaagtaagcaagtgacacgagaggtgcgtgcgcgtggttgcagagaagctgtcgcagctggcggaggagatcgcgcaggcggccaagg

SEQ ID NO: 6377 - DNA, 786 bp, Zea mays
  misc_feature (1)..(84): n is a, c, g, or t
  misc_feature (86)..(86): n is a, c, g, or t
  misc_feature (91)..(92): n is a, c, g, or t
  misc_feature (101)..(103): n is a, c, g, or t
  misc_feature (106)..(108): n is a, c, g, or t
  misc_feature (110)..(110): n is a, c, g, or t
  misc_feature (115)..(118): n is a, c, g, or t
  misc_feature (123)..(124): n is a, c, g, or t
  misc_feature (140)..(141): n is a, c, g, or t
  misc_feature (735)..(786): n is a, c, g, or t
  Peptide Sequence Number=SeqID_11350
  Probeset Number=SeqID_20780
nnnnnnnnnnnnnnnnnnnnnnnnnnnnnnnnnnnnnnnnnnnnnnnnnnnnnnnnnnnnnnnnnnnnnnnnnnnnnnnnnnnncnacaannaaatctccnnngtnnnantactnnnnaatannactccatttttttttnntttttatcagtagcaaccagacggaatcatcactcacgatcacggcgagatagcagagtatctacaaggggatcagaatcagatcacacaaccgacaccacgacgcggtacaaaccctccccacccaccaaggacaccagatccgaccaaaatgcgacggcgacacgacaccaacaaagaaatctccctagtaccagtactactgaataccactccattttttttttttttttatcagtagcaaccagacggaatcatcactcacgatcacggcgagatagcagagtatctacaaggggatcagaatcagatcacacaaccgacaccacgacgcggtacaaaccctccgacaaagcctccgacacccaagccgaccccgccgacgtacaccccttctcccaagcctccgacgcccaagccgaccccgccgacgtacactccaagccccaagcctcccacacacccgacgcccaagccgaccccaccgacgtacaccccttccccaaagcctccgacgcccaaactgaccccaccgacgtagaccacttccccaaagcatccgacaaccaagctgaccccacagacgtagactcnnnnnnnnnnnnnnnnnnnnnnnnnnnnnnnnnnnnnnnnnnnnnnnnnnnn

SEQ ID NO: 6378 - DNA, 451 bp, Zea mays
  Peptide Sequence Number=SeqID_11351
  Probeset Number=SeqID_20781
ccccagtattctgctcaagcacaccgcagaaaaagaaaaagaaaaggcaaaggcaaaggaatcccaatcaggcaagcaaaaaggaagaaccaggtgctgcggccggagatgtcgtcgcagctgatcgaggagcaccggtcgggcgcggaggtgcacgtcgggcacgagctgtgcgagcgcaagtcgcgcgagttcatggtggagctgggcctccccgacgggctcctcccgctgcccaggctcgacgaggtgggctacaaccggtcgacggggttcgtgtggctgctgtcctcacttttggctgtataagagaggattacgcaccgtttcattttatactactacttatctgttactagtgtattgcgcgcgcctatgcgcgcgtgctgaatagcaacttgaaatgttttatgaggatatcgaattggatgttgcagtgtgatcacattaa

SEQ ID NO: 6379 - DNA, 808 bp, Zea mays
  misc_feature (1)..(21): n is a, c, g, or t
  misc_feature (808)..(808): n is a, c, g, or t
  Peptide Sequence Number=SeqID_11352
  Probeset Number=SeqID_20782
nnnnnnnnnnnnnnnnnnnnnacgcggggatcgccgccgttgctagctctctgtgtccgacggttctttcgccttcatgttttctccattgttttctttgtttctgtttgtcgattactatatcgttttgagcagtttgatggcgatgaggaaagaaatccgtgtgccggaggcatccctcggacgccggtgttggttgcacaaaccctctaagaagttctgagccactttttatttcttttcttctcttagattcattcctcatgttcttcaaactaaccctgtcctatcgttggcatagtctcttttgtgagttagttttcgttgccgttctcttgtcgggtatttgttcttggtgagttgattttctatgcgaggtgatgatgcatgtatgaaagtctgtcaatcccctgatgtcataaagtgatgactcctcatacatcccgacaggctctgatcgcatctgcagccgctctacccgcctcgctctattggatttcgatcttccaagagcgcagctcgggaacagaactcagctctccaccagccttcagctagtctacagtgcaaatctgctggcataaaagtagtagtttaccatgataagagtaaattatattgtaaaaagggtaataaaataacttggcataaaaaactaacaaataaattaacgtgttacttgttaggcggtcacaaacaacttgtgagatacgtacatttatataatgatttatcagattaattgtggcttgaagatgtggatgccatctcttcctaatatatatgaacgtcatctgattggtcctgn

SEQ ID NO: 6380 - DNA, 471 bp, Zea mays
  misc_feature (3)..(3): n is a, c, g, or t
  misc_feature (16)..(16): n is a, c, g, or t
  misc_feature (88)..(88): n is a, c, g, or t
  misc_feature (110)..(110): n is a, c, g, or t
  misc_feature (125)..(125): n is a, c, g, or t
  misc_feature (184)..(184): n is a, c, g, or t
  misc_feature (193)..(193): n is a, c, g, or t
  misc_feature (202)..(202): n is a, c, g, or t
  misc_feature (217)..(217): n is a, c, g, or t
  misc_feature (234)..(234): n is a, c, g, or t
  misc_feature (326)..(326): n is a, c, g, or t
  misc_feature (368)..(368): n is a, c, g, or t
  Probeset Number=SeqID_20783
gtncataaaggcgganttctcaggtacataaaggctagcagccatatcaaattttcacagatacataaaggctgagttcacttctcanatacatgctactaatagtaggngagttcacatctcanatacatggtactaacaaatactagctgatttcacaaatcagcatctcagtttcctaggngtcaacttnttaggaggngtcatcttgtttganaatgatgctgatggcanaccttcctgtgaagttgtaccatctgccaatagcattgcaagtcgacttctggtgaccctaattggactgtcatggttgaattctttaacanatggacagcctttgatgccacccaggcactagtaggtgtagnggtctttcttctagcactggaggtacaactgtgttcatcaagtaacactgtcaccataacagtcttcccatcgggttgcctacgacccacgatatgccaaggg

SEQ ID NO: 6381 - DNA, 1078 bp, Zea mays
  misc_feature (755)..(1078): n is a, c, g, or t
  Peptide Sequence Number=SeqID_11353
  Probeset Number=SeqID_20784
tgtgcaggtcccccctcctgcttcacgcctcaccgccgctgcctcccatcccactagtccactcctacttcactcccgccttctagaagtagaggctccaccccccactcggagtggcgctcctctagcagtagcaccgcaaaagctcgccaagaacaccccgccggcaccacacaatggcggcgtgcaacggcctgttcgtgtaccacatcctcggcctggcctccctgctggccgtgttctacttttccctcctcggcgaggtggacttccgcttccccggcctcctcccgtcccccggtgcgtcccggtcccacgacgcgtccctgccgttcgtggagcggcgcggcgcgcagctcttcctggagggccgcccattctacatcaacgggtggaactcgtactggctcatggaccaggccgtggagccggccagccgccaccgtgtgtcggacatgttccgcgccgccaccgggatggggctcacggtgtgccgcacctgggcctttaacgacggcgcctacaacgcgctccagctctccccgggacacttcgacgagcgcgtcttcaaggcgctggacatggtggtcgtggaggcccggcggcacggcgtgcggctcatcctcagcctggccaacaacctggaggcgtacggcgggaagacgcagtacgtgcggtgggcgtgggacgaaggcgtcggcctcaccgcctccaacgactccttcttcttcgaccccgccatccgcgactacttnnnnnnnnnnnnnnnnnnnnnnnnnnnnnnnnnnnnnnnnnnnnnnnnnnnnnnnnnnnnnnnnnnnnnnnnnnnnnnnnnnnnnnnnnnnnnnnnnnnnnnnnnnnnnnnnnnnnnnnnnnnnnnnnnnnnnnnnnnnnnnnnnnnnnnnnnnnnnnnnnnnnnnnnnnnnnnnnnnnnnnnnnnnnnnnnnnnnnnnnnnnnnnnnnnnnnnnnnnnnnnnnnnnnnnnnnnnnnnnnnnnnnnnnnnnnnnnnnnnnnnnnnnnnnnnnnnnnnnnnnnnnnnnnnnnnnnnnnnnnnnnnnnnnnnnnnnnnnnnnnnnn

SEQ ID NO: 6382 - DNA, 1010 bp, Zea mays
  misc_feature (1)..(3): n is a, c, g, or t
  misc_feature (5)..(7): n is a, c, g, or t
  misc_feature (27)..(35): n is a, c, g, or t
  misc_feature (39)..(45): n is a, c, g, or t
  misc_feature (47)..(47): n is a, c, g, or t
  misc_feature (49)..(55): n is a, c, g, or t
  misc_feature (58)..(61): n is a, c, g, or t
  misc_feature (64)..(64): n is a, c, g, or t
  misc_feature (75)..(78): n is a, c, g, or t
  misc_feature (106)..(110): n is a, c, g, or t
  misc_feature (131)..(141): n is a, c, g, or t
  misc_feature (144)..(147): n is a, c, g, or t
  misc_feature (149)..(158): n is a, c, g, or t
  misc_feature (161)..(165): n is a, c, g, or t
  misc_feature (691)..(691): n is a, c, g, or t
  misc_feature (737)..(737): n is a, c, g, or t
  misc_feature (848)..(860): n is a, c, g, or t
  misc_feature (916)..(920): n is a, c, g, or t
  misc_feature (930)..(932): n is a, c, g, or t
  misc_feature (950)..(952): n is a, c, g, or t
  misc_feature (962)..(967): n is a, c, g, or t
  misc_feature (969)..(973): n is a, c, g, or t
  misc_feature (987)..(991): n is a, c, g, or t
  misc_feature (1003)..(1006): n is a, c, g, or t
  misc_feature (1008)..(1010): n is a, c, g, or t
  Peptide Sequence Number=SeqID_11354
  Probeset Number=SeqID_20785
nnngnnncgagacaagttccgcccggnnnnnnnnnagcnnnnnnncngnnnnnnnatnnnngtnaacaacgaccnnnnggtgcactgcttcccgcggatcataatnnnnnccaccttccaccgggccatgnnnnnnnnnnnctnnnncnnnnnnnnnngcnnnnnagaggctggcgcacctgcgtcactcgctccgcgctggcgcgatctcctctgacgtcgaagtcgcccgggggatgacacagggggaaggggtggtgtgggaggggtgaacaggagctcggtgacttttgtgaggggcgcctgatggaggagcgccggctcgacacgccggcgatgaggagaatcagcgagtggtatatacgttcctagcttctcctaccttccctcctgcgtctccttgctctacttttcattaattggcatgtcgctgctgctgtttcgcatttgattcgacgagttcgtgtccgtaaccggcgccgctgatagctttgttcagtccgattttgaactgaaaacaaacagctatcctcattaacctaaccaacacgtgacctgcgctttcagatcttcacggcttttacccgtttaaccgctcgatctagccaaaccctgccaataaagctttcgaggaatacgaaggcgggccccttttgcttcgcttgatttgttgcgaggatcctttcaccanaggtcccaacggattttaccctacctgatcgggggacgcgaccttntaactttgcacaaaactctcccgtgggccttcggagtggcgcgctcaccaaaggcagcgggtgggccggcgaatcaatgggcctccaaggtatcccaaaattaaaatatgnnnnnnnnnnnnngccgtccaggaccaaggatcggaggcactccatcggctagtgattggaattggctnnnnntcattgccgnnntctttcatcttgaatctnnntgacggctannnnnntnnnnnaacgtaaaaaaacnnnnnttgattgattgnnnnannn

SEQ ID NO: 6383 - DNA, 698 bp, Zea mays
  misc_feature (689)..(689): n is a, c, g, or t
  Probeset Number=SeqID_20786
attcccgcgccgcgcctccgacgagttgccccaatccgcccagacctccaacatcgcaacgggagcccaccctgcctgcctcgccgcgatccctccgcgctgctcgagggctcctgtccggcgccattcgggaacgccgtcttccgggcgcccgatcatcgaaggtcgggcgccgttccgtcggaatccggccgaaactgcggccgggaggcggagggcaccgcgacttcccctctggagcaagcccccgaaaaggaagcccgcgcctggcgcatgggcgaggccggggtctttacttttgaggggcggcccggccgagactccttcaatccgcgggcgtacatgggcgccccccccccctgggccccgggcggaggtctaacggggcggggcagtccgggcgcccgtcgaggcggaggcgtcctcggggtacgccggtccacgaaatcccgcactagccctgttatgtcgggcccacctgtgcgggcgggttaccgcctctacacccccgaggaggtgtgtgtcgccgtagccgcgcggggagcaatatcaacgcatgcgaagggcctcgggcgcgcgcgccgtgagccgccgggccgcggggggtggaggcggagcgaggagggagggtggtggggcggcaactgccctccttggctctctacctcttatgggcaacccggagacgntggacccgc

SEQ ID NO: 6384 - DNA, 601 bp, Zea mays
  misc_feature (57)..(57): n is a, c, g, or t
  misc_feature (474)..(475): n is a, c, g, or t
  misc_feature (477)..(477): n is a, c, g, or t
  misc_feature (528)..(529): n is a, c, g, or t
  misc_feature (548)..(551): n is a, c, g, or t
  misc_feature (574)..(581): n is a, c, g, or t
  misc_feature (595)..(597): n is a, c, g, or t
  misc_feature (600)..(601): n is a, c, g, or t
  Peptide Sequence Number=SeqID_11355
  Probeset Number=SeqID_20787
attttattgattttgagtatgggtcatacagctaccgtggttatgacattgcaaatncatttcaatgagtatgcaggatttgattgtgactataatttgtaagttttctccatgtcaatgaaatactcaaaagcaattacggtggtcaggtttttagtcagcagtattcatttgattgtgtataattaggtacccagataaagatgcccagtatcacttcttcaggaattatctgcaccctgatagacctagtgaggtatgtgaaacaaaaccaattgaaatctattcttggaattcaagttctttctgaagtaaatgaagctttctgttagtacctactctatgtaatatatatttgacgctatgagtagttccatctttgcttgttttttatgaagttagtaatacctccatatgtgccacatgtgtttgacattttgagcgttgttaagctttttttctgaacaaacatannangtctgcgtgccatttcattaacgccccgtttggatcactggaattgaattnnattctaataataataattnnnncatatatcaattaagctaattcnnnnnnnnacaaaatatatttnnntann

SEQ ID NO: 6385 - DNA, 573 bp, Zea mays
  misc_feature (121)..(121): n is a, c, g, or t
  misc_feature (228)..(228): n is a, c, g, or t
  misc_feature (263)..(263): n is a, c, g, or t
  misc_feature (265)..(266): n is a, c, g, or t
  misc_feature (280)..(280): n is a, c, g, or t
  misc_feature (286)..(286): n is a, c, g, or t
  misc_feature (330)..(330): n is a, c, g, or t
  misc_feature (332)..(332): n is a, c, g, or t
  misc_feature (334)..(334): n is a, c, g, or t
  misc_feature (342)..(342): n is a, c, g, or t
  misc_feature (349)..(349): n is a, c, g, or t
  misc_feature (386)..(386): n is a, c, g, or t
  misc_feature (424)..(425): n is a, c, g, or t
  misc_feature (461)..(461): n is a, c, g, or t
  misc_feature (465)..(465): n is a, c, g, or t
  misc_feature (472)..(476): n is a, c, g, or t
  misc_feature (483)..(484): n is a, c, g, or t
  misc_feature (496)..(496): n is a, c, g, or t
  misc_feature (515)..(515): n is a, c, g, or t
  misc_feature (517)..(517): n is a, c, g, or t
  misc_feature (531)..(531): n is a, c, g, or t
  misc_feature (535)..(535): n is a, c, g, or t
  misc_feature (537)..(539): n is a, c, g, or t
  misc_feature (546)..(546): n is a, c, g, or t
  misc_feature (552)..(552): n is a, c, g, or t
  misc_feature (562)..(563): n is a, c, g, or t
  misc_feature (565)..(565): n is a, c, g, or t
  misc_feature (571)..(573): n is a, c, g, or t
  Peptide Sequence Number=SeqID_11356
  Probeset Number=SeqID_20788
aaactttgtggaggacccccccccccgatttcatgtggcgcttatcatgtggctgtattgactttctaagaccgaggtgtacccttgggggaaaaggtgcaaatgggccggttaggtcatnggcgaatctgaggataaaaaactcccccattggccggaacccctggaagaaaaccaagcccaaaagggttgttttggggaaatatttttccccggggaaaattttgngtttcccaaaaggggggtttcggggggggaaaaananncaaagggggccccngggggncccccccccccctttccccttttggggggaaaaaacccccccanantntttttctnccccggngggccccaaaattttttttttccctccccccccccgnaaaaaaaaaaccccccgggggggttttttttccccccnnaaaaaaaaaaaacccccccccccccgggggggggancccnccccccnnnnnaaaaaannagggggggtaanaaaaaattttcttttttanantattttttcttttntttncnnnaaaaaanaaattncttttttccnncntccacnnn

SEQ ID NO: 6386 - DNA, 692 bp, Zea mays
  misc_feature (1)..(42): n is a, c, g, or t
  misc_feature (692)..(692): n is a, c, g, or t
  Probeset Number=SeqID_20789
nnnnnnnnnnnnnnnnnnnnnnnnnnnnnnnnnnnnnnnnnncatatccagagttctctttgctgtaatccccatgaacccaggccatctcttgatcttttcactgcctatttaagaataaccgagggggaagaagtgggagtaaaggagagatccttacctatgtcatcaaccacggtgtgtagcttcaacatagttttgttgcctccccttacccaaactataccctggacacgcccaaattctctggtcaagtgactcaacgtgtctggtgaccacgtcgccgacgcctcaacctcatactggaggaggagcagagagcaagatggggtccggatctttcctcaaggtgctggccaagaacttcgatgtccttgccgggccagtcatatcacatgcttatcctctatatgcttctgttagagcgatagagacaaaaaatcctgtagatgatcagcagtggctcacttactgggtgttgtactcatttgtcactttgtttgagctaactttggctccaattatcgagtggtaaattacgcttttggtcatgtcccaatgtgttcatttttatggtttttgtggcctttgtgattatttgcaaacattattggtggtgcatggatatagatgtgtttggtgcatcaagttggtaaaaggaaactagataggctcgaaaaaaaaaaaaaaan

SEQ ID NO: 6387 - DNA, 692 bp, Zea mays
  misc_feature (1)..(1): n is a, c, g, or t
  misc_feature (651)..(692): n is a, c, g, or t
  Peptide Sequence Number=SeqID_11357
  Probeset Number=SeqID_20790
ntttttttttttttttcgagcctatctagtttccttttaccaacttgatgcaccaaacacatctatatccatgcaccaccaataatgtttgcaaataatcacaaaggccacaaaaaccataaaaatgaacacattgggacatgaccaaaagcgtaatttaccactcgataattggagccaaagttagctcaaacaaagtgacaaatgagtacaacacccagtaagtgagccactgctgatcatctacaggattttttgtctctatcgctctaacagaagcatatagaggataagcatgtgatatgactggcccggcaaggacatcgaagttcttggccagcaccttgaggaaagatccggaccccatcttgctctctgctcctcctccagtatgaggttgaggcgtcggcgacgtggtcaccagacacgttgagtcacttgaccagagaatttgggcgtgtccagggtatagtttgggtaaggggaggcaacaaaactatgttgaagctacacaccgtggttgatgacataggtaaggatctctcctttactcccacttcttccccctcggttattcttaaataggcagtgaaaagatcaagagatggcctgggttcatggggattacagcaaagagaactctggatatgnnnnnnnnnnnnnnnnnnnnnnnnnnnnnnnnnnnnnnnnnn

SEQ ID NO: 6388 - DNA, 471 bp, Zea mays
  misc_feature (3)..(3): n is a, c, g, or t
  misc_feature (6)..(6): n is a, c, g, or t
  misc_feature (8)..(8): n is a, c, g, or t
  misc_feature (10)..(10): n is a, c, g, or t
  misc_feature (14)..(14): n is a, c, g, or t
  misc_feature (18)..(19): n is a, c, g, or t
  misc_feature (21)..(23): n is a, c, g, or t
  misc_feature (27)..(27): n is a, c, g, or t
  misc_feature (31)..(31): n is a, c, g, or t
  misc_feature (34)..(36): n is a, c, g, or t
  misc_feature (46)..(46): n is a, c, g, or t
  misc_feature (61)..(61): n is a, c, g, or t
  misc_feature (74)..(74): n is a, c, g, or t
  misc_feature (92)..(92): n is a, c, g, or t
  misc_feature (102)..(102): n is a, c, g, or t
  misc_feature (104)..(104): n is a, c, g, or t
  misc_feature (106)..(107): n is a, c, g, or t
  misc_feature (115)..(115): n is a, c, g, or t
  misc_feature (119)..(119): n is a, c, g, or t
  misc_feature (121)..(124): n is a, c, g, or t
  misc_feature (127)..(127): n is a, c, g, or t
  misc_feature (135)..(135): n is a, c, g, or t
  misc_feature (139)..(139): n is a, c, g, or t
  misc_feature (152)..(152): n is a, c, g, or t
  misc_feature (202)..(202): n is a, c, g, or t
  misc_feature (228)..(228): n is a, c, g, or t
  misc_feature (237)..(237): n is a, c, g, or t
  misc_feature (240)..(240): n is a, c, g, or t
  misc_feature (267)..(267): n is a, c, g, or t
  misc_feature (272)..(272): n is a, c, g, or t
  misc_feature (279)..(279): n is a, c, g, or t
  misc_feature (314)..(314): n is a, c, g, or t
  misc_feature (326)..(326): n is a, c, g, or t
  misc_feature (336)..(336): n is a, c, g, or t
  misc_feature (340)..(340): n is a, c, g, or t
  misc_feature (342)..(342): n is a, c, g, or t
  misc_feature (360)..(360): n is a, c, g, or t
  misc_feature (363)..(363): n is a, c, g, or t
  misc_feature (369)..(370): n is a, c, g, or t
  misc_feature (383)..(383): n is a, c, g, or t
  misc_feature (388)..(388): n is a, c, g, or t
  misc_feature (392)..(393): n is a, c, g, or t
  misc_feature (395)..(396): n is a, c, g, or t
  misc_feature (398)..(398): n is a, c, g, or t
  misc_feature (403)..(406): n is a, c, g, or t
  misc_feature (409)..(409): n is a, c, g, or t
  misc_feature (417)..(417): n is a, c, g, or t
  misc_feature (420)..(421): n is a, c, g, or t
  misc_feature (426)..(426): n is a, c, g, or t
  misc_feature (428)..(431): n is a, c, g, or t
  misc_feature (434)..(434): n is a, c, g, or t
  misc_feature (437)..(437): n is a, c, g, or t
  misc_feature (442)..(442): n is a, c, g, or t
  misc_feature (445)..(445): n is a, c, g, or t
  misc_feature (447)..(449): n is a, c, g, or t
  misc_feature (458)..(458): n is a, c, g, or t
  misc_feature (461)..(461): n is a, c, g, or t
  misc_feature (463)..(463): n is a, c, g, or t
  misc_feature (465)..(467): n is a, c, g, or t
  misc_feature (469)..(471): n is a, c, g, or t
  Peptide Sequence Number=SeqID_11358
  Probeset Number=SeqID_20791
atnacncntngtcntctnngnnncgangatnatnnncgcttcttcntgctcctgcactacntccgccggcgccngcggaaccgtacagatangtggaagcantncnnctatgctnaccncnnnnganatcgaggngacncagcaaccattgnaaccacgcattctcgaagcaggagatcgtatcgctgtgcaccgcttctgncagctcgaccgtaacggtggcggatncggctccgntgncgagctcatgtcggtccgtgagtgcgncgganatccccnctcccagaggctcctgaggatgctggatgcctcancttcaaggagtntgtagcattnttgncngcttttaccccccgcacnagnctgcannacaagattgcaanttatnttcnngnntnaatgnnnntgnctgcatcntcnnagaangnnnntanttncatanctnannnataatgtgntcncntnnncnnn

SEQ ID NO: 6389 - DNA, 1177 bp, Zea mays
  misc_feature (541)..(542): n is a, c, g, or t
  misc_feature (576)..(577): n is a, c, g, or t
  misc_feature (1042)..(1043): n is a, c, g, or t
  misc_feature (1078)..(1080): n is a, c, g, or t
  misc_feature (1122)..(1122): n is a, c, g, or t
  misc_feature (1138)..(1139): n is a, c, g, or t
  misc_feature (1157)..(1159): n is a, c, g, or t
  misc_feature (1170)..(1170): n is a, c, g, or t
  misc_feature (1176)..(1177): n is a, c, g, or t
  Peptide Sequence Number=SeqID_11359
  Probeset Number=SeqID_20792
cgttccgccgcccgtcctcgtccctcccacctattcgctcgctcgctcgccgtccgcgcccgcgcgggccgcgagatctaggccagtcaccgcggccgtggccgcgggccgacgggatctctgtcctcccgacgcgacgaacctctaggacggcgccgaagacgaggaggaagcgggggccatggaggcgtcttcctgggacgccgttcgcaagcaggcaaggaggttggaagctcagttagatgaccaaatgattgcataccgtaaattggtttctacgaaatcagatggttcagagaacgacattgagtctgatatagaaagatcactgaagcagttacagcaagtgaattcgcaaatgcaaacttgggtatcatcaggaggttctgaagttctttctcatactctgactcgtcatatggagattttgcaagaccttactcaggaattctatcggcttcgatcaagtctcagggcaaaacaacagcatacttctctccttgacttgagagattttgacagagcaaagtttgatgttgannagccgtcagactcagctgatcaagttcttctcanngaacaagctgcgacacgcaggagtagacgacagatgttattattgccaacacatgcaattctttttgagaagctgagtagctgacaaccgaatgccacagatggataacgtgatatcacaagctcaggcaacactaggttctctcatgactcaacggtcaacattcggcggcatcactacaaagataagcaacgtcagcagccgacttccaacaattaaccatgtcctcgcgtctatcagaaggaagaaatccatggacactatcatcctttcccttgtcgcatcagtctgcgcgttcctcatcttcatctactggctgtcgaagtaggtttaccaaagcaaatgtattacggtgttgtaagcttgggatcacactaccggtacagatgatcgtgattggtgtttgtacaatattggttgattgaatgctattacgattcgggagtgctgtagccaccgtgtctnnaagctgtgattgattgggcgcatggattgagttgnnntatcagcaacttatattataatggagggaaaaaatcatttgntgttattgcacgaagnncatgaaagtggtcctacnnngaacaagctanttttcnn

SEQ ID NO: 6390 - DNA, 1191 bp, Zea mays
  misc_feature (1)..(80): n is a, c, g, or t
  misc_feature (835)..(1191): n is a, c, g, or t
  Peptide Sequence Number=SeqID_11360
  Probeset Number=SeqID_20793
nnnnnnnnnnnnnnnnnnnnnnnnnnnnnnnnnnnnnnnnnnnnnnnnnnnnnnnnnnnnnnnnnnnnnnnnnnnnnnnnaacagccttcctctcccctcggcgtcgggtctcccgtcggccaggaccatggctggcggctttagagtgctgcatcttgtgaggccctttctgggtttcttaccggaagtacagagtgctgataggagaattccattcagagagaaactcatctacaccgttatttccctcttcattttcctagtgtgcagccagctcccgctctatggcatccattcaactactggagctgaccctttctactggttgcgtgctattcttgcatcaaaccgtggtactgttatggagctgggtatcactccaattgtgacatctggaatggtgatgcaacttctggtaggatcaaagatcattgaagttgacaacagtgtgagagaggatcgtgcacttctgaatggtgcacaaaagttgcttggtatcctgattgctattggagaagctgtggcatatgtcttgtctggaatgtatggcagtgtaagccaactaggaacagggaatgctattctcattatacttcagcttttctttgctggcatcattgtcatctgtctggatgaacttctccagaaaggatatggtttgggttctggcatctctctattcatcgctaccaacatctgtgagaatatcatctggaaggcgtttagccccacaaccatcaacagcggacgtggtgctgaatttgaaggggctgtcattggattgttccatctgttgattaccagaactgacaaagtccgtgccctacgggaggnnnnnnnnnnnnnnnnnnnnnnnnnnnnnnnnnnnnnnnnnnnnnnnnnnnnnnnnnnnnnnnnnnnnnnnnnnnnnnnnnnnnnnnnnnnnnnnnnnnnnnnnnnnnnnnnnnnnnnnnnnnnnnnnnnnnnnnnnnnnnnnnnnnnnnnnnnnnnnnnnnnnnnnnnnnnnnnnnnnnnnnnnnnnnnnnnnnnnnnnnnnnnnnnnnnnnnnnnnnnnnnnnnnnnnnnnnnnnnnnnnnnnnnnnnnnnnnnnnnnnnnnnnnnnnnnnnnnnnnnnnnnnnnnnnnnnnnnnnnnnnnnnnnnnnnnnnnnnnnnnnnnnnnnnnnnnnnnnnnnnnnnnnnnnnnnnnnnn

SEQ ID NO: 6391 - DNA, 1110 bp, Zea mays
  misc_feature (757)..(759): n is a, c, g, or t
  misc_feature (789)..(792): n is a, c, g, or t
  misc_feature (801)..(801): n is a, c, g, or t
  misc_feature (804)..(804): n is a, c, g, or t
  misc_feature (806)..(808): n is a, c, g, or t
  misc_feature (1110)..(1110): n is a, c, g, or t
  Peptide Sequence Number=SeqID_11361
  Probeset Number=SeqID_20794
cccacgtcttcgagctgtgacgactacggatcgagtccacgatcggcgggatctacacggacatggaggccatttgttccgagatcgagtagatcgggctccaggtgtcgtcttgcctgcatcccagcgatggcggcacgcctggcatcctcggtacacccggatcggtgatggggcgctctcctgttatcttcaacaacactgatggctcacgttttgggcctagccctgagatcttcaactgggacagtggtaatgggtataatctacccagtttccgctgcccggtcacgggaactcttgcatcaacatcttgttcgtgcccaggaccgcatgaagcgccaagccgacaagaaatgttcagaacgcacctttgccgtgggggattgggtttatcttcgccttcagccttatgtgcaagcatctgtcatgccccgtgctcatcacaagctcagtttcaagtttttttggcccctatcagatactagctcgcgtgggacaggtggcttaccgcctcagtttgccccctaccagtcgtatacacgtaagtggtgtatgtgtctcaaaaacttgctcggggtttcaagggtctggatcctcttcctttacctgttgcgctacctgagttcagtgtgcttacccaagttattcattaccaaaggtaaccggctcatacagcaggttctggtgggcaggcactggtggcatggtctggtccttcgcccgagctggcaacttgggaagatcgcgaagcccnnngccagtgctttccctttgcgcctgcttggnnnnaagcaggtnctncnnnggtcgggagtgtcagcgatgccaaagtgctggacaagcaacaggaagacattgtaactgaaggacgcgggcgccgtattcgtcgcaagaatccccgtgtgtgtgggcccgagtggatgtaacctgttgtctcgggttggactgtgtgtgggccagttgccgtggggttgtaaggcatatatgagaagtgttgtgactcggagaggaattaagcaaaacctgaactatgaaataatagaactctcctgctctgcccaaaaaaaaaaaaaaaaaaaggacggccgctcgcgatctaggaactan

SEQ ID NO: 6392 - DNA, 770 bp, Zea mays
  misc_feature (601)..(770): n is a, c, g, or t
  Peptide Sequence Number=SeqID_11362
  Probeset Number=SeqID_20795
cggaggagctgcaacggctaccgcgtcctacgaagcagggtactcctgatccctctgtatcctacgggttcatgccctcacatcgatgagtccttcaactgccacctcaacgaccggcctgacagcttacgtgaggctccagtggcaacccagcggatgcagaatcccaaggaaggtctgctcatgcccatctccacgtgctgctccagtgagaagtcgtcacaacacctctttcactgtgttccttgcccaagacaaaggctgtcaagatagctgctttagcaagatatatcctggtgctttgcacattcaaccaaaaattgactctccaaaagcattgaagatccttgtttcgtctgccttgaaaatccttctgtgggatatactatccgccatttgccttgctttcacaagttccataaagagtgtattgacgagtggcttagaagaaagaaactgtgtccagtctgcaagtttggggttaattgaagtttgttgtatcagtctagagttggagttctacttggtagtgtcagcgacgaggtgcttcaatttctaatacgagatgctttcctgcagaggttttttttggtctaagatnnnnnnnnnnnnnnnnnnnnnnnnnnnnnnnnnnnnnnnnnnnnnnnnnnnnnnnnnnnnnnnnnnnnnnnnnnnnnnnnnnnnnnnnnnnnnnnnnnnnnnnnnnnnnnnnnnnnnnnnnnnnnnnnnnnnnnnnnnnnnnnnnnnnnnnnnnnnnnnnnnnnnnnnnn

SEQ ID NO: 6393 - DNA, 770 bp, Zea mays
  misc_feature (601)..(770): n is a, c, g, or t
  Peptide Sequence Number=SeqID_11363
  Probeset Number=SeqID_20796
tgaacagctaggagcatacaactatgagacgcagatgtagtacaaacgatgcccgaaagcacaaatcaaaagtgtgtttacatgaacaggctaggagcatactttttaaagtgtgcgtgcatacaaaaagatgttcaaaagcacagatcacagcaatacattgtttttttatcttagaccaaaaaaaacctctgcaggaaagcatctcgtattagaaattgaagcacctcgtcgctgacactaccaagtagaactccaactctagactgatacaacaaacttcaattaaccccaaacttgcagactggacacagtttctttcttctaagccactcgtcaatacactctttatggaacttgtgaaagcaaggcaaatggcggatagtatatcccacagaaggattttcaaggcagacgaaacaaggatcttcaatgcttttggagagtcaatttttggttgaatgtgcaaagcaccaggatatatcttgctaaagcagctatcttgacagcctttgtcttgggcaaggaacacagtgaaagaggtgttgtgacgacttctcactggagcagcacgtggagatgggcatgagcagaccttccnnnnnnnnnnnnnnnnnnnnnnnnnnnnnnnnnnnnnnnnnnnnnnnnnnnnnnnnnnnnnnnnnnnnnnnnnnnnnnnnnnnnnnnnnnnnnnnnnnnnnnnnnnnnnnnnnnnnnnnnnnnnnnnnnnnnnnnnnnnnnnnnnnnnnnnnnnnnnnnnnnnnnnnnnn

SEQ ID NO: 6394 - DNA, 715 bp, Zea mays
  misc_feature (8)..(15): n is a, c, g, or t
  misc_feature (715)..(715): n is a, c, g, or t
  Peptide Sequence Number=SeqID_11364
  Probeset Number=SeqID_20797
gccggccnnnnnnnnctctcgcctgagcacgtcgtcacctcctcttgcttggagtcgctcgagcacgccgcctcctcctcttgcctaaagtccctcgagcatgccgacgcctcatctcgcctgaacacgccgacgcctcatcaggtgagggctcttgcaacatccaactctaaactgggaggcacacaatccactcatcaacctcagtaggagcaccacgaagtggtacaggtggagtagttcaacctcagcaagagctagctgcaggtgttggtgttcctactctcatcgacacagacatagctgatgtctgcgtccaactactggacgtgcaagacgaaaagctcttcctgatcaaccacgaaaagatggatgcatataacaacctgatatcaaagaaacaagttccatgaccgatgacgaaaagactaaactcattattagcatgaagtgtttgaggaagatgttttcccctaaagttatataattcgaccggggtccaggagagtaggagactgaaagcactgtcgagaagactgaaattatcacattgacatgaagaccaaagccatctcttacctacttatctttgtagcttatgtttctattttatccagtcatcaaaactaaagtcttatgtatggtcattatagtactattttggttctgaaaatatttgtttatgtcaaaaaaaaaaaaaaaaaaaaaaagtcgn

SEQ ID NO: 6395 - DNA, 479 bp, Zea mays
  misc_feature (287)..(287): n is a, c, g, or t
  misc_feature (312)..(312): n is a, c, g, or t
  misc_feature (315)..(315): n is a, c, g, or t
  misc_feature (363)..(363): n is a, c, g, or t
  misc_feature (429)..(429): n is a, c, g, or t
  misc_feature (448)..(448): n is a, c, g, or t
  misc_feature (462)..(462): n is a, c, g, or t
  misc_feature (471)..(471): n is a, c, g, or t
  Probeset Number=SeqID_20798
ttggctggatatgcccgtcgaagctcggattcgctcgaggacccatcctgcacacgaagcctagaatagccctcccctgctccgccacctcctcggatcccgaccaccccacccccaccccagacaacaggttgatggaggctaagatgggacgcttcttcgagtccgtgagcaatttcttcaccggaggcgaccacatcccctggtgcgaccgcgacctcatcgccggctgtgaaggagaacttgtcatgctgcaatgaggaaagaggatgaaagccttatgaggntgcatgggccttgtgactccagganacncacgtgtaacggggatcacatgcttcaagctcttggataatctgcagnctctgagaatagggaaagtgacttgtggtgtgatctacggatggggatactcaaagaggacttganatcgtgtttgaatcagggntggggagcctttcntgaaagganaaaaaatt

SEQ ID NO: 6396 - DNA, 317 bp, Zea mays
  misc_feature (1)..(1): n is a, c, g, or t
  misc_feature (10)..(13): n is a, c, g, or t
  misc_feature (68)..(68): n is a, c, g, or t
  misc_feature (87)..(87): n is a, c, g, or t
  misc_feature (113)..(123): n is a, c, g, or t
  misc_feature (125)..(126): n is a, c, g, or t
  misc_feature (132)..(139): n is a, c, g, or t
  misc_feature (286)..(290): n is a, c, g, or t
  misc_feature (310)..(317): n is a, c, g, or t
  Peptide Sequence Number=SeqID_11365
  Probeset Number=SeqID_20799
ngcagcacgnnnnaagcgtaaacgccgtagactgtggaggcgtcggtgtcgtagaggcagtaggaccnctcgcgtcctgcctccgtnaccctctgcgccttcctcacattccnnnnnnnnnnntnnttcctnnnnnnnngccacttcttttaaaagtaggggccgcgcggacgcgtaccccctctgccacaaattatgacgtcctctcccacttgggaagatggtaggccagcgcacctgccaagtgcaatgcaggccactgacctagaccacgggccttattgannnnncgttgatcccgtccaggtannnnnnnn

SEQ ID NO: 6397 - DNA, 528 bp, Zea mays
  misc_feature (75)..(75): n is a, c, g, or t
  Probeset Number=SeqID_20800
gacgaccctgatagatcaggctggcagcttgtatttgtcgacagggagaacgatgtgcttctccttggagacgancccggggagtaagaaaccatcactacaattatagtttcaaattgtgattttcaatagtatatacatttgaattttttatatctttacaatgtattagaaaaaatatcacactgcatagttcacgctctgatagagtgatagtaacttgttttttttttggtttaatttgggtaggcagtttttttacccaactgcccattagcctcatcaatatctatggtcccttgcatttgaatggacctacatgttgttttcaagggctcctgatgacctcagacatatctacatgggcttgattctggcatacatctactatatgcattcaagttacaaaaatgattaatccacgtcccttgatttatgatacttcaatactcaggaagccattttagctaatggctctcagggtcagcctgataactggggtttgggggtcatctcggtcatgcgaac

SEQ ID NO: 6398 - DNA, 528 bp, Zea mays
  misc_feature (454)..(454): n is a, c, g, or t
  Peptide Sequence Number=SeqID_11366
  Probeset Number=SeqID_20801
gttcgcatgaccgagatgacccccaaaccccagttatcaggctgaccctgagagccattagctaaaatggcttcctgagtattgaagtatcataaatcaagggacgtggattaatcatttttgtaacttgaatgcatatagtagatgtatgccagaatcaagcccatgtagatatgtctgaggtcatcaggagcccttgaaaacaacatgtaggtccattcaaatgcaagggaccatagatattgatgaggctaatgggcagttgggtaaaaaaactgcctacccaaattaaaccaaaaaaaaaacaagttactatcactctatcagagcgtgaactatgcagtgtgatattttttctaatacattgtaaagatataaaaaattcaaatgtatatactattgaaaatcacaatttgaaactataattgtagtgatggtttcttactccccgggntcgtctccaaggagaagcacatcgttctccctgtcgacaaatacaagctgccagcctgatctatcagggtcgtc

SEQ ID NO: 6399 - DNA, 571 bp, Zea mays
  misc_feature (46)..(46): n is a, c, g, or t
  misc_feature (121)..(121): n is a, c, g, or t
  misc_feature (137)..(137): n is a, c, g, or t
  misc_feature (501)..(501): n is a, c, g, or t
  misc_feature (526)..(526): n is a, c, g, or t
  misc_feature (529)..(529): n is a, c, g, or t
  misc_feature (532)..(532): n is a, c, g, or t
  Peptide Sequence Number=SeqID_11367
  Probeset Number=SeqID_20802
cgcaacctatcgcctacaaggaacgtgagctgaggacggccggaancccgggccgacccacgcggccgtgcgaggtccgcccacgcgtccgggtagagactcgcagctgagctgacacggnccgagaagcagcttgncattgcaggcgtagtgacgtgacccagcagcacctagcactagcagtccatcggagcgacgatggtgagaaggacggtgctggcggcgctgctggtggtggccgccgccctcgccggcggcgcgcgggcgcagctcaaggaggggttctacgactactcctgcccacaggcggagaagatcgttaaggactacgtgaaggcgcacatcccccacgcgcccgacgtcgcctccaccctgctccgtacccacttccaacgactgctttcgtcagggggcttgcgacgcgtcagttgctgcttcaaacgcgaacggggccggcaacgaaggcggagaaaggaagcgggcggcccaaacttgaaggtncgcgggtttcgggctttaattcgancgnatncaaaggcgcttgcttcgaagaaaggaatttcccccggcg

SEQ ID NO: 6400 - DNA, 732 bp, Zea mays
  misc_feature (601)..(732): n is a, c, g, or t
  Peptide Sequence Number=SeqID_11368
  Probeset Number=SeqID_20803
cttgcaagcaagcagctgctctcgtgtgacatctagtcgtcgccagtcagtcacctctccagcctccagcaccaaccatccaccaccgagctagcagctgtctgctcgcctcccccacctaggctaggactaggagccaccaaactctgccccgccatgccgggcctcgccgcctcaggcaactccgcccccggcgggcgttccattcagagaagccagtctctaggtacctcctagcttgacgcgcaccctccacaaccgagtgaccacgcgcgccaccccccccccacctgaaccaactacacccccggacctaccgcgctcacccccacattacctgccagtccgctcggtttctctgggcggacacctgtacatacgactacgacgcgcggagtccaacggaaattcacaccgccccaaaggtagcatgtaccgccccccccctgcatccctgctcccccccccctccccctctccctcctctccccctgcgcacctcccccctccctcctcacccctacgagccccgggccggtgccgccacctaccctgctctgctcccgccacgccacgggaggacgtaaacacgaaccacatnnnnnnnnnnnnnnnnnnnnnnnnnnnnnnnnnnnnnnnnnnnnnnnnnnnnnnnnnnnnnnnnnnnnnnnnnnnnnnnnnnnnnnnnnnnnnnnnnnnnnnnnnnnnnnnnnnnnnnnnnnnnnnnnnnnn

SEQ ID NO: 6401 - DNA, 732 bp, Zea mays
  misc_feature (1)..(132): n is a, c, g, or t
  Probeset Number=SeqID_20804
nnnnnnnnnnnnnnnnnnnnnnnnnnnnnnnnnnnnnnnnnnnnnnnnnnnnnnnnnnnnnnnnnnnnnnnnnnnnnnnnnnnnnnnnnnnnnnnnnnnnnnnnnnnnnnnnnnnnnnnnnnnnnnnnnnnnatgtggttcgtgtttacgtcctcccgtggcgtggcgggagcagagcagggtaggtggcggcaccggcccggggctcgtaggggtgaggagggaggggggaggtgcgcagggggagaggagggagagggggaggggggggggagcagggatgcagggggggggcggtacatgctacctttggggcggtgtgaatttccgttggactccgcgcgtcgtagtcgtatgtacaggtgtccgcccagagaaaccgagcggactggcaggtaatgtgggggtgagcgcggtaggtccgggggtgtagttggttcaggtggggggggggtggcgcgcgtggtcactcggttgtggagggtgcgcgtcaagctaggaggtacctagagactggcttctctgaatggaacgcccgccgggggcggagttgcctgaggcggcgaggcccggcatggcggggcagagtttggtggctcctagtcctagcctaggtgggggaggcgagcagacagctgctagctcggtggtggatggttggtgctggaggctggagaggtgactgactggcgacgactagatgtcacacgagagcagctgcttgcttgcaag

SEQ ID NO: 6402 - DNA, 749 bp, Zea mays
  misc_feature (1)..(1): n is a, c, g, or t
  misc_feature (713)..(713): n is a, c, g, or t
  misc_feature (735)..(737): n is a, c, g, or t
  Peptide Sequence Number=SeqID_11369
  Probeset Number=SeqID_20805
naacattagctatggaagtgaaagcccttcagagactgaaatcatccaggctgcaatggaggcaaacattcacgaattcatcagtggtctaccagaagggtatggcactgttgttggagacaaagggagccagctttcaggagggctgaaacagagaattgctattgcaagaacaatactgaagaggcctgccattctgcttcttgatgaggcaaccagcgcacttgatggtgaatctgagagggtggttatgagctctttagggaccaaggtgtggaaggacaaagatgagcaagccagtacgattacaagtatcacagttgcacatagactgtccacagtcataaatgctgatacgatagttgtgatggagaaaggaaaggttgttgaacttggtaatcaccaagagttgatctctgctgaagatggcgtttactcaagattgttccacttgcaaagcaacatgaaagaatgaccatctattcaagttccattatggccaaagaccaaagacacttagcaagaatagctttaggagattaagcattgctcaaatgcacttgctgtcacaagttgtaataacatagctatatcatcatatatcgatgatgcatagtccaccagttagggtaaaaaaataactatatattacttgaatggtatctgtttggaagatagagtaacagatggaagatagagtaacagaacttaanacaggaaagggattcagtaatnnnctggtttccgat

SEQ ID NO: 6403 - DNA, 415 bp, Zea mays
  Peptide Sequence Number=SeqID_11370
  Probeset Number=SeqID_20806
taaagataatctattctatatttctattgagggtttatgtttaggtttgagccctttctttggatgcttacactttacatggcatctgcaaagagatgatattgatgttttggattggtagctatgatgtgttcgcactgcacatacccatggaaaaatatatatataggtcaccagagttccctggattttatataattgtacttggacacatcaagaagcaaaatttcatacttaatccactatggtgcattggctacttggctgaagggttataaatgcttttgaagatcatattaaagctgcagttgagaaggcagtacctgaaaatatcattgaaggcgctgggaaactagactcctttctgcaaggtctccccaggaccatcagtttggacgacgtcgcggccttcaac

SEQ ID NO: 6404 - DNA, 415 bp, Zea mays
  Peptide Sequence Number=SeqID_11371
  Probeset Number=SeqID_20807
gttgaaggccgcgacgtcgtccaaactgatggtcctggggagaccttgcagaaaggagtctagtttcccagcgccttcaatgatattttcaggtactgccttctcaactgcagctttaatatgatcttcaaaagcatttataacccttcagccaagtagccaatgcaccatagtggattaagtatgaaattttgcttcttgatgtgtccaagtacaattatataaaatccagggaactctggtgacctatatatatatttttccatgggtatgtgcagtgcgaacacatcatagctaccaatccaaaacatcaatatcatctctttgcagatgccatgtaaagtgtaagcatccaaagaaagggctcaaacctaaacataaaccctcaatagaaatatagaatagattatcttta

SEQ ID NO: 6405 - DNA, 662 bp, Zea mays
  misc_feature (203)..(203): n is a, c, g, or t
  Peptide Sequence Number=SeqID_11372
  Probeset Number=SeqID_20808
ctagcttgccgcgccgcctggatcgagcagccgagcgactaagcgaagactcccttttccccgagcacaagagaaccatggcggcggcggcagtatacggcggcttcaaggggaagcttggcgtcgaggatgcccccgagctgcagctcaaccgcatccgcatcacactctcatccaagaacgtcaagactttggagaagttngtgcgaatttggtaaagggagccaaggacaagcatttgagggttaaagggacctgttccggatcccctactaaggttctccaaatcaccactcgcaagtcccctggcgtgaaggacaaacacatgggatcgggttggagtcccgcatccccagaggggggatgacctaatccgctcccctgatgggtggaacaaatcccctcccccacattgaaccccgggttgaaggtaaggggccctttccccacgtgtaaggaacgaaattctccaaagggcctccaaatttttttctttggggccccgggggggcccaaaaaaaaatttggggttttttttaaaaaaaaaattttcccccccaataatttgggggaagggggtgggagaattagggccgcaacatgaaaattttgaccaaaactctttggggggggaaaaaaagtgtggccccaccccggtgggg

SEQ ID NO: 6406 - DNA, 662 bp, Zea mays
  misc_feature (460)..(460): n is a, c, g, or t
  Peptide Sequence Number=SeqID_11373
  Probeset Number=SeqID_20809
ccccaccggggtggggccacactttttttccccccccaaagagttttggtcaaaattttcatgttgcggccctaattctcccacccccttcccccaaattattgggggggaaaattttttttttaaaaaaaaccccaaatttttttttgggcccccccggggccccaaagaaaaaaatttggaggccctttggagaatttcgttccttacacgtggggaaagggccccttaccttcaacccggggttcaatgtgggggaggggatttgttccacccatcaggggagcggattaggtcatcccccctctggggatgcgggactccaacccgatcccatgtgtttgtccttcacgccaggggacttgcgagtggtgatttggagaaccttagtaggggatccggaacaggtccctttaaccctcaaatgcttgtccttggctccctttaccaaattcgcacnaacttctccaaagtcttgacgttcttggatgagagtgtgatgcggatgcggttgagctgcagctcgggggcatcctcgacgccaagcttccccttgaagccgccgtatactgccgccgccgccatggttctcttgtgctcggggaaaagggagtcttcgcttagtcgctcggctgctcgatccaggcggcgcggcaagctag

SEQ ID NO: 6407 - DNA, 427 bp, Zea mays
  misc_feature (152)..(152): n is a, c, g, or t
  misc_feature (427)..(427): n is a, c, g, or t
  Peptide Sequence Number=SeqID_11374
  Probeset Number=SeqID_20810
ttttttttttttttttgtattaactacgcgattgcttcaggactcatgagtatgtatattttacacaggtgatgttttacaagagcaaaaattaaggcgagaatcagataatcgtgtgagtagagtacaacgtcagacaatggctatctganggaaaatggggtggttcaagaagtcgactaaatggaagttactctgatcatcggagtaataatattgtcagcgcccccactttgtccaagatattacagatgcagtaacaccaggctaggaattaagatgacaacattttacagcctgatgacatggggccagtaagaaactgggcgcagaattgccgtttatcttcacgccacctcctcacagtgccatccaactcattattacttcgatgatcagagtaacttccatttagtcgacttcttgn

SEQ ID NO: 6408 - DNA, 330 bp, Zea mays
  misc_feature (1)..(25): n is a, c, g, or t
  Probeset Number=SeqID_20811
nnnnnnnnnnnnnnnnnnnnnnnnncaacctggatggagcaaagagagcaagttagttggtgtaaatgctgtaagtgccagctaattttcataaaaatgtctcttcagtgaaatagccaaatgagtgcaataagctattgctgaaattgagcctgtaacatcatgcatacacgattgggttagtcagcgaagcagggcagcaggcgtgggcagtcgggctggtccagggacgccagctcgcatctgacggtttccgtctgcaaaggtagcagcagacgtcgcctttgaccgtctgtgcctcaatcccgcagatgcttgtccgtgttgtta

SEQ ID NO: 6409 - DNA, 330 bp, Zea mays
  misc_feature (306)..(330): n is a, c, g, or t
  Peptide Sequence Number=SeqID_11375
  Probeset Number=SeqID_20812
taacaacacggacaagcatctgcgggattgaggcacagacggtcaaaggcgacgtctgctgctacctttgcagacggaaaccgtcagatgcgagctggcgtccctggaccagcccgactgcccacgcctgctgccctgcttcgctgactaacccaatcgtgtatgcatgatgttacaggctcaatttcagcaatagcttattgcactcatttggctatttcactgaagagacatttttatgaaaattagctggcacttacagcatttacaccaactaacttgctctctttgctccatccaggttgnnnnnnnnnnnnnnnnnnnnnnnnn

SEQ ID NO: 6410 - DNA, 528 bp, Zea mays
  misc_feature (243)..(243): n is a, c, g, or t
  misc_feature (324)..(324): n is a, c, g, or t
  misc_feature (366)..(366): n is a, c, g, or t
  misc_feature (452)..(452): n is a, c, g, or t
  misc_feature (520)..(520): n is a, c, g, or t
  Peptide Sequence Number=SeqID_11387
  Probeset Number=SeqID_20813
gtcttggcagatggaggggaacgtctcaatgactgaggcacatttttactaaattatccctaaattatttgtattttttaaaataacatgtaatcttgttgatctggtttactcaagctgcatcgagtttgtacttggagaagaatcctggagttattttacttggtttccttgatttgtagagacatgccagtgaggagcagtttaatcggtctcttgctttatgaagtggatgcaattatnaaagaccgtccgagcgggccaacatcctcgcgggggcttcgcccttggggccatcggacctggcccccaccaccgatgccnaggagctctaaggaacgacgccctccccccccaaacgcccanctctccgacaactcatcggcccgcctggggtctccccgcccggggccctgcaattttggttttcctttattctggcaaatccaggntgtttttccctataattactcggcagggtggggtttccggatttaatttattttaaactggcaaggtntgtgtttt

SEQ ID NO: 6411 - DNA, 528 bp, Zea mays
  misc_feature (9)..(9): n is a, c, g, or t
  misc_feature (77)..(77): n is a, c, g, or t
  misc_feature (163)..(163): n is a, c, g, or t
  misc_feature (205)..(205): n is a, c, g, or t
  misc_feature (286)..(286): n is a, c, g, or t
  Probeset Number=SeqID_20814
aaaacacanaccttgccagtttaaaataaattaaatccggaaaccccaccctgccgagtaattatagggaaaaacancctggatttgccagaataaaggaaaaccaaaattgcagggccccgggcggggagaccccaggcgggccgatgagttgtcggagagntgggcgtttggggggggagggcgtcgttccttagagctcctnggcatcggtggtgggggccaggtccgatggccccaagggcgaagcccccgcgaggatgttggcccgctcggacggtctttnataattgcatccacttcataaagcaagagaccgattaaactgctcctcactggcatgtctctacaaatcaaggaaaccaagtaaaataactccaggattcttctccaagtacaaactcgatgcagcttgagtaaaccagatcaacaagattacatgttattttaaaaaatacaaataatttagggataatttagtaaaaatgtgcctcagtcattgagacgttcccctccatctgccaagac

SEQ ID NO: 6412 - DNA, 439 bp, Zea mays
  misc_feature (90)..(90): n is a, c, g, or t
  misc_feature (92)..(92): n is a, c, g, or t
  misc_feature (101)..(101): n is a, c, g, or t
  misc_feature (271)..(271): n is a, c, g, or t
  Peptide Sequence Number=SeqID_11388
  Probeset Number=SeqID_20815
aggaggggagcggccgcgcgcctaagccacaacctgggcctgggccgcgcttttggcccatgcggggcgcctttaccacccgccgatatncntggctgttngctagatcaacggctcggattcttgcgcatgctagttatatattgcggtaaaatcggactcgaggccgggggccgggctaaccattctacttctttccccagccgccacaaaaaaatctggccggccgccaggatctattggccgacggtgcctatcctcctctctctgnattctattttctttctctcagccgcgcagaacttcaaccgcattgaaattctggttcctgggacccttagagttttggagttagtcaatccttcttttgcgcccccctccccgggctcgaccaatccccacaggctgtgctacctgggttgtgtgctgttggtgttga

SEQ ID NO: 6413 - DNA, 439 bp, Zea mays
  misc_feature (169)..(169): n is a, c, g, or t
  misc_feature (339)..(339): n is a, c, g, or t
  misc_feature (348)..(348): n is a, c, g, or t
  misc_feature (350)..(350): n is a, c, g, or t
  Probeset Number=SeqID_20816
tcaacaccaacagcacacaacccaggtagcacagcctgtggggattggtcgagcccggggaggggggcgcaaaagaaggattgactaactccaaaactctaagggtcccaggaaccagaatttcaatgcggttgaagttctgcgcggctgagagaaagaaaatagaatncagagagaggaggataggcaccgtcggccaatagatcctggcggccggccagatttttttgtggcggctggggaaagaagtagaatggttagcccggcccccggcctcgagtccgattttaccgcaatatataactagcatgcgcaagaatccgagccgttgatctagcnaacagccangnatatcggcgggtggtaaaggcgccccgcatgggccaaaagcgcggcccaggcccaggttgtggcttaggcgcgcggccgctcccctcct

SEQ ID NO: 6414 - DNA, 955 bp, Zea mays
  misc_feature (1)..(87): n is a, c, g, or t
  misc_feature (707)..(955): n is a, c, g, or t
  Peptide Sequence Number=SeqID_11389
  Probeset Number=SeqID_20817
nnnnnnnnnnnnnnnnnnnnnnnnnnnnnnnnnnnnnnnnnnnnnnnnnnnnnnnnnnnnnnnnnnnnnnnnnnnnnnnnnnnnnnngttgggcaaggcacatacagcagtgtattcagggcaagagaccttgagactggaaagatcgttgccttgaagaaggttcggttcgacaattttgagccagagagtgttagattcatggcaagggagatacaaatattgagaagacttgatcatccaaatgtcatgaaactggaaggcttgattacttcccggttatcgtgcagcctttatctagtatttgaatacatggagcatgatcttgcaggactttgctcctccccggacatcaaattcactgaagcacagctcaagtgctacatgaaccagttactgtcaggactggagcattgccattcacgacatgtggttcatcgtgatatcaagggtgctaatctccttgtgaataatgaaggggttctaaagatagctgattttggtcttgcaaatttctttgatcccagcaaaaaccatcctctgaccagccgtgttgttactctgtggtaccgaccacctgaactgctactaggttcaactcactatgatgcagctgtagatttgtggagtgttgggtgtgtgtttcctgagatgtatcgtgggaaacctgtgtttatgttctgtctcccacgttaccatccctacgnnnnnnnnnnnnnnnnnnnnnnnnnnnnnnnnnnnnnnnnnnnnnnnnnnnnnnnnnnnnnnnnnnnnnnnnnnnnnnnnnnnnnnnnnnnnnnnnnnnnnnnnnnnnnnnnnnnnnnnnnnnnnnnnnnnnnnnnnnnnnnnnnnnnnnnnnnnnnnnnnnnnnnnnnnnnnnnnnnnnnnnnnnnnnnnnnnnnnnnnnnnnnnnnnnnnnnnnnnnnnnnnnnnnnnnnnnnnnnnnnnnnnnnnn

SEQ ID NO: 6415 - DNA, 843 bp, Zea mays
  Peptide Sequence Number=SeqID_11390
  Probeset Number=SeqID_20818
cccctcgccgcgcctccagctccagcagctctgacgacacgcgagctcacgggccgccggggcctcggaggtcggaagcagaacgaccacgcgccaagcctgtctctcgttcgggccggccggggccggctactctcagcggggccacttggagcaggcggcattcgctccgtactgctgctgatttggtgagcgcggggagccgcgggatgggagatctggtggaggcggcggctgtggcgtgatggtgagcccgggcggcccgtcgcgcgtagcggtgtggggcggcgttgccgggcccgggagcccgcgcgtctcttctgccgcgaccgctttcgcggcgctacggcgcgggtggcggtgggcgcactcgggcgcgccgacgctggagcgcgcggcccgcacgttcctcctggcctccgcggcgctcgtgctcgcctgcgcgctctacctctacgtgctccgctacgtcggccggggaggtcgcgccttcgccgccgcgggcttcgtcgggggctccggcctgggccttggcggcgaggcgtgcgatgtgttcgacggcgcatgggtacccgacgacaccggccgccacccgctatacaacagctgccagtgcccgttcgcggagcgcgggttcgactgcctcgccaacgggcggaacgacactgggtacctcaagtggcggtggaagccgcggcggtgtgaagtgccgcagtttgcggcccgcaccgcgctggagcggctgcgcgggaagcgggtggtgttcgtgggggactccatgagccgcacacagtgggagtccttcatctgcatgctcatggccggcgtggatgaccccaggac

SEQ ID NO: 6416 - DNA, 689 bp, Zea mays
  misc_feature (1)..(7): n is a, c, g, or t
  misc_feature (620)..(689): n is a, c, g, or t
  Peptide Sequence Number=SeqID_11391
  Probeset Number=SeqID_20819
nnnnnnncggcacgacccttaccactatcttggttcctctaaaccctctgtcttggttactctaactcgctttgtttgtcaactccagattgggacaagttgctaaaaacatgtttgtttgtcatcgactttccattttactagatctgcttgcacctgattcgaagctccatatttttgaaagcgattaaggcgaagtaaatattcttttctcaggcgtatacattttcgtgcatctattgttctaccattaccttttccctatggaaatccgatttggcactttcgtgcatttattgttctaccattcctttttgcctatggaagtccgatttggtgggtttcacaagatttgaaactccaggcttttggaagcgattaaggcgaagtaaatcttctttcctcaggagtatatacactttggtgcacctattgttctattgttccttttccctgtggaaatctggtttggtgggtttgtgatctattcggttctttgcattttgtttatccctcctataaatcctgctattccctcaccttctttttgggtttgtttgaaaattttgtttcgggtctcccctcttcatgtttttttgatacagttcgagttcgatatnnnnnnnnnnnnnnnnnnnnnnnnnnnnnnnnnnnnnnnnnnnnnnnnnnnnnnnnnnnnnnnnnnnnnn

SEQ ID NO: 6417 - DNA, 689 bp, Zea mays
  misc_feature (1)..(70): n is a, c, g, or t
  misc_feature (683)..(689): n is a, c, g, or t
  Probeset Number=SeqID_20820
nnnnnnnnnnnnnnnnnnnnnnnnnnnnnnnnnnnnnnnnnnnnnnnnnnnnnnnnnnnnnnnnnnnnnnatatcgaactcgaactgtatcaaaaaaacatgaagaggggagacccgaaacaaaattttcaaacaaacccaaaaagaaggtgagggaatagcaggatttataggagggataaacaaaatgcaaagaaccgaatagatcacaaacccaccaaaccagatttccacagggaaaaggaacaatagaacaataggtgcaccaaagtgtatatactcctgaggaaagaagatttacttcgccttaatcgcttccaaaagcctggagtttcaaatcttgtgaaacccaccaaatcggacttccataggcaaaaaggaatggtagaacaataaatgcacgaaagtgccaaatcggatttccatagggaaaaggtaatggtagaacaatagatgcacgaaaatgtatacgcctgagaaaagaatatttacttcgccttaatcgctttcaaaaatatggagcttcgaatcaggtgcaagcagatctagtaaaatggaaagtcgatgacaaacaaacatgtttttagcaacttgtcccaatctggagttgacaaacaaagcgagttagagtaaccaagacagagggtttagaggaaccaagatagtggtaagggtcgtgccgnnnnnnn

SEQ ID NO: 6418 - DNA, 651 bp, Zea mays
  misc_feature (1)..(61): n is a, c, g, or t
  misc_feature (651)..(651): n is a, c, g, or t
  Peptide Sequence Number=SeqID_11392
  Probeset Number=SeqID_20821
nnnnnnnnnnnnnnnnnnnnnnnnnnnnnnnnnnnnnnnnnnnnnnnnnnnnnnnnnnnnncagctatgggtaaagagaagtttcacatcaacattgtggtcattggccatgtcgactctgggaaatcgaccaccactggtcacttgatctacaagcttggtggtattgacaagcgtgtcatcgagaggttcgagaaggaggctgctgagatgaacaagaggtccttcaagtacgcatgggtcttggacaaacttaaggctgagcgtgagcgtggtatcaccattgacattgctctctggaagttcgagaccaccaagtactactgcaccgtcattgacgcccctggacatcgtgatttcatcaagaacatgattactggtacctcccaggctggattgtgctgttcttatcattgactctaccactggtggttttgaggctggtatctccaaggatggtcagacccgagagcacgctcttcttgcttttcacccttggtgtcaagcaaatgatttgctgctgtaacaagatggatgccacaacccccaagtactccaaggctaggtacgatgagatcatcaagggagtgtctttctacttggaaaagaaggttgggtacaaccctgacaaaatcccattcgtccccatcn

SEQ ID NO: 6419 - DNA, 1700 bp, Zea mays
  misc_feature (1)..(1): n is a, c, g, or t
  misc_feature (723)..(724): n is a, c, g, or t
  misc_feature (753)..(753): n is a, c, g, or t
  misc_feature (755)..(755): n is a, c, g, or t
  misc_feature (757)..(757): n is a, c, g, or t
  misc_feature (769)..(769): n is a, c, g, or t
  misc_feature (801)..(804): n is a, c, g, or t
  misc_feature (1440)..(1440): n is a, c, g, or t
  misc_feature (1442)..(1445): n is a, c, g, or t
  misc_feature (1447)..(1447): n is a, c, g, or t
  misc_feature (1461)..(1463): n is a, c, g, or t
  misc_feature (1512)..(1513): n is a, c, g, or t
  misc_feature (1535)..(1537): n is a, c, g, or t
  misc_feature (1595)..(1616): n is a, c, g, or t
  misc_feature (1633)..(1641): n is a, c, g, or t
  misc_feature (1680)..(1683): n is a, c, g, or t
  misc_feature (1687)..(1697): n is a, c, g, or t
  misc_feature (1699)..(1700): n is a, c, g, or t
  Peptide Sequence Number=SeqID_11393
  Probeset Number=SeqID_20822
naaggacgtaccagttactgaattattttgtgtggatggcgcttgtattcgagaagacgatgcatcaccgggcaccggacgcaccaattccaccgcccgaggcagatgcaagtgaaggcggctcaggactcgtcctgtccgccttgctgtatccttcgcttgccatttgctgtacaaagaaaaaaaaaggcgtttctgacagtgactttgaaatcttgtcgcgagcttactacttggctggtgctgtcatgtcaggaaacggatgattgcagattaccgaacattacctgttgggaagggaaaaaacaaacggtgctcttgcatccgacacgattacaagttggcagcatcttatgccttttggcgatcaagtccacaggagagtgctcattgcatctaaaacggtgaagtgatgggtgctgtggcttcaggctgaggcgaaacatgcgaacctactgtatatccattcagatatgttttaggcaacctacagggctcagtgcctatccctatggtgccattcagaatcatagtgcctttagttagttgatggtggtggtggttggaacacaataattacctgacgtcacgcccctggccaccggaaggtcaccggcgacgtgagccacaccaattcggcgacgaagcgccaggaacacagacgcaactcgaagcacgaaggtcaattacttatacacaaatcttggcatgaaagcccatcannccattacagaatctctatacactaatagntncnacttcctcgtcngcgaccatagcagtcatgacacctgatcaccnnnngatgcaactgagccctctcaagattgttaattccatgtaaagttctcctgtggatgttgcattcggtggggtgtggggggctagttggagataaactcttctcctacctttttctcaagaaccctagaaagaaacatttctcaattgtggtttgttggcgcgcgcaaaggggatagaaaagaagaagaggcaaagaaaagaagaaaaagaggcaagacgacggcaacttggcagaacggtggcggcaagtgcgctgcagcggtggctcagctgtggtgctcctcgagttaatattattccggccggccggccagccaacctcaacatctggtcagatcacaaggtgcatggacaaagttttgccaatgacgggtcagcgtgcttctcagactcgaccatcaccattaaacaagaggacagtttcagagaagatggtgactcctcgacaatgcaaatggttaaagacccacctggagtagcatcatttttctgcattatggtacgtaccggtggccggtgggtaaatataaatcttccaaactaacattactggagcttagcatcagaagacaatgctgcctcctgcctgcatttcgcatgagaccgtcaagagaccattgtaaattcacataaagntnnnncntctaactataaatnnnggaacatggacatacatagtgacatacattgacacgattggagaacggnntggaccgagttctctcagcctnnnaaggtgttgcatcttatcttctcgctctctttgtaaagtccgaaggtatttttgtacnnnnnnnnnnnnnnnnnnnnnngatgaagtcgtattaannnnnnnnnaaaaaaaaaaaaaaaaaaaaaaaaaaaaaaaaaaaaagnnnngccnnnnnnnnnnntnn

SEQ ID NO: 6420 - DNA, 766 bp, Zea mays
  Probeset Number=SeqID_20823
attccaaaagctctcgagacttcctcagcaatcaatcagctttccagcgatcggcagctcctcgatcgtttcgaagctccaatccgcccggccgcctccgcctgttgccactagctaggtgatcgatcgaatggactgcggtggcgcgctgcagctcccgcctggggtccgcttcccacccaccgatggagagctgggtgatgcattatcccctccgcaagtgcggagccctggccgctcgccggcgcgggtcatcacccgagggtggatcttctacaagccccgaacccatgggccacctctccagaaaaaaggccccccgggtgggggaagaagggactggggaaccttcctgtttcccacagggggggacccgaaaagggaacccgcgaaagggcgcttccagttgcctcataaggccgggaggggtccccgggaacaaaggggtccactctgggcacaaggccctacccgggtatcgccgcgatccagagctccggggtaaggggattcccccccgtcgcgcccgcccggggggccatatccatagaaaaggggccccttctgttctcgtcctaaccagccgcgggtaaaacacccttcccacaagggcgctcccacaggcaccacaatgtggtgaactaacgggaacaaaaagaacaacgcacgccggggaggaatagctttatatacgcagcccctaaaccgccccgcaattcacataataaaggtacacgagcgaactgggacgccgtcgggggtcggg

SEQ ID NO: 6421 - DNA, 766 bp, Zea mays
  Peptide Sequence Number=SeqID_11394
  Probeset Number=SeqID_20824
cccgacccccgacggcgtcccagttcgctcgtgtacctttattatgtgaattgcggggcggtttaggggctgcgtatataaagctattcctccccggcgtgcgttgttctttttgttcccgttagttcaccacattgtggtgcctgtgggagcgcccttgtgggaagggtgttttacccgcggctggttaggacgagaacagaaggggccccttttctatggatatggccccccgggcgggcgcgacgggggggaatccccttaccccggagctctggatcgcggcgatacccgggtagggccttgtgcccagagtggacccctttgttcccggggacccctcccggccttatgaggcaactggaagcgccctttcgcgggttcccttttcgggtccccccctgtgggaaacaggaaggttccccagtcccttcttcccccacccggggggccttttttctggagaggtggcccatgggttcggggcttgtagaagatccaccctcgggtgatgacccgcgccggcgagcggccagggctccgcacttgcggaggggataatgcatcacccagctctccatcggtgggtgggaagcggaccccaggcgggagctgcagcgcgccaccgcagtccattcgatcgatcacctagctagtggcaacaggcggaggcggccgggcggattggagcttcgaaacgatcgaggagctgccgatcgctggaaagctgattgattgctgaggaagtctcgagagcttttggaat

SEQ ID NO: 6422 - DNA, 1041 bp, Zea mays
  misc_feature (4)..(7): n is a, c, g, or t
  misc_feature (12)..(20): n is a, c, g, or t
  misc_feature (22)..(62): n is a, c, g, or t
  misc_feature (70)..(82): n is a, c, g, or t
  misc_feature (85)..(110): n is a, c, g, or t
  misc_feature (697)..(697): n is a, c, g, or t
  misc_feature (706)..(706): n is a, c, g, or t
  misc_feature (736)..(738): n is a, c, g, or t
  misc_feature (754)..(754): n is a, c, g, or t
  misc_feature (759)..(759): n is a, c, g, or t
  misc_feature (798)..(802): n is a, c, g, or t
  misc_feature (805)..(807): n is a, c, g, or t
  misc_feature (848)..(853): n is a, c, g, or t
  misc_feature (855)..(857): n is a, c, g, or t
  misc_feature (870)..(876): n is a, c, g, or t
  misc_feature (879)..(882): n is a, c, g, or t
  misc_feature (887)..(889): n is a, c, g, or t
  misc_feature (897)..(904): n is a, c, g, or t
  misc_feature (907)..(909): n is a, c, g, or t
  misc_feature (920)..(925): n is a, c, g, or t
  misc_feature (932)..(934): n is a, c, g, or t
  misc_feature (943)..(944): n is a, c, g, or t
  misc_feature (946)..(948): n is a, c, g, or t
  misc_feature (959)..(963): n is a, c, g, or t
  misc_feature (966)..(971): n is a, c, g, or t
  misc_feature (974)..(976): n is a, c, g, or t
  misc_feature (984)..(988): n is a, c, g, or t
  misc_feature (990)..(1022): n is a, c, g, or t
  misc_feature (1024)..(1030): n is a, c, g, or t
  misc_feature (1033)..(1037): n is a, c, g, or t
  misc_feature (1041)..(1041): n is a, c, g, or t
  Probeset Number=SeqID_20825
aaannnnaatgnnnnnnnnntnnnnnnnnnnnnnnnnnnnnnnnnnnnnnnnnnnnnnnnnnagaagaannnnnnnnnnnnnatnnnnnnnnnnnnnnnnnnnnnnnnnnccccccccccccccccccccggtgtcatgtagggatctaggagtgagttcagtagttaacctcactagggaagggtgttggttggttaagtttagattgtgggggtaggttggtctagtttgctttctttcttctcctttttctttttctttttctttatatttctttttctgttgtgtttgtaattggtctaatttttagacccttcttcttaatacaatgatacgcagctctcctgcgtgttcgaaaaaaaaaaaaaagtttacttatttggaactcagtccagtggtagtggaagtgaaagtggcattcagacgcagaagtgtaccaagtcaaaaggtgccaatgaatccggtaacaacagtggtagcaacgacgatgaagctggcatgggacttaatgcaagggatgacagtgataatggcagtggcactcaagcacaaaactcatggactaagcttgctgtggagatcgacagtccacaagctatgtttttggatcagttaaccgatccacccaatagcacctgtgcacaagtaatccactcaaagtcagagatttgtaccaacaaatggttcccagataanatcaacacnactaaaagccaaaaaacactaatggtttgnnntgctcaaccgatgtgnattangcaattttacaaaataaataaacttgctggccattttannnnntannnttgatggttgatttcaaatgactttaagggaaaggacctgnnnnnngnnngccctgaaaattnnnnnnnggnnnnccaannntccccaannnnnnnntcnnncaaagcagcannnnnngaaaacnnntcaaagganncnnngatggaaaatnnnnnggnnnnnnctnnncgagctgnnnnncnnnnnnnnnnnnnnnnnnnnnnnnnnnnnnnnncnnnnnnncannnnnagcn

SEQ ID NO: 6423 - DNA, 666 bp, Zea mays
  misc_feature (1)..(1): n is a, c, g, or t
  misc_feature (574)..(575): n is a, c, g, or t
  misc_feature (580)..(580): n is a, c, g, or t
  misc_feature (586)..(605): n is a, c, g, or t
  misc_feature (607)..(610): n is a, c, g, or t
  misc_feature (612)..(616): n is a, c, g, or t
  misc_feature (622)..(628): n is a, c, g, or t
  misc_feature (630)..(632): n is a, c, g, or t
  misc_feature (639)..(644): n is a, c, g, or t
  misc_feature (646)..(649): n is a, c, g, or t
  misc_feature (651)..(657): n is a, c, g, or t
  misc_feature (659)..(666): n is a, c, g, or t
  Peptide Sequence Number=SeqID_11395
  Probeset Number=SeqID_20826
nccgtctccaccctccgcgcgcggtccgcgccgcggaccgcggaccgcggtcaccactcaccagaagcgctgcagcgccaccccagtcccccaccggccaccgaccacttgccgattgccgttgccgcgtcggcgttgctggatcctcaagcagacagcccagtccgcccggacccgggaacccgcccacgcgcttattaataacggccacctcgttcccccgcccgccccgaaggccgagggaagcgtacgcgcctagcgaccagcacagattcgttccacgcctacctcgggcttcggaggtggtggaggttcgggtggtggcatcggtggtggactgtagaggtggcgggagcttggtgcgtgcacgttgagtgtgtgcatgccatgaaattaaaaagcgatacatggagtgtgtggtacggtatgggacatttgctagagttacattacatcatcactagtatatataaggttgactcttatttgtaagcctaatgaaagtgaataattggatgcgttatgtaagcctactctactatatatatgtttgttttggaaaaaaaaaaaaaannaaaanaaaaannnnnnnnnnnnnnnnnnnnannnnannnnnaattannnnnnngnnngccgccnnnnnntnnnntnnnnnnncnnnnnnnn

SEQ ID NO: 6424 - DNA, 470 bp, Zea mays
  Probeset Number=SeqID_20827
ccgacgatacctccacactccagttcgaatctaccgtaccttgtcgccaccggcctaccgtccctcctcttcgacgcccttcggatacagttgcgtagacgtgccaagaccgcgaatgatgctcgaagatccggcgggcctccttggaattaccatcccttactgaccacaagagtgttgtgaatgatctggagatgaaacttaagagattgatgggaactgaagcacctaaagagcagaaggcagatgacagttcgctgagtgatttgcctgaagagattgtcacacctgtagcattgtcagaagaagatattggagccgtaatctaagcctaaccagtgatctgatgtgctggcaagtgagaccagaatttctagagtagttcctgtaaaacaatattttgggtcctgaagtcaccaccatttggatcgacaattttctcgaaacgccatttggattgacactcgtgc

SEQ ID NO: 6425 - DNA, 470 bp, Zea mays
  Peptide Sequence Number=SeqID_11396
  Probeset Number=SeqID_20828
gcacgagtgtcaatccaaatggcgtttcgagaaaattgtcgatccaaatggtggtgacttcaggacccaaaatattgttttacaggaactactctagaaattctggtctcacttgccagcacatcagatcactggttaggcttagattacggctccaatatcttcttctgacaatgctacaggtgtgacaatctcttcaggcaaatcactcagcgaactgtcatctgccttctgctctttaggtgcttcagttcccatcaatctcttaagtttcatctccagatcattcacaacactcttgtggtcagtaagggatggtaattccaaggaggcccgccggatcttcgagcatcattcgcggtcttggcacgtctacgcaactgtatccgaagggcgtcgaagaggagggacggtaggccggtggcgacaaggtacggtagattcgaactggagtgtggaggtatcgtcgg

SEQ ID NO: 6426 - DNA, 679 bp, Zea mays
  misc_feature (1)..(68): n is a, c, g, or t
  misc_feature (669)..(679): n is a, c, g, or t
  Peptide Sequence Number=SeqID_11397
  Probeset Number=SeqID_20829
nnnnnnnnnnnnnnnnnnnnnnnnnnnnnnnnnnnnnnnnnnnnnnnnnnnnnnnnnnnnnnnnnnnncacacgctcccgtccgaggtttcgcgtgcggccatgctcgtccgcatcaacaccctcctccagggctactccggcatccgcttcgagatcctcgaggccatcaccaagctcatcaacaccggcgtcagcccgtgcctgccgctgcggggcaccatcaccgcgtcgggcgacctcgtcccgctgtcctacatcgccggcctcatcacggggcgtcccaacgcgcaggccgtcacggttgacggcaggaaggtggacgccgccgaggcgttcaagggcggcggcatcggaggcggcttcttcagctcaaccccaagggagggctgggcatcgtaaaagggaacgtccggggggtcggcgctccgccccatggtgtgtttcaaccccaacggcttccgcgtcttggtcaagggcctggtccgcgtcttctgggaggggatgaaagggaaagcccgaaaagggaccactttcccccaaggtaaggcaccccccgggggcccatcggggcctttgcccttttgggaacaattccgggaagggaggcccctttttaaaaacccccccaggggggagaaccccgtggacccccttttaaaccccaaannnnnnnnnnn

SEQ ID NO: 6427 - DNA, 528 bp, Zea mays
  misc_feature (21)..(21): n is a, c, g, or t
  misc_feature (24)..(27): n is a, c, g, or t
  misc_feature (32)..(36): n is a, c, g, or t
  misc_feature (38)..(38): n is a, c, g, or t
  misc_feature (45)..(46): n is a, c, g, or t
  misc_feature (50)..(61): n is a, c, g, or t
  misc_feature (68)..(72): n is a, c, g, or t
  misc_feature (74)..(75): n is a, c, g, or t
  misc_feature (77)..(83): n is a, c, g, or t
  misc_feature (85)..(87): n is a, c, g, or t
  misc_feature (120)..(120): n is a, c, g, or t
  misc_feature (126)..(130): n is a, c, g, or t
  misc_feature (146)..(146): n is a, c, g, or t
  misc_feature (164)..(166): n is a, c, g, or t
  misc_feature (168)..(170): n is a, c, g, or t
  misc_feature (178)..(180): n is a, c, g, or t
  misc_feature (182)..(182): n is a, c, g, or t
  misc_feature (192)..(202): n is a, c, g, or t
  misc_feature (204)..(205): n is a, c, g, or t
  misc_feature (210)..(223): n is a, c, g, or t
  misc_feature (225)..(229): n is a, c, g, or t
  misc_feature (234)..(236): n is a, c, g, or t
  misc_feature (245)..(247): n is a, c, g, or t
  misc_feature (250)..(252): n is a, c, g, or t
  misc_feature (254)..(256): n is a, c, g, or t
  misc_feature (258)..(259): n is a, c, g, or t
  misc_feature (268)..(274): n is a, c, g, or t
  misc_feature (279)..(281): n is a, c, g, or t
  misc_feature (298)..(304): n is a, c, g, or t
  misc_feature (311)..(313): n is a, c, g, or t
  misc_feature (345)..(350): n is a, c, g, or t
  misc_feature (365)..(365): n is a, c, g, or t
  misc_feature (368)..(370): n is a, c, g, or t
  misc_feature (377)..(379): n is a, c, g, or t
  misc_feature (381)..(385): n is a, c, g, or t
  misc_feature (387)..(387): n is a, c, g, or t
  misc_feature (393)..(396): n is a, c, g, or t
  misc_feature (406)..(406): n is a, c, g, or t
  misc_feature (408)..(408): n is a, c, g, or t
  misc_feature (420)..(420): n is a, c, g, or t
  misc_feature (428)..(430): n is a, c, g, or t
  misc_feature (432)..(440): n is a, c, g, or t
  misc_feature (443)..(443): n is a, c, g, or t
  misc_feature (450)..(454): n is a, c, g, or t
  misc_feature (463)..(467): n is a, c, g, or t
  misc_feature (471)..(473): n is a, c, g, or t
  misc_feature (483)..(492): n is a, c, g, or t
  misc_feature (501)..(505): n is a, c, g, or t
  misc_feature (510)..(514): n is a, c, g, or t
  misc_feature (516)..(524): n is a, c, g, or t
  misc_feature (526)..(526): n is a, c, g, or t
  Peptide Sequence Number=SeqID_11398
  Probeset Number=SeqID_20830
gcctatcggaatggaaggggngannnntagannnnncnactattnngggnnnnnnnnnnnnagcaccnnnnngnnannnnnnncnnngaggtaggcacgtgagctgaaatcacgacatcnatgacnnnnncagctggaactttaantacccataaaaattgaannnannnaccaaatnnntnctgaaagatnnnnnnnnnnncnntatgnnnnnnnnnnnnnngnnnnngaaannnctgaaaagnnngcnnntnnnanngatgagatnnnnnnnacagnnnaccctgatcaacacacnnnnnnnggggagnnnaaaactggcaagcaagaaaacataaacaatgnnnnnntgggaagacttgcancannngaagggnnnannnnncnactaannnnacattctgancntataccaaatgncaggcagnnngnnnnnnnnnccnaccttgnnnnnctatcatcnnnnnccannncagagaaaannnnnnnnnncatatatannnnnggtgnnnnnannnnnnnnncnag

SEQ ID NO: 6428 - DNA, 502 bp, Zea mays
  Probeset Number=SeqID_20831
cggacgcgtggcgtgacgcgtgggcggacgcgtgggcggacgcgtgggcggtggtgatggcggtggaagaaactagattgaccttgtttttgcatcatcacttgtctctgtttcaatcgttctgggatggtgaggtagccgcatctatgttcacgtttatggccaagccatgcatgtgtgtgtagtgcaaagataaataaggacgtcgagctaaatctatgcaaccctcgacgtggtgtgattgtattttaatttgtatttgaatcttgtgaagcatgtgtgtgtggtcatgtacttagaggtctccgtgagtcacgagtggcggtctaatacaaggattgacgtggtttagtgtttgtgatcttttattccatatcatgttttaagttgaagtttgtttgatccacaaatagttgggatgatgtgttatttgagttgtatggctatatgcatgaaaatgcaaaagtccggcgacagcaacggcgacagcaacggaattcga

SEQ ID NO: 6429 - DNA, 416 bp, Zea mays
  Peptide Sequence Number=SeqID_11399
  Probeset Number=SeqID_20832
caaacctgagacctgccacacttctccagggtgctagtgctggccctagcacctccaccgcaactccgacgcttggaccattccctcgcgtccgccccgccgccccccgtcgcaagctgagggcaccaggagacccttgtttgctactgctcaagttctacaggtaccaaaggttcacaataagccaataaaaagaccaagaaaagggttcaacaaaaagagcaaggggtaactgaagtgtgccctggtctggcacaccggactgtccggtgtgcaccagacagtgtccggtgcaccaccggacagtgtccggtgcaccagaggactccaagctgaacttcgcaccttcgggaaaactcagaagcgccgcgctataattcaccggactgtccggtgtacacggacagtgtccggtg

SEQ ID NO: 6430 - DNA, 272 bp, Zea mays
  Peptide Sequence Number=SeqID_11400
  Probeset Number=SeqID_20833
tcaattgatcgtctgttcctctgacccgcagcatctcaaccccatggcaaagattgaggtcgggtcctgtggtgcctgtggcgtcgtatgggttcatgtaaaggaaggcttgcatagtagacctaccaaatgatattaacatttttggcgaattagcccttttaagtgtgagcttgctacctatactgtgcaaattggcagagaatagggaatgctctgatcttgctgttgcatcaatggacctgatattgaagggatctgtaccttctaat

SEQ ID NO: 6431 - DNA, 790 bp, Zea mays
  misc_feature (14)..(14): n is a, c, g, or t
  misc_feature (39)..(42): n is a, c, g, or t
  misc_feature (46)..(52): n is a, c, g, or t
  misc_feature (263)..(263): n is a, c, g, or t
  Probeset Number=SeqID_20834
gtcccccccacttnccatcattctgagacggcttttttnnnntttnnnnnnnccatgactggagctccccgcggtggcggccgctctaggtggtactgtcggctccccggctgagtactttcaccgacgcaccgccgatcgggaacgcccgcctaggcgccatggtctggggctgcgtcgaatctgagaggctccagcttaaccatgacactctatggacaggtgcacctggtaattatacaaatccccctgcacctgctgtntctttctaaagtaaggagccttgttgacaacggaaagcaccctgaagcacatctgctgcttatgatcttatctggtggaccaaacccaggcttttcaccctctcggggaatttggacgggcctttgggggcgcctccgggccccaatttccgcggggggttaggttttcccctggaacagggcccggccaaataacggggggggtaataaccccaccggggaaaattttccccccacccccctacaagcgtttgggataaaataccccgaaaaaacccggaaggggtttctcccaggggtttttattagaccccaaaacccaaaatattgggaaccctgcaagaataaccttcgcggggggggttgtcccccccccacccccgcaaaaaaaaaaaagggggggtgcacacccaaagagagaaaaaattttgcggggtttttttctccacaaaaaggggggggccaaaaaacgggggattttttttggaaggacacggctggtatttgtttcgcccccccccttttta

SEQ ID NO: 6432 - DNA, 790 bp, Zea mays
  misc_feature (528)..(528): n is a, c, g, or t
  misc_feature (739)..(745): n is a, c, g, or t
  misc_feature (749)..(752): n is a, c, g, or t
  misc_feature (777)..(777): n is a, c, g, or t
  Peptide Sequence Number=SeqID_11401
  Probeset Number=SeqID_20835
taaaaagggggggggcgaaacaaataccagccgtgtccttccaaaaaaaatcccccgttttttggcccccccctttttgtggagaaaaaaaccccgcaaaattttttctctctttgggtgtgcacccccccttttttttttttgcgggggtgggggggggacaaccccccccgcgaaggttattcttgcagggttcccaatattttgggttttggggtctaataaaaacccctgggagaaaccccttccgggttttttcggggtattttatcccaaacgcttgtaggggggtggggggaaaattttccccggtggggttattaccccccccgttatttggccgggccctgttccaggggaaaacctaaccccccgcggaaattggggcccggaggcgcccccaaaggcccgtccaaattccccgagagggtgaaaagcctgggtttggtccaccagataagatcataagcagcagatgtgcttcagggtgctttccgttgtcaacaaggctccttactttagaaaganacagcaggtgcagggggatttgtataattaccaggtgcacctgtccatagagtgtcatggttaagctggagcctctcagattcgacgcagccccagaccatggcgcctaggcgggcgttcccgatcggcggtgcgtcggtgaaagtactcagccggggagccgacagtaccacctagagcggccgccaccgcggggagctccagtcatggnnnnnnnaaannnnaaaaaagccgtctcagaatgatggnaagtgggggggac

SEQ ID NO: 6433 - DNA, 325 bp, Zea mays
  Peptide Sequence Number=SeqID_11402
  Probeset Number=SeqID_20836
ttttttttttttttttgaccaccagaacaaagcatttatctttcgccagctacagttgtagtatggctacaccccaatgagagagagagagagagtagacgcaaaacttacaagaaagagaaagagccagaacaaggtcagagctcagctcagcttagcaagcgccttcccacacccacaggccacaacggcatggcatggcgcccaggcgcacgtcctcctctttcccctccattgttttgctccccgcctctctctctctctctcctgcctcgcgcgcttgtgcggttgggctcggcggtggtttcttggagcagcggcgtgt

SEQ ID NO: 6434 - DNA, 702 bp, Zea mays
  misc_feature (1)..(1): n is a, c, g, or t
  Probeset Number=SeqID_20837
ntaatatcgccgcggcctcgcacctccatctgttctatatcgccccattgctcgctcgccaagagttcttcttgttaggcaaggcaaaagcagaagcaaaaaaagaaaggtcttgttgccgatggtgagctcaggattctcgtggacgcttccggaccaccccaagctccccaaggggaaaccggtgggctgtcgccgcgctggacgtatgggacgaggccaaccccgatcaagtacaactggatccatgtcgctcacaactcctgtcatggcacctcgctaaaaaatggggcctcctgagaaactgtagaactaagtggaaagggtcattgaaaacaggctgcggggtcctccccatctggatgattgacaagggccacacctttcaaccttggtccaccaccggcaccttgggggcgttgggccacgagattctgccccccccaaggggggctacgtgcctcaggctgcacttagaacaactctggccattagaagaaaagcccttcagtatgtggtccccccgcgcatctatcaccccctctcatatataccctccactccaatggctgccagaaccgactgctctcccttctccccaccaacatccacacccccccgcccaccgcacccccggccgcagtgagttgacaccaaagatagcaaagaataaagatatgggatatggaaccatggggagag

SEQ ID NO: 6435 - DNA, 702 bp, Zea mays
  misc_feature (702)..(702): n is a, c, g, or t
  Peptide Sequence Number=SeqID_11403
  Probeset Number=SeqID_20838
ctctccccatggttccatatcccatatctttattctttgctatctttggtgtcaactcactgcggccgggggtgcggtgggcgggggggtgtggatgttggtggggagaagggagagcagtcggttctggcagccattggagtggagggtatatatgagagggggtgatagatgcgcggggggaccacatactgaagggcttttcttctaatggccagagttgttctaagtgcagcctgaggcacgtagccccccttggggggggcagaatctcgtggcccaacgcccccaaggtgccggtggtggaccaaggttgaaaggtgtggcccttgtcaatcatccagatggggaggaccccgcagcctgttttcaatgaccctttccacttagttctacagtttctcaggaggccccattttttagcgaggtgccatgacaggagttgtgagcgacatggatccagttgtacttgatcggggttggcctcgtcccatacgtccagcgcggcgacagcccaccggtttccccttggggagcttggggtggtccggaagcgtccacgagaatcctgagctcaccatcggcaacaagacctttctttttttgcttctgcttttgccttgcctaacaagaagaactcttggcgagcgagcaatggggcgatatagaacagatggaggtgcgaggccgcggcgatattan

SEQ ID NO: 6436 - DNA, 520 bp, Zea mays
  misc_feature (316)..(316): n is a, c, g, or t
  misc_feature (319)..(319): n is a, c, g, or t
  misc_feature (329)..(329): n is a, c, g, or t
  misc_feature (364)..(364): n is a, c, g, or t
  misc_feature (384)..(384): n is a, c, g, or t
  misc_feature (462)..(462): n is a, c, g, or t
  misc_feature (503)..(503): n is a, c, g, or t
  misc_feature (505)..(505): n is a, c, g, or t
  Probeset Number=SeqID_20839
ttccaagtgaaaattcgtttatttttccttagaaaaataagaatccttagagaaaatggagttcccaaactaggcttaacatgataaaaactgatcaggtttcgggtacccattaccttttcctacttcggtagcattgttgcggtcctgtttttttttttttggcctggcaatggttttatgtttgtttgcaattctaattagcaggcaacgaaattcaagccgaggagaagcgtgggcaatccggattctcgcgagctagcccaggcgaatagggataccgagaacagcttcatggcccaaaaaaggatttttnganacccggtttntagtgcgattgaaacgatgttcagttaccaagagnggaaaatccttgtgcactgnaaccctgtatccaattgtatccccccaccccccatataccggcaaattcttggttacgtaacaaatggcccctttggnaaaacatcccttgaaaaaaagggcattgaggcggttgcccntnacccatttggggcaa

SEQ ID NO: 6437 - DNA, 520 bp, Zea mays
  misc_feature (16)..(16): n is a, c, g, or t
  misc_feature (18)..(18): n is a, c, g, or t
  misc_feature (59)..(59): n is a, c, g, or t
  misc_feature (137)..(137): n is a, c, g, or t
  misc_feature (157)..(157): n is a, c, g, or t
  misc_feature (192)..(192): n is a, c, g, or t
  misc_feature (202)..(202): n is a, c, g, or t
  misc_feature (205)..(205): n is a, c, g, or t
  Peptide Sequence Number=SeqID_11404
  Probeset Number=SeqID_20840
ttgccccaaatgggtnangggcaaccgcctcaatgccctttttttcaagggatgttttnccaaaggggccatttgttacgtaaccaagaatttgccggtatatggggggtggggggatacaattggatacagggttncagtgcacaaggattttccnctcttggtaactgaacatcgtttcaatcgcactanaaaccgggtntcnaaaaatccttttttgggccatgaagctgttctcggtatccctattcgcctgggctagctcgcgagaatccggattgcccacgcttctcctcggcttgaatttcgttgcctgctaattagaattgcaaacaaacataaaaccattgccaggccaaaaaaaaaaaaacaggaccgcaacaatgctaccgaagtaggaaaaggtaatgggtacccgaaacctgatcagtttttatcatgttaagcctagtttgggaactccattttctctaaggattcttatttttctaaggaaaaataaacgaattttcacttggaa

SEQ ID NO: 6438 - DNA, 728 bp, Zea mays
  misc_feature (1)..(1): n is a, c, g, or t
  misc_feature (3)..(3): n is a, c, g, or t
  misc_feature (6)..(10): n is a, c, g, or t
  misc_feature (15)..(19): n is a, c, g, or t
  misc_feature (21)..(23): n is a, c, g, or t
  misc_feature (43)..(45): n is a, c, g, or t
  misc_feature (47)..(47): n is a, c, g, or t
  misc_feature (169)..(169): n is a, c, g, or t
  misc_feature (399)..(399): n is a, c, g, or t
  misc_feature (439)..(439): n is a, c, g, or t
  misc_feature (451)..(451): n is a, c, g, or t
  misc_feature (460)..(460): n is a, c, g, or t
  misc_feature (493)..(493): n is a, c, g, or t
  misc_feature (496)..(496): n is a, c, g, or t
  misc_feature (500)..(501): n is a, c, g, or t
  misc_feature (503)..(503): n is a, c, g, or t
  misc_feature (508)..(508): n is a, c, g, or t
  misc_feature (511)..(511): n is a, c, g, or t
  misc_feature (517)..(517): n is a, c, g, or t
  misc_feature (522)..(522): n is a, c, g, or t
  misc_feature (528)..(529): n is a, c, g, or t
  misc_feature (536)..(536): n is a, c, g, or t
  misc_feature (539)..(542): n is a, c, g, or t
  misc_feature (546)..(546): n is a, c, g, or t
  misc_feature (548)..(549): n is a, c, g, or t
  misc_feature (553)..(554): n is a, c, g, or t
  misc_feature (559)..(561): n is a, c, g, or t
  misc_feature (563)..(564): n is a, c, g, or t
  misc_feature (569)..(569): n is a, c, g, or t
  misc_feature (573)..(574): n is a, c, g, or t
  misc_feature (576)..(576): n is a, c, g, or t
  misc_feature (583)..(583): n is a, c, g, or t
  misc_feature (585)..(585): n is a, c, g, or t
  misc_feature (587)..(590): n is a, c, g, or t
  misc_feature (592)..(592): n is a, c, g, or t
  misc_feature (594)..(594): n is a, c, g, or t
  misc_feature (597)..(599): n is a, c, g, or t
  misc_feature (601)..(728): n is a, c, g, or t
  Probeset Number=SeqID_20841
nantgnnnnnctcgnnnnngnnngggcgaacgccctgcgcttnnntnactcgggtagaacactcgcctcttccgactccgccataccaccaatagatccagctatggcggtgtagtcgaattcaatcctgagcgcgaacacacgaaatcgccgcaggctcgatatacgncagggctttcaccgcccaacagcatcttgcagcgactgtgcaccagttcggggggaaaaaggaaccgtatcaactgaatcccagcgcaccggggcggggatggattttgacatggacggctacgtagacccctacgaggaggccgcggccgagggcgactccgacgaccctgacgaggacgactcggatgcggagagcgactacgaggagaagtcgttcggcctcctcangtccggcaagcaccgggtgcgcaacccggacggtaccttncgctgccccttntgcctcggnaagaagaagcagggttacaagatcaaggacttngtncagnntngcganggnattggngtctncagcanncaccgangtnnnngttngnnatcnngcgannnanngggcntttnnangctttgngngnnnngntncgnnntnnnnnnnnnnnnnnnnnnnnnnnnnnnnnnnnnnnnnnnnnnnnnnnnnnnnnnnnnnnnnnnnnnnnnnnnnnnnnnnnnnnnnnnnnnnnnnnnnnnnnnnnnnnnnnnnnnnnnnnnnnnnnnnn

SEQ ID NO: 6439 - DNA, 602 bp, Zea mays
  misc_feature (1)..(1): n is a, c, g, or t
  Peptide Sequence Number=SeqID_11405
  Probeset Number=SeqID_20842
naacgtttagataaaatgtgaaagaaatatcatatacatacaaaagatggaaaaagactatgaactgacattatatcataaaaatctattgaagttgacatcaatatgtatacaaaatatcataaaaacagggtcgttgatctgccaccgctcgcgtctagagaaggctgtcgtcgtagcccacgcataggaaaagtcggcgtcgtcgcaggaggtgagatgccagtgtgtgccacttcggggctcgcgccttcaaggagccaacctcgcgcgtgtggatccaccgccgcgtgcgcacctctcagatccattgccgtcgcgctccgtgagagaacccccgcacacgccttggatgcacgttgccaccatgcacgcctcaggtggccgcagctgcggcacagcctcaaggagccaccgccgtcgtgcgaggtgaaggtgaccttcgcagatagcactgcggtgctcaatgccacagttgattcctctcgcttttgccatttctttaagcatcttgaggcagaagtacacgaggttgacgccgaactggagagtgccgcaggtcaaggtcttggtgagccacaccgtcgctctgagcgtgggcg

SEQ ID NO: 6440 - DNA, 871 bp, Zea mays
  misc_feature (1)..(23): n is a, c, g, or t
  misc_feature (738)..(743): n is a, c, g, or t
  misc_feature (759)..(763): n is a, c, g, or t
  misc_feature (773)..(773): n is a, c, g, or t
  misc_feature (806)..(806): n is a, c, g, or t
  misc_feature (820)..(822): n is a, c, g, or t
  misc_feature (827)..(831): n is a, c, g, or t
  misc_feature (833)..(840): n is a, c, g, or t
  misc_feature (842)..(842): n is a, c, g, or t
  misc_feature (844)..(844): n is a, c, g, or t
  misc_feature (856)..(867): n is a, c, g, or t
  misc_feature (871)..(871): n is a, c, g, or t
  Probeset Number=SeqID_20843
nnnnnnnnnnnnnnnnnnnnnnnaatcaaatgtacagagttcttgtggactcactagttcacagagagctgtatcggcaggagacctagattctatctctcttaaatcaggcaaatcaagcttatctgatttgatttttgagaatgataatgttcaccaaactgaaaaatcctcaaattccgctgctccaagtttcatagccttttctgatgctattagtgctccaaatcaagctagctttgattccaaagcttctcaggaacaccatgccactaccatggatcaatctgtagatctattttcaaatacgcttactgaaactccatctgctgataaggtgataccagcagctccttcaatggacaatgctgggtgggccacatttgatacacctccagaacaaaagcagcctgcattcactgggctttcttatgtttctgctacaagcatcgataaacaagctcttaatcatgatttgttttcatctgaatcaaatgatgagctaacatggttacggagctctaaggatgatgcttcggttaccaatcataatcagtctactgctacatctcttgatacatgcagttctgagccttggagtattttcgatgtctccagtggtagcacccagtacactgtcaagggagatctatcattaatgacttctagattgcaagagcctaaaggaacaatgaccgaaaatagctctcagctttggcattcatttgatgatgctannnnnntcgtttgtgctcagcnnnnnattgatgacnacagcaatacagcaagcatttctctatcaaccngcaatccatttatnnnctctnnnnntnnnnnnnntntnatgatgatgatnnnnnnnnnnnntgan

SEQ ID NO: 6441 - DNA, 400 bp, Zea mays
  Peptide Sequence Number=SeqID_11406
  Probeset Number=SeqID_20844
actcctgtaagggccattcctttggacttcggtctacttttgtttccctgttgacacttccacctgtaggcggtcgacaaaccgccaggggccgatctccacccggggctgcttgggctgcagccccgggcggcactcgcggcactgccatgcgcccagccggttagccagagccaggcgcgcagcgcgctcgaccggcgatcgcacaccgcagcacaggagtagaggcccgaggttaattttgtgaatttgtgatttgaagttggatttgaagttttgatttgattatttatatggtagtaattccatgtttaattataggaataagatagacaaatttttgttatagtcttaacttagtagccccctcttggattaatcctggatccgccactgccgc

SEQ ID NO: 6442 - DNA, 837 bp, Zea mays
  misc_feature (1)..(53): n is a, c, g, or t
  misc_feature (56)..(60): n is a, c, g, or t
  misc_feature (62)..(65): n is a, c, g, or t
  misc_feature (67)..(72): n is a, c, g, or t
  misc_feature (104)..(106): n is a, c, g, or t
  misc_feature (160)..(161): n is a, c, g, or t
  misc_feature (173)..(175): n is a, c, g, or t
  misc_feature (187)..(189): n is a, c, g, or t
  misc_feature (206)..(208): n is a, c, g, or t
  misc_feature (837)..(837): n is a, c, g, or t
  Peptide Sequence Number=SeqID_11407
  Probeset Number=SeqID_20845
nnnnnnnnnnnnnnnnnnnnnnnnnnnnnnnnnnnnnnnnnnnnnnnnnnnnnggnnnnngnnnnannnnnntaccttgaaactgaggtacttcatttctattnnntaattgctgctaaaatatggttacattattaacgtctggctgtttcgtcacgcnnctaccaacatannnatatcttctccnnnatctgcataacaaattnnntaatttgaatccttcaatcaagccttttcttagtacttctaaagcaaaatatactactactcattgccataagagcacacaagattttcttgacaaaatccagccactattcttagttttaaggaagcatctggatggagcagtttcaatgatcaaagatggtaaccttctattccataatttttgcttcgtgttacttttacaatgtttgaattaataattagtgggctgagtcggtttcttaatggtcggggttgtatgtgctgggagggattacaccccctcctttgtggatcttttcttcttagtgaaatgacacaactttcctgcattgcttgagaaaaacaatgtccgcatttcgtataatccttcattgaatgtccttgctttcgattggtaacatgataagctactactcttcagaattagagagctgtttagatgactggagttcacattcatcttctgctggcaacccaaacataccatatgtgataacatgaagacctgttttttatgctagctgtttacgtgcaatttgttccttccacatcgtgattcgggtcgtggagattttgaagatcttatacattgcgggcgagcgaagtcacgactcaatttaagtcggn

SEQ ID NO: 6443 - DNA, 670 bp, Zea mays
  misc_feature (2)..(4): n is a, c, g, or t
  misc_feature (16)..(24): n is a, c, g, or t
  misc_feature (49)..(51): n is a, c, g, or t
  misc_feature (90)..(93): n is a, c, g, or t
  misc_feature (96)..(98): n is a, c, g, or t
  misc_feature (125)..(129): n is a, c, g, or t
  misc_feature (223)..(223): n is a, c, g, or t
  misc_feature (236)..(236): n is a, c, g, or t
  misc_feature (238)..(238): n is a, c, g, or t
  misc_feature (262)..(263): n is a, c, g, or t
  misc_feature (266)..(266): n is a, c, g, or t
  misc_feature (268)..(269): n is a, c, g, or t
  misc_feature (271)..(271): n is a, c, g, or t
  misc_feature (273)..(274): n is a, c, g, or t
  misc_feature (277)..(278): n is a, c, g, or t
  misc_feature (285)..(285): n is a, c, g, or t
  misc_feature (288)..(289): n is a, c, g, or t
  misc_feature (291)..(291): n is a, c, g, or t
  misc_feature (295)..(298): n is a, c, g, or t
  misc_feature (301)..(301): n is a, c, g, or t
  misc_feature (304)..(306): n is a, c, g, or t
  misc_feature (310)..(312): n is a, c, g, or t
  misc_feature (314)..(315): n is a, c, g, or t
  misc_feature (318)..(319): n is a, c, g, or t
  misc_feature (322)..(323): n is a, c, g, or t
  misc_feature (327)..(327): n is a, c, g, or t
  misc_feature (330)..(330): n is a, c, g, or t
  misc_feature (332)..(332): n is a, c, g, or t
  misc_feature (335)..(335): n is a, c, g, or t
  misc_feature (337)..(338): n is a, c, g, or t
  misc_feature (343)..(343): n is a, c, g, or t
  misc_feature (347)..(348): n is a, c, g, or t
  misc_feature (351)..(352): n is a, c, g, or t
  misc_feature (354)..(354): n is a, c, g, or t
  misc_feature (357)..(357): n is a, c, g, or t
  misc_feature (359)..(359): n is a, c, g, or t
  misc_feature (364)..(364): n is a, c, g, or t
  misc_feature (366)..(366): n is a, c, g, or t
  misc_feature (377)..(377): n is a, c, g, or t
  misc_feature (379)..(379): n is a, c, g, or t
  misc_feature (382)..(383): n is a, c, g, or t
  misc_feature (385)..(385): n is a, c, g, or t
  misc_feature (387)..(387): n is a, c, g, or t
  misc_feature (389)..(389): n is a, c, g, or t
  misc_feature (394)..(394): n is a, c, g, or t
  misc_feature (396)..(396): n is a, c, g, or t
  misc_feature (398)..(398): n is a, c, g, or t
  misc_feature (402)..(403): n is a, c, g, or t
  misc_feature (409)..(409): n is a, c, g, or t
  misc_feature (413)..(415): n is a, c, g, or t
  misc_feature (417)..(419): n is a, c, g, or t
  misc_feature (423)..(423): n is a, c, g, or t
  misc_feature (427)..(427): n is a, c, g, or t
  misc_feature (430)..(430): n is a, c, g, or t
  misc_feature (434)..(434): n is a, c, g, or t
  misc_feature (437)..(438): n is a, c, g, or t
  misc_feature (440)..(440): n is a, c, g, or t
  misc_feature (452)..(452): n is a, c, g, or t
  misc_feature (455)..(456): n is a, c, g, or t
  misc_feature (459)..(459): n is a, c, g, or t
  misc_feature (463)..(463): n is a, c, g, or t
  misc_feature (465)..(465): n is a, c, g, or t
  misc_feature (467)..(467): n is a, c, g, or t
  misc_feature (475)..(476): n is a, c, g, or t
  misc_feature (478)..(478): n is a, c, g, or t
  misc_feature (486)..(486): n is a, c, g, or t
  misc_feature (488)..(488): n is a, c, g, or t
  misc_feature (491)..(491): n is a, c, g, or t
  misc_feature (495)..(495): n is a, c, g, or t
  misc_feature (500)..(500): n is a, c, g, or t
  misc_feature (503)..(503): n is a, c, g, or t
  misc_feature (505)..(505): n is a, c, g, or t
  misc_feature (512)..(512): n is a, c, g, or t
  misc_feature (514)..(514): n is a, c, g, or t
  misc_feature (517)..(517): n is a, c, g, or t
  misc_feature (520)..(520): n is a, c, g, or t
  misc_feature (523)..(524): n is a, c, g, or t
  misc_feature (528)..(528): n is a, c, g, or t
  misc_feature (533)..(533): n is a, c, g, or t
  misc_feature (535)..(535): n is a, c, g, or t
  misc_feature (538)..(540): n is a, c, g, or t
  misc_feature (548)..(549): n is a, c, g, or t
  misc_feature (551)..(551): n is a, c, g, or t
  misc_feature (555)..(556): n is a, c, g, or t
  misc_feature (558)..(558): n is a, c, g, or t
  misc_feature (569)..(569): n is a, c, g, or t
  misc_feature (572)..(572): n is a, c, g, or t
  misc_feature (577)..(577): n is a, c, g, or t
  misc_feature (581)..(581): n is a, c, g, or t
  misc_feature (585)..(587): n is a, c, g, or t
  misc_feature (589)..(589): n is a, c, g, or t
  misc_feature (592)..(593): n is a, c, g, or t
  misc_feature (596)..(597): n is a, c, g, or t
  misc_feature (599)..(599): n is a, c, g, or t
  misc_feature (605)..(606): n is a, c, g, or t
  misc_feature (609)..(611): n is a, c, g, or t
  misc_feature (613)..(614): n is a, c, g, or t
  misc_feature (624)..(624): n is a, c, g, or t
  misc_feature (628)..(629): n is a, c, g, or t
  misc_feature (639)..(639): n is a, c, g, or t
  misc_feature (642)..(642): n is a, c, g, or t
  misc_feature (647)..(647): n is a, c, g, or t
  misc_feature (651)..(651): n is a, c, g, or t
  misc_feature (653)..(653): n is a, c, g, or t
  misc_feature (657)..(657): n is a, c, g, or t
  misc_feature (660)..(660): n is a, c, g, or t
  misc_feature (662)..(662): n is a, c, g, or t
  misc_feature (665)..(666): n is a, c, g, or t
  misc_feature (668)..(669): n is a, c, g, or t
  Peptide Sequence Number=SeqID_11408
  Probeset Number=SeqID_20846
gnnngggctggcctgnnnnnnnnntgccgcaagcccgcaccgcaactgnnnttgagggacggcaggccgtgccgtgccgtcacgacagannnnacnnnagagagctagtgcgtgccagcgcgcgnnnnngagagagagacccgcatctgcagctccaaaaccagctctccaccactagataatctcgtctcgccagggacgggaacggcaggccgtgccgtcncgagactcctagngnccgagagagagagagagcgtgcanntgngnntncnnccnnctccccnttnntntccnnnntcntcnnnttcnnntnntanntanncgcnccncntcncnntgttncccnnatnnanccncngcttnantttttttcgtncnccnncncntnttttncncncccnncacccngccnnncnnnttgnctcnctntttntanncncgctcccccctnctnnttnaccntncntctcctgnnancgtccttncnccnctcntgtcntantntattgcntnttnttnttnnccgncctcncntgnnngccccccnncncccnntnttttcctctcnccntccancccnccgnnntnccnntcnntncccccnnagnnntnnctcccccgcnctcnnattatttctnctncgctntgtncntaancantnatnntnnc

SEQ ID NO: 6444 - DNA, 670 bp, Zea mays
  misc_feature (1)..(70): n is a, c, g, or t
  misc_feature (72)..(72): n is a, c, g, or t
  misc_feature (74)..(75): n is a, c, g, or t
  misc_feature (78)..(79): n is a, c, g, or t
  misc_feature (82)..(82): n is a, c, g, or t
  misc_feature (84)..(86): n is a, c, g, or t
  misc_feature (90)..(90): n is a, c, g, or t
  misc_feature (94)..(94): n is a, c, g, or t
  misc_feature (99)..(99): n is a, c, g, or t
  misc_feature (102)..(102): n is a, c, g, or t
  misc_feature (113)..(113): n is a, c, g, or t
  misc_feature (115)..(116): n is a, c, g, or t
  misc_feature (120)..(120): n is a, c, g, or t
  misc_feature (122)..(123): n is a, c, g, or t
  misc_feature (131)..(133): n is a, c, g, or t
  misc_feature (136)..(136): n is a, c, g, or t
  misc_feature (138)..(138): n is a, c, g, or t
  misc_feature (143)..(143): n is a, c, g, or t
  misc_feature (147)..(148): n is a, c, g, or t
  misc_feature (151)..(151): n is a, c, g, or t
  misc_feature (154)..(154): n is a, c, g, or t
  misc_feature (157)..(157): n is a, c, g, or t
  misc_feature (159)..(159): n is a, c, g, or t
  misc_feature (166)..(166): n is a, c, g, or t
  misc_feature (168)..(168): n is a, c, g, or t
  misc_feature (171)..(171): n is a, c, g, or t
  misc_feature (176)..(176): n is a, c, g, or t
  misc_feature (180)..(180): n is a, c, g, or t
  misc_feature (183)..(183): n is a, c, g, or t
  misc_feature (185)..(185): n is a, c, g, or t
  misc_feature (193)..(193): n is a, c, g, or t
  misc_feature (195)..(196): n is a, c, g, or t
  misc_feature (204)..(204): n is a, c, g, or t
  misc_feature (206)..(206): n is a, c, g, or t
  misc_feature (208)..(208): n is a, c, g, or t
  misc_feature (212)..(212): n is a, c, g, or t
  misc_feature (215)..(216): n is a, c, g, or t
  misc_feature (219)..(219): n is a, c, g, or t
  misc_feature (231)..(231): n is a, c, g, or t
  misc_feature (233)..(234): n is a, c, g, or t
  misc_feature (237)..(237): n is a, c, g, or t
  misc_feature (241)..(241): n is a, c, g, or t
  misc_feature (244)..(244): n is a, c, g, or t
  misc_feature (248)..(248): n is a, c, g, or t
  misc_feature (252)..(254): n is a, c, g, or t
  misc_feature (256)..(258): n is a, c, g, or t
  misc_feature (262)..(262): n is a, c, g, or t
  misc_feature (268)..(269): n is a, c, g, or t
  misc_feature (273)..(273): n is a, c, g, or t
  misc_feature (275)..(275): n is a, c, g, or t
  misc_feature (277)..(277): n is a, c, g, or t
  misc_feature (282)..(282): n is a, c, g, or t
  misc_feature (284)..(284): n is a, c, g, or t
  misc_feature (286)..(286): n is a, c, g, or t
  misc_feature (288)..(289): n is a, c, g, or t
  misc_feature (292)..(292): n is a, c, g, or t
  misc_feature (294)..(294): n is a, c, g, or t
  misc_feature (305)..(305): n is a, c, g, or t
  misc_feature (307)..(307): n is a, c, g, or t
  misc_feature (312)..(312): n is a, c, g, or t
  misc_feature (314)..(314): n is a, c, g, or t
  misc_feature (317)..(317): n is a, c, g, or t
  misc_feature (319)..(320): n is a, c, g, or t
  misc_feature (323)..(324): n is a, c, g, or t
  misc_feature (328)..(328): n is a, c, g, or t
  misc_feature (333)..(334): n is a, c, g, or t
  misc_feature (336)..(336): n is a, c, g, or t
  misc_feature (339)..(339): n is a, c, g, or t
  misc_feature (341)..(341): n is a, c, g, or t
  misc_feature (344)..(344): n is a, c, g, or t
  misc_feature (348)..(349): n is a, c, g, or t
  misc_feature (352)..(353): n is a, c, g, or t
  misc_feature (356)..(357): n is a, c, g, or t
  misc_feature (359)..(361): n is a, c, g, or t
  misc_feature (365)..(367): n is a, c, g, or t
  misc_feature (370)..(370): n is a, c, g, or t
  misc_feature (373)..(376): n is a, c, g, or t
  misc_feature (380)..(380): n is a, c, g, or t
  misc_feature (382)..(383): n is a, c, g, or t
  misc_feature (386)..(386): n is a, c, g, or t
  misc_feature (393)..(394): n is a, c, g, or t
  misc_feature (397)..(398): n is a, c, g, or t
  misc_feature (400)..(400): n is a, c, g, or t
  misc_feature (402)..(403): n is a, c, g, or t
  misc_feature (405)..(405): n is a, c, g, or t
  misc_feature (408)..(409): n is a, c, g, or t
  misc_feature (433)..(433): n is a, c, g, or t
  misc_feature (435)..(435): n is a, c, g, or t
  misc_feature (448)..(448): n is a, c, g, or t
  misc_feature (542)..(546): n is a, c, g, or t
  misc_feature (573)..(575): n is a, c, g, or t
  misc_feature (578)..(581): n is a, c, g, or t
  misc_feature (620)..(622): n is a, c, g, or t
  misc_feature (647)..(655): n is a, c, g, or t
  misc_feature (667)..(669): n is a, c, g, or t
  Probeset Number=SeqID_20847
nnnnnnnnnnnnnnnnnnnnnnnnnnnnnnnnnnnnnnnnnnnnnnnnnnnnnnnnnnnnnnnnnnnnnngnanngannggnannncggngggntgganggngagaggaaaananngggngnnggggggcnnncangngaggncggnnaanaanaanangcaatanantangacangagnggngnaaggacgntnncaggagangnanggtnaannagnaggggggagcgngnntanaaanagngagncaannngnnnggcngggtgnngggngngnaaaanangngnnggngnacgaaaaaaantnaagcngnggntnnatnngggnaacanngngangnggngcgnntanntannannngaannngangannnngganannaanggggagnnggnngnanncncanntgcacgctctctctctctctcggncnctaggagtctcgngacggcacggcctgccgttcccgtccctggcgagacgagattatctagtggtggagagctggttttggagctgcagatgcgggtctctctctcnnnnncgcgcgctggcacgcactagctctctnnngtnnnntctgtcgtgacggcacggcacggcctgccgtccctcaannncagttgcggtgcgggcttgcggcannnnnnnnncaggccagcccnnnc

SEQ ID NO: 6445 - DNA, 1039 bp, Zea mays
  misc_feature (79)..(79): n is a, c, g, or t
  misc_feature (110)..(110): n is a, c, g, or t
  misc_feature (122)..(122): n is a, c, g, or t
  misc_feature (129)..(129): n is a, c, g, or t
  misc_feature (138)..(138): n is a, c, g, or t
  misc_feature (141)..(141): n is a, c, g, or t
  misc_feature (143)..(143): n is a, c, g, or t
  misc_feature (145)..(145): n is a, c, g, or t
  misc_feature (150)..(150): n is a, c, g, or t
  misc_feature (152)..(152): n is a, c, g, or t
  misc_feature (154)..(154): n is a, c, g, or t
  misc_feature (162)..(162): n is a, c, g, or t
  misc_feature (170)..(170): n is a, c, g, or t
  misc_feature (172)..(173): n is a, c, g, or t
  misc_feature (177)..(177): n is a, c, g, or t
  misc_feature (181)..(181): n is a, c, g, or t
  misc_feature (185)..(186): n is a, c, g, or t
  misc_feature (193)..(193): n is a, c, g, or t
  misc_feature (199)..(199): n is a, c, g, or t
  misc_feature (202)..(202): n is a, c, g, or t
  misc_feature (212)..(213): n is a, c, g, or t
  misc_feature (220)..(221): n is a, c, g, or t
  misc_feature (223)..(223): n is a, c, g, or t
  misc_feature (225)..(227): n is a, c, g, or t
  misc_feature (233)..(233): n is a, c, g, or t
  misc_feature (236)..(236): n is a, c, g, or t
  misc_feature (238)..(238): n is a, c, g, or t
  misc_feature (240)..(240): n is a, c, g, or t
  misc_feature (245)..(245): n is a, c, g, or t
  misc_feature (248)..(248): n is a, c, g, or t
  misc_feature (251)..(251): n is a, c, g, or t
  misc_feature (254)..(254): n is a, c, g, or t
  misc_feature (256)..(256): n is a, c, g, or t
  misc_feature (260)..(260): n is a, c, g, or t
  misc_feature (262)..(262): n is a, c, g, or t
  misc_feature (264)..(264): n is a, c, g, or t
  misc_feature (271)..(271): n is a, c, g, or t
  misc_feature (274)..(274): n is a, c, g, or t
  misc_feature (276)..(276): n is a, c, g, or t
  misc_feature (289)..(289): n is a, c, g, or t
  misc_feature (291)..(292): n is a, c, g, or t
  misc_feature (301)..(301): n is a, c, g, or t
  misc_feature (304)..(304): n is a, c, g, or t
  misc_feature (310)..(310): n is a, c, g, or t
  misc_feature (319)..(319): n is a, c, g, or t
  misc_feature (333)..(334): n is a, c, g, or t
  misc_feature (337)..(337): n is a, c, g, or t
  misc_feature (340)..(340): n is a, c, g, or t
  misc_feature (343)..(343): n is a, c, g, or t
  misc_feature (346)..(346): n is a, c, g, or t
  misc_feature (350)..(350): n is a, c, g, or t
  misc_feature (352)..(352): n is a, c, g, or t
  misc_feature (354)..(356): n is a, c, g, or t
  misc_feature (361)..(361): n is a, c, g, or t
  misc_feature (363)..(364): n is a, c, g, or t
  misc_feature (366)..(367): n is a, c, g, or t
  misc_feature (370)..(370): n is a, c, g, or t
  misc_feature (372)..(373): n is a, c, g, or t
  misc_feature (375)..(376): n is a, c, g, or t
  misc_feature (379)..(379): n is a, c, g, or t
  misc_feature (381)..(382): n is a, c, g, or t
  misc_feature (390)..(392): n is a, c, g, or t
  misc_feature (397)..(397): n is a, c, g, or t
  misc_feature (402)..(402): n is a, c, g, or t
  misc_feature (404)..(404): n is a, c, g, or t
  misc_feature (407)..(407): n is a, c, g, or t
  misc_feature (409)..(410): n is a, c, g, or t
  misc_feature (412)..(413): n is a, c, g, or t
  misc_feature (418)..(418): n is a, c, g, or t
  misc_feature (434)..(434): n is a, c, g, or t
  misc_feature (436)..(436): n is a, c, g, or t
  misc_feature (439)..(439): n is a, c, g, or t
  misc_feature (443)..(443): n is a, c, g, or t
  misc_feature (454)..(454): n is a, c, g, or t
  misc_feature (461)..(461): n is a, c, g, or t
  misc_feature (470)..(470): n is a, c, g, or t
  misc_feature (474)..(474): n is a, c, g, or t
  misc_feature (476)..(476): n is a, c, g, or t
  misc_feature (514)..(514): n is a, c, g, or t
  misc_feature (525)..(525): n is a, c, g, or t
  misc_feature (558)..(558): n is a, c, g, or t
  misc_feature (565)..(565): n is a, c, g, or t
  misc_feature (570)..(570): n is a, c, g, or t
  misc_feature (577)..(577): n is a, c, g, or t
  misc_feature (590)..(591): n is a, c, g, or t
  misc_feature (601)..(601): n is a, c, g, or t
  misc_feature (604)..(604): n is a, c, g, or t
  misc_feature (613)..(613): n is a, c, g, or t
  misc_feature (616)..(616): n is a, c, g, or t
  misc_feature (619)..(619): n is a, c, g, or t
  misc_feature (627)..(627): n is a, c, g, or t
  misc_feature (629)..(630): n is a, c, g, or t
  misc_feature (634)..(635): n is a, c, g, or t
  misc_feature (639)..(639): n is a, c, g, or t
  misc_feature (661)..(661): n is a, c, g, or t
  misc_feature (673)..(673): n is a, c, g, or t
  misc_feature (675)..(675): n is a, c, g, or t
  misc_feature (682)..(682): n is a, c, g, or t
  misc_feature (693)..(693): n is a, c, g, or t
  misc_feature (697)..(697): n is a, c, g, or t
  misc_feature (701)..(701): n is a, c, g, or t
  misc_feature (703)..(703): n is a, c, g, or t
  misc_feature (705)..(705): n is a, c, g, or t
  misc_feature (707)..(707): n is a, c, g, or t
  misc_feature (710)..(710): n is a, c, g, or t
  misc_feature (716)..(716): n is a, c, g, or t
  misc_feature (723)..(724): n is a, c, g, or t
  misc_feature (729)..(729): n is a, c, g, or t
  misc_feature (733)..(733): n is a, c, g, or t
  misc_feature (738)..(738): n is a, c, g, or t
  misc_feature (744)..(744): n is a, c, g, or t
  misc_feature (746)..(746): n is a, c, g, or t
  misc_feature (755)..(755): n is a, c, g, or t
  misc_feature (761)..(761): n is a, c, g, or t
  misc_feature (764)..(764): n is a, c, g, or t
  misc_feature (767)..(767): n is a, c, g, or t
  misc_feature (769)..(770): n is a, c, g, or t
  misc_feature (775)..(775): n is a, c, g, or t
  misc_feature (791)..(791): n is a, c, g, or t
  misc_feature (793)..(793): n is a, c, g, or t
  misc_feature (795)..(795): n is a, c, g, or t
  misc_feature (801)..(802): n is a, c, g, or t
  misc_feature (806)..(806): n is a, c, g, or t
  misc_feature (814)..(816): n is a, c, g, or t
  misc_feature (822)..(822): n is a, c, g, or t
  misc_feature (825)..(825): n is a, c, g, or t
  misc_feature (866)..(866): n is a, c, g, or t
  misc_feature (1039)..(1039): n is a, c, g, or t
  Peptide Sequence Number=SeqID_11409
  Probeset Number=SeqID_20848
ccccccccccccccccccaccgaggagagctacccctcgacagagccgaagctcggcgactggcgcggcgcgccaagtngttcgtcttgctgggtgacggaaaggagctntaccaccgtacnccctctngcatttctncancnangcaanananatcattcnaaggttangnngttnatanccannaaccttncttctntgncacgatttcnnctattanntncnnnttttanttntntnctttnctntgnttncntttntntntttttgnctngnttgtttctttttntnntaatttttncancgtttnttttttttnttgttttttttcannttngtntanccncggntngnnngtctngnngnnttnannannttntnnaacagtannnattanaatcngntcncnngnntttcnccagtgtgtcaacttntnatnattnatattgaggtnagttttnaacagtttnagangnagtctatttttaattttaacctgtttctgtttgcacangtttttagagnacatggatgacggaatagaaattaaggaacatncggaatnggtgnttgagcnttttcataaggannggttttattnggnttagctatngcnccntaaatgcntnnaatnngaantaaattggcattaatatagctnatggttagaacnanggttggnagccgaatagnaggngaangnananaanataggnagaaaannaatanagtntaaanttgagntnataatgaanttggcnganggnanngaganataaaaaatatattangnanaatggnngaanaaaacctnnncgtctngtntggaacaccctccaacttccgaagggagaccctcacatttnaggtggttgggttccgaggaacctaccacgcagtattggggaggtcatgctacgcgaagttcatggccatccccaactacacctacctcaagctcaagatgctgggccccaacggggtcatcaccgtcggccccggggggggggggggggggactactctctctctctctctn

SEQ ID NO: 6446 - DNA, 1039 bp, Zea mays
  misc_feature (1)..(1): n is a, c, g, or t
  misc_feature (174)..(174): n is a, c, g, or t
  misc_feature (215)..(215): n is a, c, g, or t
  misc_feature (218)..(218): n is a, c, g, or t
  misc_feature (224)..(226): n is a, c, g, or t
  misc_feature (234)..(234): n is a, c, g, or t
  misc_feature (238)..(239): n is a, c, g, or t
  misc_feature (245)..(245): n is a, c, g, or t
  misc_feature (247)..(247): n is a, c, g, or t
  misc_feature (249)..(249): n is a, c, g, or t
  misc_feature (265)..(265): n is a, c, g, or t
  misc_feature (270)..(271): n is a, c, g, or t
  misc_feature (273)..(273): n is a, c, g, or t
  misc_feature (276)..(276): n is a, c, g, or t
  misc_feature (279)..(279): n is a, c, g, or t
  misc_feature (285)..(285): n is a, c, g, or t
  misc_feature (294)..(294): n is a, c, g, or t
  misc_feature (296)..(296): n is a, c, g, or t
  misc_feature (302)..(302): n is a, c, g, or t
  misc_feature (307)..(307): n is a, c, g, or t
  misc_feature (311)..(311): n is a, c, g, or t
  misc_feature (316)..(317): n is a, c, g, or t
  misc_feature (324)..(324): n is a, c, g, or t
  misc_feature (330)..(330): n is a, c, g, or t
  misc_feature (333)..(333): n is a, c, g, or t
  misc_feature (335)..(335): n is a, c, g, or t
  misc_feature (337)..(337): n is a, c, g, or t
  misc_feature (339)..(339): n is a, c, g, or t
  misc_feature (343)..(343): n is a, c, g, or t
  misc_feature (347)..(347): n is a, c, g, or t
  misc_feature (358)..(358): n is a, c, g, or t
  misc_feature (365)..(365): n is a, c, g, or t
  misc_feature (367)..(367): n is a, c, g, or t
  misc_feature (379)..(379): n is a, c, g, or t
  misc_feature (401)..(401): n is a, c, g, or t
  misc_feature (405)..(406): n is a, c, g, or t
  misc_feature (410)..(411): n is a, c, g, or t
  misc_feature (413)..(413): n is a, c, g, or t
  misc_feature (421)..(421): n is a, c, g, or t
  misc_feature (424)..(424): n is a, c, g, or t
  misc_feature (427)..(427): n is a, c, g, or t
  misc_feature (436)..(436): n is a, c, g, or t
  misc_feature (439)..(439): n is a, c, g, or t
  misc_feature (449)..(450): n is a, c, g, or t
  misc_feature (463)..(463): n is a, c, g, or t
  misc_feature (470)..(470): n is a, c, g, or t
  misc_feature (475)..(475): n is a, c, g, or t
  misc_feature (482)..(482): n is a, c, g, or t
  misc_feature (515)..(515): n is a, c, g, or t
  misc_feature (526)..(526): n is a, c, g, or t
  misc_feature (564)..(564): n is a, c, g, or t
  misc_feature (566)..(566): n is a, c, g, or t
  misc_feature (570)..(570): n is a, c, g, or t
  misc_feature (579)..(579): n is a, c, g, or t
  misc_feature (586)..(586): n is a, c, g, or t
  misc_feature (597)..(597): n is a, c, g, or t
  misc_feature (601)..(601): n is a, c, g, or t
  misc_feature (604)..(604): n is a, c, g, or t
  misc_feature (606)..(606): n is a, c, g, or t
  misc_feature (622)..(622): n is a, c, g, or t
  misc_feature (627)..(628): n is a, c, g, or t
  misc_feature (630)..(631): n is a, c, g, or t
  misc_feature (633)..(633): n is a, c, g, or t
  misc_feature (636)..(636): n is a, c, g, or t
  misc_feature (638)..(638): n is a, c, g, or t
  misc_feature (643)..(643): n is a, c, g, or t
  misc_feature (648)..(650): n is a, c, g, or t
  misc_feature (658)..(659): n is a, c, g, or t
  misc_feature (661)..(661): n is a, c, g, or t
  misc_feature (664)..(665): n is a, c, g, or t
  misc_feature (667)..(668): n is a, c, g, or t
  misc_feature (670)..(670): n is a, c, g, or t
  misc_feature (673)..(674): n is a, c, g, or t
  misc_feature (676)..(677): n is a, c, g, or t
  misc_feature (679)..(679): n is a, c, g, or t
  misc_feature (684)..(686): n is a, c, g, or t
  misc_feature (688)..(688): n is a, c, g, or t
  misc_feature (690)..(690): n is a, c, g, or t
  misc_feature (694)..(694): n is a, c, g, or t
  misc_feature (697)..(697): n is a, c, g, or t
  misc_feature (700)..(700): n is a, c, g, or t
  misc_feature (703)..(703): n is a, c, g, or t
  misc_feature (706)..(707): n is a, c, g, or t
  misc_feature (721)..(721): n is a, c, g, or t
  misc_feature (730)..(730): n is a, c, g, or t
  misc_feature (736)..(736): n is a, c, g, or t
  misc_feature (739)..(739): n is a, c, g, or t
  misc_feature (748)..(749): n is a, c, g, or t
  misc_feature (751)..(751): n is a, c, g, or t
  misc_feature (764)..(764): n is a, c, g, or t
  misc_feature (766)..(766): n is a, c, g, or t
  misc_feature (769)..(769): n is a, c, g, or t
  misc_feature (776)..(776): n is a, c, g, or t
  misc_feature (778)..(778): n is a, c, g, or t
  misc_feature (780)..(780): n is a, c, g, or t
  misc_feature (784)..(784): n is a, c, g, or t
  misc_feature (786)..(786): n is a, c, g, or t
  misc_feature (789)..(789): n is a, c, g, or t
  misc_feature (792)..(792): n is a, c, g, or t
  misc_feature (795)..(795): n is a, c, g, or t
  misc_feature (800)..(800): n is a, c, g, or t
  misc_feature (802)..(802): n is a, c, g, or t
  misc_feature (804)..(804): n is a, c, g, or t
  misc_feature (807)..(807): n is a, c, g, or t
  misc_feature (813)..(815): n is a, c, g, or t
  misc_feature (817)..(817): n is a, c, g, or t
  misc_feature (819)..(820): n is a, c, g, or t
  misc_feature (827)..(828): n is a, c, g, or t
  misc_feature (838)..(838): n is a, c, g, or t
  misc_feature (841)..(841): n is a, c, g, or t
  misc_feature (847)..(847): n is a, c, g, or t
  misc_feature (854)..(855): n is a, c, g, or t
  misc_feature (859)..(859): n is a, c, g, or t
  misc_feature (863)..(863): n is a, c, g, or t
  misc_feature (867)..(868): n is a, c, g, or t
  misc_feature (870)..(870): n is a, c, g, or t
  misc_feature (878)..(878): n is a, c, g, or t
  misc_feature (886)..(886): n is a, c, g, or t
  misc_feature (888)..(888): n is a, c, g, or t
  misc_feature (890)..(890): n is a, c, g, or t
  misc_feature (895)..(895): n is a, c, g, or t
  misc_feature (897)..(897): n is a, c, g, or t
  misc_feature (899)..(899): n is a, c, g, or t
  misc_feature (902)..(902): n is a, c, g, or t
  misc_feature (911)..(911): n is a, c, g, or t
  misc_feature (918)..(918): n is a, c, g, or t
  misc_feature (930)..(930): n is a, c, g, or t
  misc_feature (961)..(961): n is a, c, g, or t
  Peptide Sequence Number=SeqID_11410
  Probeset Number=SeqID_20849
nagagagagagagagagtagtccccccccccccccccccggggccgacggtgatgaccccgttggggcccagcatcttgagcttgaggtaggtgtagttggggatggccatgaacttcgcgtagcatgacctccccaatactgcgtggtaggttcctcggaacccaaccacctnaaatgtgagggtctcccttcggaagttggagggtgttccanacnagacgnnnaggttttnttcnnccattntncntaatatattttttatntctcnntnccntcngccaanttcattatnanctcaantttanactntattnnttttctncctatnttntntncnttcncctnctattcggctnccaaccntngttctaaccatnagctatattaatgccaatttanttcnnattnnangcatttanggngcnatagctaanccnaataaaaccnntccttatgaaaangctcaancaccnattccgnatgttccttaatttctattccgtcatccatgtnctctaaaaacntgtgcaaacagaaacaggttaaaattaaaaatagactncntctnaaactgttnaaaactnacctcaatatnaatnatnanaagttgacacactggngaaanncnngngancngattntaatnnntactgttnnanaanntnntnaanncnncnagacnnncnanccgnggntanacnaanntgaaaaaaaacaanaaaaaaaanaaacgntgnaaaaattannanaaaaagaaacaancnagncaaaaanananaaangnaancanagnaaagnananaantaaaannngnanntaatagnngaaatcgtgncanagaagnaaggttnntggntatnaacnncntaaccttngaatgatntntnttgcntngntgnagaaatgcnagagggngtacggtggtanagctcctttccgtcacccagcaagacgaacnacttggcgcgccgcgccagtcgccgagcttcggctctgtcgaggggtagctctcctcggtgggggggggggggggggg

SEQ ID NO: 6447 - DNA, 723 bp, Zea mays
  misc_feature (1)..(2): n is a, c, g, or t
  misc_feature (723)..(723): n is a, c, g, or t
  Peptide Sequence Number=SeqID_11411
  Probeset Number=SeqID_20850
nntggttcctcggaacccgagccctagcacacagacaccgcgcctgcggacactgctcgctccccttctcctccgtcgccgccaccgcagaagcctctaccacgcgcgaccagctcgccgccgcgcccgccggggccgacggcctgcacgcgctcgccgagcaggtggtgcagctcgtgctcgccgacggctccggcgccagcagcccgcgcgtcgccttcgccgacggcgtcttcgtcgactcctcgctgaagctcaagccggccttcgaggaggtccccgtgggaaagtacagggccgacacccagtccgtcgacttccagaaaagtggtcatatcaaccagaacttatcaaggaagtgtgaagcattagttgtgtcaggtttggcagaatatggtgatgaaatagatgggattgtcccagctgatatcatgaagattcagcctatcctacaatggtcgtgatagatgagattcttcttgcaaacaagggagattgacctaaaattgcaaaacagttggtggatgtctacgcgcgcagtttaaggtttggatgcgtttcagctttctatagttgtttatgcttattgtgtgaatgatttgttagcctttatctttccttttttcttattaatataatgttgcaaaactctccatgtttgagaaacaaaaatcatgtcttccattatatttaagttttattacccgaaaaaaaaaaaaaaan

SEQ ID NO: 6448 - DNA, 723 bp, Zea mays
  misc_feature (1)..(1): n is a, c, g, or t
  misc_feature (722)..(723): n is a, c, g, or t
  Peptide Sequence Number=SeqID_11412
  Probeset Number=SeqID_20851
ntttttttttttttttcgggtaataaaacttaaatataatggaagacatgatttttgtttctcaaacatggagagttttgcaacattatattaataagaaaaaaggaaagataaaggctaacaaatcattcacacaataagcataaacaactatagaaagctgaaacgcatccaaaccttaaactgcgcgcgtagacatccaccaactgttttgcaattttaggtcaatctcccttgtttgcaagaagaatctcatctatcacgaccattgtaggataggctgaatcttcatgatatcagctgggacaatcccatctatttcatcaccatattctgccaaacctgacacaactaatgcttcacacttccttgataagttctggttgatatgaccacttttctggaagtcgacggactgggtgtcggccctgtactttcccacggggacctcctcgaaggccggcttgagcttcagcgaggagtcgacgaagacgccgtcggcgaaggcgacgcgcgggctgctggcgccggagccgtcggcgagcacgagctgcaccacctgctcggcgagcgcgtgcaggccgtcggccccggcgggcgcggcggcgagctggtcgcgcgtggtagaggcttctgcggtggcggcgacggaggagaaggggagcgagcagtgtccgcaggcgcggtgtctgtgtgctagggctcgggttccgaggaaccann

SEQ ID NO: 6449 - DNA, 637 bp, Zea mays
  Peptide Sequence Number=SeqID_11413
  Probeset Number=SeqID_20852
acttcgccttctctacacaaacaaaactggttcgctaagagctccgacaatggctgtctgcgcaactcactcctctctcatgatagcatacgccgcatccaaggaccttacaattccgtctcttttctcatctgccaacccaagacccaacaagttgagcgtcgcactctatccccctcttgttctccttgcggggagaagagcttcgaacccatccttcccggtggttgtctcagccgtagccgcagaggctgatgtcgacacggaggacgcggagcagaacgaagccacctccaccaccgccacagccgtcctcgatccgccaaagcctaagaaaggaaaagcagctttgcttctcaagagagatagaacaaggtctaaggaggtttctggaaatccaaaagctaagggaaaccaaaagggagtacgacgtcaagactgctatatctttgcttaagcaaaccgctaacaccaaggtttgtgggaagtcggtcgaagccccatttccgtctcaacttcgatcctaaggacaatgatcagcagctgcgagcaaccgtgagccctccctaaaggaacagggcaaactgttaaagtggctgttcttgcacaaggtgagaaggtcgatgaaagcaaaaat

SEQ ID NO: 6450 - DNA, 637 bp, Zea mays
  Peptide Sequence Number=SeqID_11414
  Probeset Number=SeqID_20853
atttttgctttcatcgaccttctcaccttgtgcaagaacagccactttaacagtttgccctgttcctttagggagggctcacggttgctcgcagctgctgatcattgtccttaggatcgaagttgagacggaaatggggcttcgaccgacttcccacaaaccttggtgttagcggtttgcttaagcaaagatatagcagtcttgacgtcgtactcccttttggtttcccttagcttttggatttccagaaacctccttagaccttgttctatctctcttgagaagcaaagctgcttttcctttcttaggctttggcggatcgaggacggctgtggcggtggtggaggtggcttcgttctgctccgcgtcctccgtgtcgacatcagcctctgcggctacggctgagacaaccaccgggaaggatgggttcgaagctcttctccccgcaaggagaacaagagggggatagagtgcgacgctcaacttgttgggtcttgggttggcagatgagaaaagagacggaattgtaaggtccttggatgcggcgtatgctatcatgagagaggagtgagttgcgcagacagccattgtcggagctcttagcgaaccagttttgtttgtgtagagaaggcgaagt

SEQ ID NO: 6451 - DNA, 701 bp, Zea mays
  misc_feature (601)..(701): n is a, c, g, or t
  Peptide Sequence Number=SeqID_11415
  Probeset Number=SeqID_20854
agcagagggccatcttctactcttctctcccagccaacccccttgtccaacggttcagcctgctcaattttagtgaccagttacggcaaatgcagccctcggcggacagcaggaagaagaagcggcggcggcggaggaggaggaggctggcggcatgctactcatcgagacctgctgccggcgccgctcaaggccagggtcagtgcggctcctctagccccggtggcggcggcggaagcggcagcctcgtggcagaaacaccgcgcgcgttctcgagctgccccaaggctacgcccgccctcgtcttggcctggcgcgccgaacgggcggccggttacattctcgggacccaagacaataaggctggacgggttcgattccttccgctccggagtctgggcgccttccctctcctcctttgagccattccttctccccacaggggggccccccggggggggggactcgccccccctcaaggagatgaggcgaacgcaccccccgccccccccctcctgcataaaaggaatttacccctaggaacccccccgtgggggccgtttcctttgtgacgaacgccccgggagaggggagcacaccnnnnnnnnnnnnnnnnnnnnnnnnnnnnnnnnnnnnnnnnnnnnnnnnnnnnnnnnnnnnnnnnnnnnnnnnnnnnnnnnnnnnnnnnnnnnnnnnnnnnn

SEQ ID NO: 6452 - DNA, 555 bp, Zea mays
  misc_feature (1)..(2): n is a, c, g, or t
  misc_feature (57)..(57): n is a, c, g, or t
  misc_feature (214)..(215): n is a, c, g, or t
  misc_feature (251)..(252): n is a, c, g, or t
  Probeset Number=SeqID_20855
nngattcctaaaccaaacaagtatttcagacgctaatttaaccccaactcctgaacnaagcagccagcagctagctacccaatccaccatccttccttccttcctacccaatcttagttattcttctaacctaaagacatcagctttaccacttaagcgaaccccttaccagatgacttaacagaggaagagaagttggagcccctaaaaaatnnaaatgatgatcctaggattcgcctattgaaccggtnntacgcgaagaagcggaaagagctccaggagcgccagaagctggcggacgcgtgtacaagtacagaaggaggaaaaagatgagagatctttggatgagacactttgttttattaatggggatggaggttcaggaggtggggaaagtagtaccaagagtaagaaaaagaataaaagaaggaaggatcatgttgagaaccccccaaaagctgactctgagcctgtaaatgcgaatccttatgcaagatgatgccgagtacccttttgaagatgctgacctcgatgatggacttgatcctgcaatga

SEQ ID NO: 6453 - DNA, 1123 bp, Zea mays
  misc_feature (6)..(9): n is a, c, g, or t
  misc_feature (262)..(262): n is a, c, g, or t
  misc_feature (395)..(395): n is a, c, g, or t
  misc_feature (494)..(494): n is a, c, g, or t
  misc_feature (557)..(558): n is a, c, g, or t
  misc_feature (560)..(560): n is a, c, g, or t
  misc_feature (1080)..(1089): n is a, c, g, or t
  misc_feature (1095)..(1097): n is a, c, g, or t
  misc_feature (1102)..(1112): n is a, c, g, or t
  misc_feature (1114)..(1120): n is a, c, g, or t
  misc_feature (1123)..(1123): n is a, c, g, or t
  Peptide Sequence Number=SeqID_11416
  Probeset Number=SeqID_20856
cgcaannnncgccttcccctctggcctcccctctcccatccctccgaaccgaagcagcaaagctagagacgatgacgctgacgatcccggacgaggtgcgcgccaaggcggaggtgtacgtgggcgacgcggcggggcaggagaagacgcggctgctcctccaggagacgggcctcccgagcgggctgctcccgctgcgggacatcatcgagtgcggctacgtggaggagacgggcttcgtgtggctccggcagcgccgcanggtggaccactacttcgccaaggccggccgccacgtgacgtacggcgccgaggtgtcggcagtggccgacaagggccggctcaagaagatcacgggcgtcaaggccaaggagatgctgctgtgggtcaccctncacgagatctgcgtcgacgacccgcccacgggtaagctccactgcaaggccatcggcggcctgtcccgcagcttccccgtcgaggccttcgaggccganggagccggcgccgcccggagccggcggtgtcgttcccagggacgcggaggaggaggaggaganncncgacgacgcggacaagaacccggaggaggaagccgcggccgacaaagacggcgacgcccccgctgctgctccagccgctgaggaagcagagagcaaggccgagaagaaggccgacaaggaggtgagctcggccgatccggcggtggtgcacgccgaggcgctggccgccaagaactgatgatcatcgccgatccacagccgtacgtgcacggcgcacctacctacccaccgggccatgcccattattactatttactacgtactactgtgtcgtctcgtctgtcgcattatattccttaattattcacagcaaccgcatcgtcgagaccaaccaactcaagggaagcacaaacctccaattacattcagaataatcatccacgcattgctatatatgtaccctcttttatttttttctctctcttttaaacttgctgctgttatttgttatttgaaaaaaaaaaaaaaaaaaaaaaaaaaaaaaaaaaaaaaaaaaaaaaaaaaaaaaaaaaaaaaaggnnnnnnnnnnaaaaannnaaaannnnnnnnnnnannnnnnnggn

SEQ ID NO: 6454 - DNA, 584 bp, Zea mays
  misc_feature (234)..(234): n is a, c, g, or t
  misc_feature (265)..(265): n is a, c, g, or t
  misc_feature (268)..(268): n is a, c, g, or t
  misc_feature (372)..(372): n is a, c, g, or t
  misc_feature (375)..(375): n is a, c, g, or t
  misc_feature (387)..(387): n is a, c, g, or t
  misc_feature (486)..(486): n is a, c, g, or t
  misc_feature (551)..(551): n is a, c, g, or t
  Peptide Sequence Number=SeqID_11417
  Probeset Number=SeqID_20857
atcactcactccgccaccgccctctacacctcgcgctcccaccgcccggtgtcagatctcgccgccgcgatgggctccgcccactcgtccgtctccaccgccggcggcgaagacgaagagacgacgaggatccccacgcggcagcgctctcgtcctggggcgcaccggcaccgacgcccgccttcagatcgtcgccggtccgaatgccccccggctccgcgtccaaagtgctgnagcaggagcccgaggtgctgccgtgcctcgncgnggactcgcccgttctcgcgaagccctcggcggcgggcaccccgcgcctcctcgcgggtcccggcatcaaggtctgggacccctgccacgttcttctgcccccgncgncggcgtttccgnacgcagggaggcaggttgacgccgccggccattgaaggtcgttggggcgccaccccccggggagagggggcgccccccccccctggaggtgggcccccncacaatattttttttttttttttaataagggcgcacggggcggggggggagggaggccgcccccncccaccctacaccacaactctgtgtggaggggg

SEQ ID NO: 6455 - DNA, 398 bp, Zea mays
  Peptide Sequence Number=SeqID_11418
  Probeset Number=SeqID_20858
accctgtgtccctatccctaacgccgccaccaggagtccagccgtcggccaccgcccaccaggagtccagcgtccgtccaagcctccagtccagggcaccacgcccacactccaaggctccagctcgcaagtcgcaccacggcaccaggccaccagccgtcccagcgcacgggcgggatcccagcgcacggacgtcccgccgcagtgccgccgctgcacgtccacagctctagtactccacgcatggacgcacgcaccaggcgtcccgccgcccgcgtccaggacagaccgagtcccgccgccggccgcccgcgtccaggcagccgccagccatccgcgtccacctcaaccgcactagcagctgccagatggagtcccgccgcccgcgtccaggcagc

SEQ ID NO: 6456 - DNA, 661 bp, Zea mays
  misc_feature (661)..(661): n is a, c, g, or t
  Probeset Number=SeqID_20859
accttgtctacaagggttttccgctgtcttatcccttcgtccacgctccctgcagccgccgcccaaaccctagcaacccgtcctccgccatggccgacgaccactactcctctaagaggaagtacgacgacccctcgccgccgccgcggagcacggggttctcttcgggcccgccgcctgcctcggcgctcgcgggcggcgccccgtcgtacaacagcgtgccaccgccccccgatgagatccagctcgcgaagcagcgcgcgcaggagatcgcggcgcggatctttaacgccgcagaggccaagcgtcctcgcgtcgaccacggcgacgatgacagcggcggctttcggtgtaggcctgggcagcactgggtggcggtggccgcatcggcgggggaggactcggcttctcgccctctggcgggggggggggcacggggctttcatcccacaattatctttctcaaagaggggaacctcagaactccccctttagggggggatccgggggaccagcaaaaagattggaattccaaaggggggggggtggggggttttctttggaaaacccggggaaacatttaaggaaatcccccttctcccccggggggaaagtttccgcgcccaagagaccctggacgttttacctgggggactagaan

SEQ ID NO: 6457 - DNA, 561 bp, Zea mays
  Peptide Sequence Number=SeqID_11419
  Probeset Number=SeqID_20860
ggtccgctcactccctctccaaagcggcagcctcacgcagtcacgcgctccaccacgccacctccctctactcactcatgttgttttccgtccatccgcccaccggttcgtagcccgcgccgcaaaaccctagccccgggaggatcgcggggcgcctccgcggtgccagcgacgtggctcgtttgatccgattgctggtcgagccccgccctcgctgccgcgcttcgctccggctgtgcagcggcgtgagcaccgagcacactcgcgaatggggaactgctagggtgcttggatcaaggatgggagccctcaccctggggcctcagttgtagcaagcacctcttgctttgagttctttgtgagtcaactttgctagtccaacagggggtgagggttgactgggtgtttgtatctcatatagctgagcctgacttgattcttctgtttgggtatccatatgtttcgtggcttttgattgtggttgaggtggactaatcatgtatccaaacatttttctattccttttgtgttcttcattccattgaaaaaaaaaaaaaaaaa

SEQ ID NO: 6458 - DNA, 1001 bp, Zea mays
  misc_feature (1)..(64): n is a, c, g, or t
  misc_feature (769)..(1001): n is a, c, g, or t
  Peptide Sequence Number=SeqID_10980
  Probeset Number=SeqID_20861
nnnnnnnnnnnnnnnnnnnnnnnnnnnnnnnnnnnnnnnnnnnnnnnnnnnnnnnnnnnnnnnngccgcttatgtaatcttgtctcactatctcttttaccctctgaccagatgatgaaccccaatggaaatgaagtagatgatgccaacgacaatattcctaccttaacaactatgaacgagagaaatgagtcaccgagatattcgatgaatggaatgaagaacaacaaaaggaatagaaaaatgtttggatacatgattagtccacctcaaccacaagcaaaagccccgaaacacatggatacccaaatggaagaatcaagccaggcacagctacatgagatacagacacgcaatcaaccctcaccccctgttggtcaagcaaagttgactcgcaaagaactcaaagcaagaggtgcttgctactactgcaaaaacgaaggacatcttattcgtgaatgccccaagaagcgtctggaccgactagagaagaaagctgccaagcatgacctaagcaatagttcagaagacccaccattttataagtatgatgatgaaggacgcttgattagtattcattgcggagcaaagaagtaaggaagttccttaagtttggaggagtccaatgagaactaagaacctacgaataaaccatgtatctcccttgctttcgtgctagcctttcctaatctcgaggacgagattctttttaagaggggtagattttgtgcccccaaaaccatcgtcgaaagaacatagtacaattagnnnnnnnnnnnnnnnnnnnnnnnnnnnnnnnnnnnnnnnnnnnnnnnnnnnnnnnnnnnnnnnnnnnnnnnnnnnnnnnnnnnnnnnnnnnnnnnnnnnnnnnnnnnnnnnnnnnnnnnnnnnnnnnnnnnnnnnnnnnnnnnnnnnnnnnnnnnnnnnnnnnnnnnnnnnnnnnnnnnnnnnnnnnnnnnnnnnnnnnnnnnnnnnnnnnnnnnnnnnnnnnnnnnnnnnnn

SEQ ID NO: 6459 - DNA, 790 bp, Zea mays
  Probeset Number=SeqID_20862
cttactgagtacggtcgaattccgggtcgaccacgcgccggacgctgcggacgcgtggcggacgcgtggcgagtgctgcaaacacaagcacacagctgatatcggatgtcacaggccaaaacccagacgcaacgcaacccaccccctctctgtcctctccgtcctgaactcgcgcctcgcttcctctctcccattcccacccgcggaagcttcaaggagcttctcgtctgagcccgagctaacgagctcaccggcgggcaggatgctggcggcgtccaccaaggtcggctctaggctggcctctccgcacgcctccttgtccgccggtgctgcagcggcggcgctggcgagctcccccgtgctgggctctgggatgctcccaggcgccgagatcggcgagacggtgagtcaccacgcggcggacgctgcgtacgcgctgccttgaagttcctcgagcgattcgaggtactattatcagtggcagagactgctgaatcaaaggcagtcaccgcctgatggaaggaaaagtgcctggatcattggaccacaattggttttgggggggggacttttccctagggaacctgaattgaaagaaattttttcactttcccctcaggggagagtatggccccgggggccagggtttcaaagaaccttcccgggtattaaaaaaatgggggaaaaatagcccccgaaggggtccaaaaaagcggagggtttttgggcgccaacttttaagaagccttttttaataaaaaagggcgcccccgggtttgcttgggggggt

SEQ ID NO: 6460 - DNA, 517 bp, Zea mays
  misc_feature (142)..(142): n is a, c, g, or t
  misc_feature (282)..(282): n is a, c, g, or t
  misc_feature (336)..(336): n is a, c, g, or t
  misc_feature (339)..(339): n is a, c, g, or t
  misc_feature (341)..(341): n is a, c, g, or t
  misc_feature (348)..(348): n is a, c, g, or t
  misc_feature (365)..(368): n is a, c, g, or t
  misc_feature (370)..(370): n is a, c, g, or t
  misc_feature (374)..(376): n is a, c, g, or t
  misc_feature (378)..(378): n is a, c, g, or t
  misc_feature (383)..(392): n is a, c, g, or t
  misc_feature (394)..(398): n is a, c, g, or t
  misc_feature (400)..(403): n is a, c, g, or t
  misc_feature (406)..(406): n is a, c, g, or t
  misc_feature (412)..(412): n is a, c, g, or t
  misc_feature (415)..(415): n is a, c, g, or t
  misc_feature (418)..(421): n is a, c, g, or t
  misc_feature (423)..(424): n is a, c, g, or t
  misc_feature (427)..(427): n is a, c, g, or t
  misc_feature (429)..(429): n is a, c, g, or t
  misc_feature (432)..(432): n is a, c, g, or t
  misc_feature (434)..(440): n is a, c, g, or t
  misc_feature (442)..(443): n is a, c, g, or t
  misc_feature (445)..(447): n is a, c, g, or t
  misc_feature (449)..(517): n is a, c, g, or t
  Peptide Sequence Number=SeqID_10981
  Probeset Number=SeqID_20863
attactctcatgggcctagcgggctgaaccttatgtttcccctgcctgctgcgagccgtggtcaggtgcccctgtttcggctacagtgcacattgctaaacgctcccggcagtcccgccgtctcgaagcccgccgccgggtnccttacgcaaggtccgcgacgtgcatcggcctggagaggctcccgtctcgccgccctgcggatctcatctcatctgtgcagccgcgcgtggcccaacggagccagaaagcaaagggggatatgtcgtcctgaggaggggngcgcaggtcacttgtttcacagaggatcttcacgatgtaacacttcactttcanaanangggaggntttctaaacagatatannnngngggnnngnatgannnnnnnnnnannnnngnnnnttnatatgntgntgnnnncnntanancgnannnnnnnanngnnngnnnnnnnnnnnnnnnnnnnnnnnnnnnnnnnnnnnnnnnnnnnnnnnnnnnnnnnnnnnnnnnnnnnnn

SEQ ID NO: 6461 - DNA, 943 bp, Zea mays
  misc_feature (384)..(384): n is a, c, g, or t
  misc_feature (883)..(883): n is a, c, g, or t
  misc_feature (901)..(909): n is a, c, g, or t
  misc_feature (911)..(920): n is a, c, g, or t
  misc_feature (922)..(938): n is a, c, g, or t
  misc_feature (942)..(943): n is a, c, g, or t
  Probeset Number=SeqID_20864
atggattagggcaacagccacaaagggcacgccgcatacgcgtgacaactgtggcacggagatcggattcctcacgcctgctggcgtcgatctcctccggaggctgcttctcaccgactgttgatccatatatttcagatgagagagtaggattagctgagcctgcagaagaaatacagactgtgccctcctcatgggaaaaaactagactatttaatatgctttctatgctcacgccattgagcacaacatacaatttgaacttgtttgaacttgttgctttgagttgcttgtactgacttgcctctgaaaaaactttgctttggtccgaagaacactgaaaaaactatgctttggtctaaaaaaaaaaaaaaaaaaaaaatncgcatgcctacaagggcccgtggccacatgtaccaccaccctctgctcgcccagcagagcaaatgagggaactggttcagaagtatggtaaaagatcatctgttcaagaaaaaaaaaaaaaaaaaaaatgcgcatgcctacaagggcccgtggccacatgtaccaccaccctctgctcgcccagcagagcaaatgagggaactggttcagaagtatggtaaaagatcatctgttcaagaaaaaaaaaaaaaaaaaaaatgcgcatgcctacaagggcccgtggccacatgtaccaccaccctctgctcgcccagcagagcaaatgagggaactggttcagaagtatggtaaaagatcatctgttcaagaaaaaaaaaaaaaaaaaaaatgcgcatgcctacaagggcccgtggccacatgtaccaccaccctctgctcgcccagcagagcaaatgagggaactggttcagaagtatggtaaaagatcatctgttcaagnaaaaaaaaaaaaaaaaannnnnnnnngnnnnnnnnnncnnnnnnnnnnnnnnnnnaccnn

SEQ ID NO: 6462 - DNA, 603 bp, Zea mays
  misc_feature (27)..(27): n is a, c, g, or t
  misc_feature (244)..(244): n is a, c, g, or t
  misc_feature (601)..(603): n is a, c, g, or t
  Peptide Sequence Number=SeqID_10982
  Probeset Number=SeqID_20865
aaaaaaatctgaagcaaaatgtaccgnggaatggttgaagagcgggactcttaagcagtagtgagatgcggcggtggtggtcgccggcgttggcggctgtggagccgcggtccgtgcagctcctgctcctgggcgtcgctctcgtcgcagcttctttctacgccggcaccctcttcggctcctccgcgtcccctgcgctcgtactgcccccttcgcgcccccgatcgcccgattccttcagggnccaaagtacagatggtcccagtgtttaccaacagagtttctcgtacgtaccgggccaaaatcagtgacagttccagatcacgggggttgatgtgtgtcctttggaatacaatgaggtatgtcccctgccatggtggagcctattttagcagcttgaagagcctggattcctctagggcatgagggatcttggaaaggatttgccctccctgggaaaaagcgggtgttttggtggggggccccccccccatggcctcccaagatccccttaaggtgggccaacaacccgaaattacggttggggggggggaaagtggccccccttcccttttttggtggggcaaggggggccaaaaannn

SEQ ID NO: 6463 - DNA, 603 bp, Zea mays
  misc_feature (360)..(360): n is a, c, g, or t
  misc_feature (577)..(577): n is a, c, g, or t
  misc_feature (601)..(603): n is a, c, g, or t
  Peptide Sequence Number=SeqID_10983
  Probeset Number=SeqID_20866
aaatttttggccccccttgccccaccaaaaaagggaaggggggccactttccccccccccaaccgtaatttcgggttgttggcccaccttaaggggatcttgggaggccatggggggggggccccccaccaaaacacccgctttttcccagggagggcaaatcctttccaagatccctcatgccctagaggaatccaggctcttcaagctgctaaaataggctccaccatggcaggggacatacctcattgtattccaaaggacacacatcaacccccgtgatctggaactgtcactgattttggcccggtacgtacgagaaactctgttggtaaacactgggaccatctgtactttggnccctgaaggaatcgggcgatcgggggcgcgaagggggcagtacgagcgcaggggacgcggaggagccgaagagggtgccggcgtagaaagaagctgcgacgagagcgacgcccaggagcaggagctgcacggaccgcggctccacagccgccaacgccggcgaccaccaccgccgcatctcactactgcttaagagtcccgctcttcaaccattccncggtacattttgcttcagattttnnn

SEQ ID NO: 6464 - DNA, 704 bp, Zea mays
  misc_feature (601)..(704): n is a, c, g, or t
  Peptide Sequence Number=SeqID_10984
  Probeset Number=SeqID_20867
atcttcgccgccgctaaacgttccccccacgccccaacctatccacgcgaaaccttctttcccccgggagacgattcgtcagggagaggaaagaggcaagaggggccatggacgctgccaagttggtgacgccggtcgctgtgtctcacattctggcgcacccgtcggcgggctccgacggcgcagtgaccgatctcgtcgttcaggtcctcgacctgaaagtccgtcgcacgggcagccggttcagtttcacagcaactgaccggcaaggataagagcaaggggatgcttcccaccaaccttcggggccggagggtccgctctgggcaacctgaaaaaacctcgggcctcatccgggatcatccgaatacacttgggaaagggccgtcaaaggaaaagatggaaaaagccttgggttggcatcaaaaggggcaagttgggggggccaaggggcttgagcccccaaaatccaggggggggggcaaaaaaaggaggggccccccaattgggggctaaaaccctaagggaacaaagggggggggggggagaaccccccccctccccgtttaaacccccccggggggggggggagctcggcgcnnnnnnnnnnnnnnnnnnnnnnnnnnnnnnnnnnnnnnnnnnnnnnnnnnnnnnnnnnnnnnnnnnnnnnnnnnnnnnnnnnnnnnnnnnnnnnnnnnnnnnnn

SEQ ID NO: 6465 - DNA, 704 bp, Zea mays
  misc_feature (1)..(104): n is a, c, g, or t
  Probeset Number=SeqID_20868
nnnnnnnnnnnnnnnnnnnnnnnnnnnnnnnnnnnnnnnnnnnnnnnnnnnnnnnnnnnnnnnnnnnnnnnnnnnnnnnnnnnnnnnnnnnnnnnnnnnnnnnngcgccgagctccccccccccccgggggggtttaaacggggagggggggggttctccccccccccccctttgttcccttagggttttagcccccaattggggggcccctcctttttttgcccccccccctggattttgggggctcaagccccttggcccccccaacttgccccttttgatgccaacccaaggctttttccatcttttcctttgacggccctttcccaagtgtattcggatgatcccggatgaggcccgaggttttttcaggttgcccagagcggaccctccggccccgaaggttggtgggaagcatccccttgctcttatccttgccggtcagttgctgtgaaactgaaccggctgcccgtgcgacggactttcaggtcgaggacctgaacgacgagatcggtcactgcgccgtcggagcccgccgacgggtgcgccagaatgtgagacacagcgaccggcgtcaccaacttggcagcgtccatggcccctcttgcctctttcctctccctgacgaatcgtctcccgggggaaagaaggtttcgcgtggataggttggggcgtggggggaacgtttagcggcggcgaagat

SEQ ID NO: 6466 - DNA, 663 bp, Zea mays
  misc_feature (370)..(370): n is a, c, g, or t
  misc_feature (601)..(663): n is a, c, g, or t
  Peptide Sequence Number=SeqID_10985
  Probeset Number=SeqID_20869
tgttgttactgtattatgaccatggttctgcatgaataatcttaatttcgactaaactgcgttggatgctcccacaggagtttgatgacatgtccggcatctagtatatgctggaaaccttgcaggtccatatggtaaaggaaatcagtggcgaagtctatctttttctcctcctgccgtacgtccgttccagcttgcaaagcgctcgcgagctgctgccatggccggcgccggtgcgcccgcagttccccaggccggtcgcccagcccccaactttcgacgtccatcgtggtgggcgccggcatcatgatcgtgggtgggcgccggcatcatgggcagctgcacggcgcacgcggcagcgtctcgcggncgcccgcggtcctggctgcttgaaagggtttcaaccttggtccacccgttggggttctccgaaggggaatcccgatttttccggaagcatatcgaagccggggaccccccagtgggggccccccccccccccttgggcccccccaaaaccaaaacctataccgggggtccccccgagcccccctctcctgggccccggggaaaaggttttttttgcgcgcccatataaaannnnnnnnnnnnnnnnnnnnnnnnnnnnnnnnnnnnnnnnnnnnnnnnnnnnnnnnnnnnnnn

SEQ ID NO: 6467 - DNA, 598 bp, Zea mays
  Probeset Number=SeqID_20870
agatcgattcggcactccctttgtcttttatcctaagagatgttcaagcaattgaggcatcccttcgatcctgtgttggcacataaattggttatgggatatgtagatccgtgagggctgttgaagaaatccaaactctctactaacaacacaaacagtcttgttttctttacttgtccagggaaaggttatccaaatgttgatttatattttcaaagagtttgagtaataaacttgaactgtatttttccctgtctaacagttctttatctttctatatttttggatctaatccatcttgtgaaggttatcttactagcttgatacaaatacttttcgtccatacagtgcaacttcttagaatgattcaagtaattatttcttcctttagttccttaacaattacacattggcaacccaaacggtgaccaaattgcgctatatttttaggattttacagccagaccaggagcgtcaagcaggaactaaagcgttattacagatcatgttagttaactcggcaaaggtcagataccaccaaagcacatctcgcttgtcaatttaactattactctgaacatagaggggaccaaataca

SEQ ID NO: 6468 - DNA, 598 bp, Zea mays
  Peptide Sequence Number=SeqID_10986
  Probeset Number=SeqID_20871
tgtatttggtcccctctatgttcagagtaatagttaaattgacaagcgagatgtgctttggtggtatctgacctttgccgagttaactaacatgatctgtaataacgctttagttcctgcttgacgctcctggtctggctgtaaaatcctaaaaatatagcgcaatttggtcaccgtttgggttgccaatgtgtaattgttaaggaactaaaggaagaaataattacttgaatcattctaagaagttgcactgtatggacgaaaagtatttgtatcaagctagtaagataaccttcacaagatggattagatccaaaaatatagaaagataaagaactgttagacagggaaaaatacagttcaagtttattactcaaactctttgaaaatataaatcaacatttggataacctttccctggacaagtaaagaaaacaagactgtttgtgttgttagtagagagtttggatttcttcaacagccctcacggatctacatatcccataaccaatttatgtgccaacacaggatcgaagggatgcctcaattgcttgaacatctcttaggataaaagacaaagggagtgccgaatcgatct

SEQ ID NO: 6469 - DNA, 534 bp, Zea mays
  Peptide Sequence Number=SeqID_10987
  Probeset Number=SeqID_20872
tttttttttttttttttttttttttaagcaaatttcaagtttcataaataatggttccgtttgttgtaggaaaggcatagaagtgaacttgtgggatatcacatctagtagtaagacatggtctgctaaatctgtaagcactcattgacttctttaatttatctttgatactaatatagataccttcatcatttattaaatgattttcttcctttgtttcatctgaagccccgagcaaatagtcttggcatattcactcgaccttggttcactgctggaaccttcttgtgcaagaatgatcatcgtaaaattgttgcctgaataacatggtggttgagatggcagcccccttttgtcattagaacctttttagattgtaaacctgaaatggcatttttcattaatcccattttctccaagggcatctgcgtgggtcccatgctaacactattattgctctagagccatttatctcagtatttgcattcgcttgattttgcagaattacacaattttgggctgtagttgttttga

SEQ ID NO: 6470 - DNA, 341 bp, Zea mays
  misc_feature (29)..(29): n is a, c, g, or t
  misc_feature (41)..(41): n is a, c, g, or t
  misc_feature (54)..(54): n is a, c, g, or t
  Peptide Sequence Number=SeqID_10988
  Probeset Number=SeqID_20873
gcgctactcatgcgcgcatgcacggtggncggtgcattgtngtcacaaagaganaaggcgatcaatcactccttttgtaatagtttcaataattaaaaacaaaaaccctgcatgtacgtacgtgcggccggcatgggatgatgtcggctatagctccaggtggtaacatcgcatcgcatgcatgtacgtgttgtgtgttaactacagcagttaattagcgcgagggagtagtgaactagtgacacatatactgtactagataggcgcggcgtacgctgtactgtatatgttcaataatattaccccaacgtcatgtcgtattattaaaaaaaaaaaaaaaa

SEQ ID NO: 6471 - DNA, 518 bp, Zea mays
  Probeset Number=SeqID_20874
catttttccagccgccaccaacagcctccttctcgcccatgctgtcttcttccttcctctgccgacgctccctgtacatggcacccagatttttccagcctctctccccttggcgcaggttccaaacgcggcgcccctgctcctcttcctcctgcacgcacgccagggcagggagccctgcttcccacggcagcagcagggagccaccagcagccatggcgcccatgccctctgcttttccatggcgcccggcaggagctcctcccatggccgccgacgccctactctcctccatggccggcgctcgagctccactcctcaccatggcgccgtcctccctggcgctcgctccctgcaggagaacaggccggctcctcatcccctccccctttcttcttcctctgcccagcgctccctcttctccccggcattcagagcagggagctctgggcagaggaagaacaagggaaaggtggggagagaggattacggtccttggagcgagagcaaatgatcag

SEQ ID NO: 6472 - DNA, 622 bp, Zea mays
  misc_feature (1)..(67): n is a, c, g, or t
  misc_feature (601)..(622): n is a, c, g, or t
  Peptide Sequence Number=SeqID_10989
  Probeset Number=SeqID_20875
nnnnnnnnnnnnnnnnnnnnnnnnnnnnnnnnnnnnnnnnnnnnnnnnnnnnnnnnnnnnnnnnnnngaccatggcgttgctcccgcgcaccgcgcggttggccctcctttccaccccgcgggcgtactccgctgccgctgctgcgggcgcctccccgacgtccccagcgccatacgggggcgcccccccaccggggatggtcgaagacggccgagttcgtggtctctaaggtggacgacctgatgaactggccgcgtaagggctcgatctggggcatgaccttcgggcctcgcctgctgcgccggtggaaatggattgcacggccggggcggtcccgctacgactttccaacgggtttcgggggcatctttccgtcccgtcgccggtgccggtccgattggcatgatccgtccccggccacgctccaccaaaaaagaaggcttcccaccccctcccgcaaagggttaatggaccaaaggggctgaagccgagggggggatgttttccaatgcgcaaacatggcccccacgggcggtggggaacactcaccccttacccccccacccccgtggggaaccatcggacttgtgacccgtgatnnnnnnnnnnnnnnnnnnnnnn

SEQ ID NO: 6473 - DNA, 622 bp, Zea mays
  misc_feature (1)..(22): n is a, c, g, or t
  misc_feature (556)..(622): n is a, c, g, or t
  Peptide Sequence Number=SeqID_10990
  Probeset Number=SeqID_20876
nnnnnnnnnnnnnnnnnnnnnnatcacgggtcacaagtccgatggttccccacgggggtgggggggtaaggggtgagtgttccccaccgcccgtgggggccatgtttgcgcattggaaaacatccccccctcggcttcagcccctttggtccattaaccctttgcgggagggggtgggaagccttcttttttggtggagcgtggccggggacggatcatgccaatcggaccggcaccggcgacgggacggaaagatgcccccgaaacccgttggaaagtcgtagcgggaccgccccggccgtgcaatccatttccaccggcgcagcaggcgaggcccgaaggtcatgccccagatcgagcccttacgcggccagttcatcaggtcgtccaccttagagaccacgaactcggccgtcttcgaccatccccggtgggggggcgcccccgtatggcgctggggacgtcggggaggcgcccgcagcagcggcagcggagtacgcccgcggggtggaaaggagggccaaccgcgcggtgcgcgggagcaacgccatggtcnnnnnnnnnnnnnnnnnnnnnnnnnnnnnnnnnnnnnnnnnnnnnnnnnnnnnnnnnnnnnnnnnnn

SEQ ID NO: 6474 - DNA, 379 bp, Zea mays
  misc_feature (276)..(278): n is a, c, g, or t
  misc_feature (283)..(283): n is a, c, g, or t
  misc_feature (285)..(285): n is a, c, g, or t
  misc_feature (287)..(290): n is a, c, g, or t
  misc_feature (292)..(294): n is a, c, g, or t
  misc_feature (307)..(327): n is a, c, g, or t
  misc_feature (335)..(341): n is a, c, g, or t
  misc_feature (343)..(344): n is a, c, g, or t
  misc_feature (346)..(350): n is a, c, g, or t
  misc_feature (354)..(365): n is a, c, g, or t
  misc_feature (369)..(374): n is a, c, g, or t
  misc_feature (378)..(379): n is a, c, g, or t
  Peptide Sequence Number=SeqID_10991
  Probeset Number=SeqID_20877
cgccggtggcggccggccggcacagcagtccggtggagtggggcgcggggacggggagatcttcgtgtcggcggagcccgcgacgccggcgcggctgtgcggaggggacgccgcggctggggactcgccgggacagaggcagcagctcagtcccgggttgctcgatcatcatgcttgcgacacggagcttattccggattttcaagtcccagggatgtatgatggtgcccaaaagcttggctatggaggaagtctagatgaatctgatatgagatnnncatcnancnnnntnnngagcaaatctacnnnnnnnnnnnnnnnnnnnnntatctgannnnnnntnncnnnnnaagnnnnnnnnnnnnctgnnnnnnaaann

SEQ ID NO: 6475 - DNA, 372 bp, Zea mays
  Probeset Number=SeqID_20878
aacaaaaaccgcacggcctcgcgccctcgcctcgcccacctcgcgctcctactcgtcttccacacacccggcgtcgcggtcgcggtcggacctcggaagcttccagagacaggagagcaggagaccacccgtcgctccccgtgcccttgacaaaaagaggtccccgtctcctcgacctcgagagagatcttcaccagctgacagcagatcaaagagtgcaagccccgccgagaacaacatgggaagaagtgatgatgacagtccatcgccgccaagaggtcacaggagaagaactcgcagcccaagtcctcgtggtagttatggaggccatgrgcaagcgccccacaactwatcttatggtgacgaatcttg

SEQ ID NO: 6476 - DNA, 609 bp, Zea mays
  misc_feature (1)..(62): n is a, c, g, or t
  misc_feature (601)..(609): n is a, c, g, or t
  Peptide Sequence Number=SeqID_10992
  Probeset Number=SeqID_20879
nnnnnnnnnnnnnnnnnnnnnnnnnnnnnnnnnnnnnnnnnnnnnnnnnnnnnnnnnnnnnncagagatggccacgagcggccccgtccttctggtctcgcaggcgcagcagcgcaagtcacggacctacaccccgagcccatggggtgacttcttcctccaccacgtcccatgcactccgtcacagctcttgtccatgaaggagagggcaaagggccaaggagcaacaagtgaggcagatgatacacgaaaggatcgcctcctccgacctgcttcgtaagatggagctcgtggacacactacagcgcctcgggggtggactacccactaccacggaggaagacgaaccagttgctttgctctattctacgaccacccacgaagaggggggggagacgggcctccgaacgatctcctaacgcacccctccctggggggttctaattttgcccagggaacggatgggggtacacaaatctctttgaagaaggggggggaaatggttttccccggtccggactaataaaacctggagacttttgcggaggggaaaatagtaatgggtgggggcgcgccttctcttctcccggggaatggcccnnnnnnnnn

SEQ ID NO: 6477 - DNA, 609 bp, Zea mays
  misc_feature (1)..(9): n is a, c, g, or t
  misc_feature (548)..(609): n is a, c, g, or t
  Probeset Number=SeqID_20880
nnnnnnnnngggccattccccgggagaagagaaggcgcgcccccacccattactattttcccctccgcaaaagtctccaggttttattagtccggaccggggaaaaccatttccccccccttcttcaaagagatttgtgtacccccatccgttccctgggcaaaattagaaccccccagggaggggtgcgttaggagatcgttcggaggcccgtctcccccccctcttcgtgggtggtcgtagaatagagcaaagcaactggttcgtcttcctccgtggtagtgggtagtccacccccgaggcgctgtagtgtgtccacgagctccatcttacgaagcaggtcggaggaggcgatcctttcgtgtatcatctgcctcacttgttgctccttggccctttgccctctccttcatggacaagagctgtgacggagtgcatgggacgtggtggaggaagaagtcaccccatgggctcggggtgtaggtccgtgacttgcgctgctgcgcctgcgagaccagaaggacggggccgctcgtggccatctctgnnnnnnnnnnnnnnnnnnnnnnnnnnnnnnnnnnnnnnnnnnnnnnnnnnnnnnnnnnnnnn

SEQ ID NO: 6478 - DNA, 881 bp, Zea mays
  misc_feature (1)..(80): n is a, c, g, or t
  misc_feature (859)..(881): n is a, c, g, or t
  Peptide Sequence Number=SeqID_10993
  Probeset Number=SeqID_20881
nnnnnnnnnnnnnnnnnnnnnnnnnnnnnnnnnnnnnnnnnnnnnnnnnnnnnnnnnnnnnnnnnnnnnnnnnnnnnnnncgtactccctgtgcgctgcgcgcggggtgccaacgacggtgacggaggagcccgcggcgaggccgcaggggaggaagacgacccggccccgcgcgcgctgggagaccgcggaggggcacttggcggcgtcggaggcgtgggaggtggcggcggcgagcagtgcccagggtcccccgcgaaggcggcggcgtcctcccaggcggtgaggttgagcgcccaggcatcgtcggaggacggcgaggagacagatctgcagccaagtgttgagtattctaattatagcaatgattcagaagcagatttaaggacagtagaagcgtgggcatccaaatgaataatctccaacatattcagcttttaacacaggatggctgcaagcttatgtataacatgattgcttcctacaaccgcattttgcatatattattacttgccgtggagagctgacttccctaatgaataatattttggattccggctctcatcaagtgactcctccccctcacattgattttgcggacagatgtctcaattctagtggtggagctacgaacaacaatccgatgtcctgatcgagagcgatggagctaatgtttgaacttgtgtgtttgaacttatgaactatatgaatgtgaacttgtgtgaatttgtgaacttatgtatttggacttatgtgaatttgcgaacttatatatttggacttatgtgaatttgtgatatgaacatatatcaatgtgtttgaaatttgtattgtatgtgataaaaaaaaaaaaaaaaannnnnnnnnnnnnnnnnnnnnnn

SEQ ID NO: 6479 - DNA, 628 bp, Zea mays
  misc_feature (1)..(27): n is a, c, g, or t
  misc_feature (628)..(628): n is a, c, g, or t
  Peptide Sequence Number=SeqID_10994
  Probeset Number=SeqID_20882
nnnnnnnnnnnnnnnnnnnnnnnnnnntgctcgacgtattgcagcagcagcaacgcccttcgctgcgacgcgctcgctaagtcgagcctcacgccgtcgctctgtgcagcgtttctgcgttgtcgtcaaaacccatgcatgtgtygtygtcgcgcttctcgsgtcgtttytcgacaggaagccaaatcaacatgcatgcatgcacaactccacttgggtttcagccaggaccgaraggtggtgatcgtgcaagtgatgtggtgccmaccmcaaratgcagttggtggacgacccgaagaatggacttaaccagtggatgctygccaagcgagtaccccccagcaaacactatttaagtgttaaattaaaggkacctccttgattggttgatggtgtgacttgaccttcatccctgccaccagaatagatggtcaaragggttattgcttccgtaggagaggaccaggaggagtagcgtggctaggcttcmccatgttactcaattcttctcctttagttatttccgctgcattaaaaactatggttattatttctgaaactccgataatgtaatcactaatgawactttyttaatttatggtattatgcttgaaaaaaaaaaaaaaan

SEQ ID NO: 6480 - DNA, 949 bp, Zea mays
  misc_feature (1)..(10): n is a, c, g, or t
  misc_feature (13)..(23): n is a, c, g, or t
  misc_feature (35)..(35): n is a, c, g, or t
  misc_feature (37)..(44): n is a, c, g, or t
  misc_feature (54)..(61): n is a, c, g, or t
  misc_feature (63)..(63): n is a, c, g, or t
  misc_feature (65)..(70): n is a, c, g, or t
  misc_feature (94)..(97): n is a, c, g, or t
  misc_feature (100)..(102): n is a, c, g, or t
  misc_feature (104)..(104): n is a, c, g, or t
  misc_feature (146)..(146): n is a, c, g, or t
  misc_feature (160)..(161): n is a, c, g, or t
  misc_feature (392)..(392): n is a, c, g, or t
  misc_feature (433)..(433): n is a, c, g, or t
  misc_feature (554)..(556): n is a, c, g, or t
  misc_feature (560)..(561): n is a, c, g, or t
  misc_feature (578)..(579): n is a, c, g, or t
  misc_feature (593)..(594): n is a, c, g, or t
  misc_feature (608)..(949): n is a, c, g, or t
  Probeset Number=SeqID_20883
nnnnnnnnnnatnnnnnnnnnnncctgttcaacantnnnnnnnnaaaaaaaaannnnnnnncngnnnnnnttttttttttttttttttaaacgnnnncannngnctagtataatttggtagttttacagattaaacgcagcatttngtccaagagcaagnncgactcaccgagagacgacaacacgacgacaatagctactagtgagtccaatcaccacacagtaattaagacaacggcgtacatataacacacacatataggtgcatcttattattgaaatcaaaaccagactttctgctgacgacgtatagtagggctagggccctagctattgtggacatggatgcagtgcttattaattagctacgataagagtcgtcgtccatgcanctttgtagatcgatgtgtggctcggcttcagttgtggaccncggtgggctccgggcggtacatgggctccgggaccttgttggcgcgcgagcagcaccggcagccgccatagtacccgcggttgcagcacccccacctgcagtaaccgccgcggcccccccnnnggtnncccccccccccggggtnnccccggccggggtnncccccccccccggnnnnnnnnnnnnnnnnnnnnnnnnnnnnnnnnnnnnnnnnnnnnnnnnnnnnnnnnnnnnnnnnnnnnnnnnnnnnnnnnnnnnnnnnnnnnnnnnnnnnnnnnnnnnnnnnnnnnnnnnnnnnnnnnnnnnnnnnnnnnnnnnnnnnnnnnnnnnnnnnnnnnnnnnnnnnnnnnnnnnnnnnnnnnnnnnnnnnnnnnnnnnnnnnnnnnnnnnnnnnnnnnnnnnnnnnnnnnnnnnnnnnnnnnnnnnnnnnnnnnnnnnnnnnnnnnnnnnnnnnnnnnnnnnnnnnnnnnnnnnnnnnnnnnnnnnnnnnnnnnnnnnnnnnnnnnnnnnnnnnnn

SEQ ID NO: 6481 - DNA, 665 bp, Zea mays
  misc_feature (1)..(11): n is a, c, g, or t
  misc_feature (653)..(665): n is a, c, g, or t
  Peptide Sequence Number=SeqID_10995
  Probeset Number=SeqID_20884
nnnnnnnnnnnggcacaaatgagggacttgtctggctttgttgagactaggcaacagcttttgtcgttaaagccaaatcaccacatgaactggattggttttgcggttgctcatcatttgaattttgattcttccaaggcagtagaagtattggaggcatacgagggaacactggaagatgattatcctccagagaatgagcgatacgaacacaatgaaatgttgttgtataagtacgaccgccacttcgccaccaagtacgagctggggaaggaggtgggccgcgaccatttcggccacacctgctcgcacgcgcccgcaagggagacatgagaggccaggtcatggctatcaagatgacaacggcaatatctattgaggatgtgcgcagagaggtgaaaattttgaaggcgttatctggacattccaatcttgtcaagttttatgatgcttctgaggacgcccttaatgtctacataatcatggagccattctaggcacaaactgaatcaggtatttttcgcttagtgctgagagctgaccctaattttgacgactcaccatggcaatcagtatcgcctgaagctaaagattttgtcaaaagacttcttaacaaggattacagaaaaagaatgactgctgcacaggcactnnnnnnnnnnnnn

SEQ ID NO: 6482 - DNA, 1350 bp, Zea mays
  misc_feature (1)..(122): n is a, c, g, or t
  misc_feature (135)..(136): n is a, c, g, or t
  misc_feature (621)..(621): n is a, c, g, or t
  misc_feature (801)..(801): n is a, c, g, or t
  misc_feature (834)..(834): n is a, c, g, or t
  misc_feature (954)..(955): n is a, c, g, or t
  misc_feature (971)..(971): n is a, c, g, or t
  misc_feature (995)..(996): n is a, c, g, or t
  misc_feature (1029)..(1031): n is a, c, g, or t
  misc_feature (1181)..(1182): n is a, c, g, or t
  misc_feature (1266)..(1268): n is a, c, g, or t
  misc_feature (1294)..(1296): n is a, c, g, or t
  Peptide Sequence Number=SeqID_10996
  Probeset Number=SeqID_20885
nnnnnnnnnnnnnnnnnnnnnnnnnnnnnnnnnnnnnnnnnnnnnnnnnnnnnnnnnnnnnnnnnnnnnnnnnnnnnnnnnnnnnnnnnnnnnnnnnnnnnnnnnnnnnnnnnnnnnnnnnntcacccacggtgnntaccgtccccaccctcgctctgcctaagggctatcgccaccgttgccgccaagttagggttatggaatgctaacttcatcttcctcgatggtgtcatacccggttttagaaggcaaaccgaatgcaaaccatgtacgtgccaggatcagaaattcacatacacatcgattacataactggacatcatcatacaatgctcaaataatgacgtaaagaggtattaatttgatttcatcatgatgcccgagacatccacatagtcttaaacatagatcaaagtgcgaaaacgaaacgtagtaaaactcggccttcacgggcagccgactaggggttgccgctaacccacacctagaactcatcatagtcttggaactcctgcaaatcctctgtcacgacttcatcttctcctcagtaggggttgcaatgtggacaacctggtgtttttggtgttttaagcaagggtgagtacacatcaacgtacttancaaatgtcccgtttggctaaagtggactagctgtatgtggagttaagctcagagcagtttcttttagttggtcaagttttaatactataactagagccatattttagtaataaacccaattattacccagaagtactccctccaaaaggacataccagagagcaaaaattatgactatcnttgctaaccatcatcataaaagtaatcaaaagntctataaatcaaagaggatcccaaggccgctcataaccatgagcacggttgatataccagtttctaacccttttgcagaggttgcacactttacccacaagacgtgattccctctctagnncgggcttgcaagaccnttatccactcccaaggtgaatggnnagggattcactacgaagcctttacaaagattcnnnagaggtcataaccgcccgttaggtttctccagtttgataaacacagcaccactcctcgcagaggggtgactaacaaaagcaaaatgaaagaacctcggcacccagcctcggcagagcaagcactgtgcctggaccccattgacggcacgnnggcgaagcaactacatctctagtttctctaactaattagctaagggcatcccattccaccctcatggttgcactgtttttccgnnnggtcatcgaacgaataggtccttacnnngaggcactcgagaaaccactcgagccccctaaagtatcaccagtccaacatcat

SEQ ID NO: 6483 - DNA, 219 bp, Zea mays
  Probeset Number=SeqID_20886
attttttttttttttttttatcgcaactcaaaaacatacattctcctggatggacgcaactattcacttggcactgccggccgaacacatggcagtagctcacctgttcctgctagctccattgccttcggcggagagctgaggaagaaggtgagctactgccatggccatggcggcacgcacaagaaacctcggtggatcgatgtcgatctcagatct

SEQ ID NO: 6484 - DNA, 726 bp, Zea mays
  misc_feature (1)..(1): n is a, c, g, or t
  misc_feature (719)..(726): n is a, c, g, or t
  Peptide Sequence Number=SeqID_10997
  Probeset Number=SeqID_20887
ntctcttaatctcatatttgatttagcagttagcactatctgcaattctgcattgtattgaatatgttgttttccatctttgaatgtacgtctgcaaacattaaattatgttcacctttaaaaacctttgtccattatttttgcatgactaaaaatctaaaatactagtacaaatctactcactcatcactttgccttctctatcaggctgaatagagcagtctaaaagggacatgataaaggtgatacaaggtgtcataggcaacacacaaacatatctgtgattatgaacccttcaatatagaacaaaagttttggctcatatgagctaccagcgcatcagtaggcaattcgatttgttatcagcaatatttagatctgattctcaggggtcctgctagagtaacattttaccactgttgtttatgtatatcctttgatgttgtgttgtaccaatgtggaatttactttaggactagtttggacggggaaatggaggagacccatgggacagagatccccttgttaatttgaataacaagtggattcctgctccatatattccctttattttcctgttcaccaaaccagcctttatggagcaaccagaccttgtgcgatcccaccagatttcttgtggcattatggaaagtataaaactgctgccatattctttatacgttgaaatatattcattgcgaaaaaaaaaaaaaaaaaannnnnnnn

SEQ ID NO: 6485 - DNA, 448 bp, Zea mays
  misc_feature (23)..(23): n is a, c, g, or t
  misc_feature (32)..(32): n is a, c, g, or t
  misc_feature (39)..(39): n is a, c, g, or t
  misc_feature (55)..(55): n is a, c, g, or t
  misc_feature (68)..(68): n is a, c, g, or t
  misc_feature (80)..(80): n is a, c, g, or t
  misc_feature (87)..(87): n is a, c, g, or t
  misc_feature (132)..(132): n is a, c, g, or t
  misc_feature (217)..(217): n is a, c, g, or t
  misc_feature (226)..(226): n is a, c, g, or t
  misc_feature (245)..(245): n is a, c, g, or t
  misc_feature (268)..(268): n is a, c, g, or t
  misc_feature (271)..(271): n is a, c, g, or t
  misc_feature (308)..(308): n is a, c, g, or t
  misc_feature (313)..(313): n is a, c, g, or t
  misc_feature (318)..(318): n is a, c, g, or t
  misc_feature (326)..(326): n is a, c, g, or t
  misc_feature (372)..(372): n is a, c, g, or t
  misc_feature (394)..(394): n is a, c, g, or t
  misc_feature (400)..(400): n is a, c, g, or t
  misc_feature (405)..(405): n is a, c, g, or t
  misc_feature (432)..(432): n is a, c, g, or t
  Probeset Number=SeqID_20888
ttttttttttttttttctcgaangcgcagggnaactgcnccttaaatatattaanaaggagataatanggtctaaaatanaccacanattacagcaatgactccttacggaggccagtaacgcacataagcnaaagaatccatggaaaccggactcaaaaacactactagagaccctaaaccctaaaccccaaaagctacctgccaaaactaattanagcatatgngtctcacataaaacaaccntattttcgttttgaaataaaaangtntacctggccctcctaatagcttctttcttttctattncctgngctgncctttganctcgaatctttgatatcatctccaatttttcaactgccatcggatntttgtagggagttgcacttttntttctnttaanagctgcactttttccatgagcatcctntaaaattacaggtttg

SEQ ID NO: 6486 - DNA, 541 bp, Zea mays
  Peptide Sequence Number=SeqID_10998
  Probeset Number=SeqID_20889
gttacacctttcccatcatcaacatactttgctagtcatgggagggtgtggttagatggcaaccacttgccctgccatgactagtatggagaacgggcgcattattaccaggctgtacattggcattactgaacattgttaacattgcaggaagacatggaaggcgaggacctgggcaggctggattcatgacttccacaccgcatgtatcaaacaatggctggttataaaaaacctgtgcccgcaagaaaacagcactggacacctaaaaacatggcttctaggaaaaagccggtagcggcagggcaagtggttgccatctaaccacaccctcccatgactagcaaagtatgttacacctttcccatcatcaacatacatgtgggaatctatactataggtggtacatggcacttgcctgaagccaatggctgtagaccatggagttttatcctttgtttttttcaatcttagatttgggatttaaaatttattcaatgacatttgatttacttgggcaatctgcgatatttgctatcat

SEQ ID NO: 6487 - DNA, 470 bp, Zea mays
  Probeset Number=SeqID_20890
atctcatcacggcgaggcgaagagagagaacattgtgccaccactagcaaatcgcggggtcaccgacgtggggtcctcgaaaaccgatcggggggcttcactacgatacaaggaggatcccattgtgcttccttggcaggattagtggctcgggttcccgagatttctcatcggcgagggaccttcgccgtcgcaccgccgcgtgccgtgggcagaccgcacccccgcccaaatcatgtacgtgtgaatgggttgccctgcaaggatgttaaggatgtcaaggtcgacgacttcttcctagcagccgacctcgacaagccaagggatactacgatgagcaaggtccacattgatcaatgtgatgaagctggccggcctaaacacattgggcatctccatagctaggattgactatgcccctcaaggacagaacccaccacatacgcatccccatgccactgagatcttaa

SEQ ID NO: 6488 - DNA, 532 bp, Zea mays
  Peptide Sequence Number=SeqID_10999
  Probeset Number=SeqID_20891
taatttttcagaagtaaacgcatctccagcaccagagccgagcagcaaatggaagtgtcctcgcaaaggcaagccctatgttggtcgtccaatgaagcagctccggttggggcagtgggtgcgccgtatgaattgacacctgaacgtctgcatcctgcattgcagccttgcagcaggtcctccaaaccgagcaggtgaaagcctaaagccaacgcggaggcaagttaccccccgtcagctgtcctgctcggaagggaagggacaaagacctcacccaggccccagcgatttagcccggggaagccggcgccgccgcccccgcccccgtgtctaccctaacccctaccaatggaaaaccggagtgggatggaacagatgggacggaggagggcgtgggagagagcgcgattacctggaactctggagagctggtggagagtactgatgaaatcctgaggcgctggtggtgagtagcgaccgatgaactctggagcgacgaggaagatgaggtttttggggagagaggtcgacg

SEQ ID NO: 6489 - DNA, 230 bp, Zea mays
  misc_feature (7)..(14): n is a, c, g, or t
  misc_feature (19)..(27): n is a, c, g, or t
  misc_feature (29)..(29): n is a, c, g, or t
  misc_feature (52)..(54): n is a, c, g, or t
  Peptide Sequence Number=SeqID_11000
  Probeset Number=SeqID_20892
gccgctnnnnnnnnggcgnnnnnnnnnancggagagatctggtctgccattnnnacgctccttcctgtgaaccacaaacctaacgcggagacactcggtccggtgaaccacaaacctgcgccggagcgacgtcgtccgccgggcgaggtgcgcgtacctgccgtcgatcgtcgccggatccatccaccatgggaagcacaggggccaaaggagccatctcgagaaccatt

SEQ ID NO: 6490 - DNA, 649 bp, Zea mays
  misc_feature (1)..(2): n is a, c, g, or t
  misc_feature (604)..(649): n is a, c, g, or t
  Peptide Sequence Number=SeqID_11001
  Probeset Number=SeqID_20893
nnatcggcaacaaggcgtggtcctcatcggtgaaaaggtgacctctaagctccccgcccctcccccgagatttcgccccctcccccctagaaacccctcttcgtttgttgtcccaccgcacacttcgtttccaaatccattccccactatccctgccctccccgctagggttttgccaacatggtcgccgctaccgctcggaggctcctctcccgtcgtgcctcctcgtcctccctctctgtgatcctccgccgtggtgctgtccaggagtagtcattgccgctgtgcccagccatcatcgcgacggcttccagggtggagcaagacgaggaggcgacagactccggacaagtggtgtgacagaggatggagaggacacatgcgagggagccctgtaggcacgtggtttcaatcatcatcgcgatgaggattgtcggcacattcacactatgccattgcagaacgttggagcctctcagaactctggaagctgcctaccaccgtgcaccctaagataggggcatatctgtgttagccgcctacaaacatactgaaatatgggcatatacaccatgtattcttctctcagcatggtaccatcttnnnnnnnnnnnnnnnnnnnnnnnnnnnnnnnnnnnnnnnnnnnnnn

SEQ ID NO: 6491 - DNA, 599 bp, Zea mays
  misc_feature (333)..(333): n is a, c, g, or t
  misc_feature (384)..(384): n is a, c, g, or t
  misc_feature (424)..(424): n is a, c, g, or t
  misc_feature (473)..(473): n is a, c, g, or t
  misc_feature (489)..(489): n is a, c, g, or t
  misc_feature (494)..(494): n is a, c, g, or t
  misc_feature (497)..(497): n is a, c, g, or t
  misc_feature (504)..(504): n is a, c, g, or t
  misc_feature (521)..(521): n is a, c, g, or t
  misc_feature (530)..(530): n is a, c, g, or t
  misc_feature (532)..(532): n is a, c, g, or t
  misc_feature (534)..(534): n is a, c, g, or t
  misc_feature (547)..(547): n is a, c, g, or t
  misc_feature (560)..(560): n is a, c, g, or t
  misc_feature (568)..(568): n is a, c, g, or t
  misc_feature (571)..(571): n is a, c, g, or t
  misc_feature (576)..(576): n is a, c, g, or t
  misc_feature (579)..(580): n is a, c, g, or t
  misc_feature (590)..(590): n is a, c, g, or t
  misc_feature (594)..(597): n is a, c, g, or t
  Probeset Number=SeqID_20894
ctactaccatgcacaaaggtaggacacggaacagacatggacgcactattactagttccgcacaagtatttcgctttccggttgcaccgggtgctgttatcgttgctggcacggacggactttttgacaatctataccacaatgagatacgtggtgttatcgttgaagcgctccgggttggacttgagcctcaggttgcggcacaacaaattgccgccctggctcgacaaagagccacggacaaaaataggcagtcaccttttgcatcggccgcccaagaagctgggtaccggtactacggggggcagctcgacgccataacggttgtggtgncgtatatgaaaagcgcttgattcgagcctttctttttattacatgtaatgncaaaatcttagtcccgaatttaatggcacatgtgttctcnaggtgtgaaatcccctgagatactagaagcactcctgctgggtttaacncctggaatacgtttanccaancantacaccnttttaccctgttttccncctggccangnancctccttctcatntataattctccanaaacccgncgnctccntcnnccctccgccncgtnnnnca

SEQ ID NO: 6492 - DNA, 565 bp, Zea mays
  misc_feature (470)..(470): n is a, c, g, or t
  misc_feature (476)..(476): n is a, c, g, or t
  Peptide Sequence Number=SeqID_11002
  Probeset Number=SeqID_20895
gagctcactagtcccccccccccccccccccgcaccatctgccgctcataacaatatagatcatcaattgtcattcatgattacataaggatttttatcatacacttcttattatgtaggttattaaagagggagaaaagaaagacaactacattggtccgtatgattcgatatgtggggctcgtcttcctcgtggtctcgatccacattctattccagcagaagaactgtcagcatctttggggttatacttcactctaactattttaaattattgctctaatggttacatctcctcgttcagttatttgcttgattaacattctataggcttaattaaattatttttaacatttctctatggcctatgacttatttatgttttgaacatcaatctaatgcacactgtcaaagtatttataaaactatttcatagagttgcttgcttctaaacattaataattggctgnctaggncatcgaaaattttttatattgagaccagtagcatttccttggtatctacaaccaaccgagaaatttgaatactaagttattacggtggg

SEQ ID NO: 6493 - DNA, 480 bp, Zea mays
  misc_feature (7)..(7): n is a, c, g, or t
  misc_feature (9)..(9): n is a, c, g, or t
  Peptide Sequence Number=SeqID_11003
  Probeset Number=SeqID_20896
gtgattntnatggtcgtggtcgtgattatcatgggtcgtggtcgtgatcaaccgtggtggtcgttatgatcgtggtcgtggtcatgatcattgtggtggtcgtcatgatcgtggtcgtggtcatgatcattgtggtggtcgtcatggttgtggtcgtggtcgtggtcgtgatcatcgtggtggtcgtcatggtcgtggtcatgatcatccgacacggaggtggcaacggggctgatgctattcttcaatgcatcatcggcatcgtcgtcgtcgcacttcctcatgcaggacctgtagcacctgtggtacatgtggtggtcgtagtcctcccacaccgcagcggaggagagcgctcctgcgacggctaggagcgcggcgagcagcaccgctttggagcacgccattgctggctgcgcgacctcaaggagaggcgcaggtgcagctaacgtgatggattgattggtggtggcgatgggtggt

SEQ ID NO: 6494 - DNA, 602 bp, Zea mays
  misc_feature (601)..(602): n is a, c, g, or t
  Probeset Number=SeqID_20897
atcttgatgacgagtagttctgatctactaagaggaatagaggaatacacacctttgttgttgttgctatcttcataccgtcgccctgcagagaagcagcaggcatcgggatccgagccgctgtaggttgtcgcgtttccaaacactccgacgcctaggcgatgggggcctcttgaggactaggggtttggggcgatggtactagcggttagtctttcctgcgaccccttagtcctatatatatagcatcgtgtgtctgggggctccaaccgaggttagcatgggccctcccgatcaagggcccgattaaaggaacgatagttgggttaagcccaatccagtctctattgaccggctgtagaggacacacccaacaattatcaggataagaagggttgaatcgtgttccagcaacaagtggcaagggtcaggttcccaagaccaccagttgcaaggagagaagcaaaatttgggggctgcatcatcgattgtgcatgacgagcgatcgagggcgactccaatataatggcgacccatgctacatttgcacttaatctccagtagggcccaacaacaaaaacaatccttggcgacggcgacnn

SEQ ID NO: 6495 - DNA, 612 bp, Zea mays
  misc_feature (39)..(39): n is a, c, g, or t
  misc_feature (50)..(50): n is a, c, g, or t
  misc_feature (601)..(612): n is a, c, g, or t
  Peptide Sequence Number=SeqID_11004
  Probeset Number=SeqID_20898
aggtgcccgtcggcgtcgctcatggagctgcagacgacnacggggagagncggtacagtctttcttccacatccccaggcatgcgggcttgcaatggagctgctgcagcttgaagcgtccacgcgctggagggtgatgtatcgggtgtggctgggcatgctcttctactccgccagcatgtgcagggggcacgaggacgctaagagcttgggtgaaggtggcgagttcctttcctacgtctggctcgtcctctcgctcaagggggccaagaccctggccgacaagcttcagatgttggaggtggaaggggacgacaggcagggacgaaggcaaggacgaaagtgggttgagatgcggaatgaggagcttcagattcggggagacgacagggagccagcaccccgatcgatgcccaccactagcagcttgtttcaaacctgatcaaatcctccaatccaatcgccgatgccatgattttactatatatcaattctcctgtttgtttgttcgtttaaaaacaagccagcgttctccgacccaactactggccggtttgtttgtcgccttgcctttgtttaataagctcagcccctcaaaaaannnnnnnnnnnn

SEQ ID NO: 6496 - DNA, 1359 bp, Zea mays
  misc_feature (1209)..(1359): n is a, c, g, or t
  Peptide Sequence Number=SeqID_11005
  Probeset Number=SeqID_20899
ctctctcctgcagctccacttcctcctcgggcgcagccattgtcttctggctcatatctcccctccccctcccctcctcgtccgcctcagacgccattaaaccccacctcgcctacgactgccggcggcgagccccgaccggagcagggatcgagcccgccgaaggggggaagacatggggacactcgggcgcgcgatctacacggtgggcaagtggatccgtggaacggggcaggccatggaccgcctcggatccaccatccagggcggcctccgcaccgaggagcaggtgtcaaggcatcgtacagtcatgagcatatttgacaaggagcctaggatcaacaaagatgtttttgttgctcccagtgcatctgtcattggtgatgttgagattggacatggatcatcgatctggtatggctccgttttgagaggtgatgtcaacagtattcgtattggatctggatcaaatatacaagacaactcccttgtacatgttgcaaagactaatattagcgggaaggtccttccgacgatcattggaagcaatgttacagtaggtcatagtgctgttttacatgcatgcaccattgaggatgaagcttttgttggtatgggtgcccctctgcttgatggagtggtggttgaaaagcccggcatggttggtgcgggttctcttgttaggcggtatacagggattccttctggggaggtctgggtcggtaatcctgccaagttcctaaggaagcttccggggggggggtttgcgttcatcgctcaatcgagcacccaactatttcaacctggcccaggtccatgcggccgggaccgccaagagcttcgacgggattgggctcgagaagatgctggggaagtagtacgcgcacaaagacgaggagtacgtctcgatgcttggggtggtccgcgagttcccgccccagctcatccttcccgacaacatcctcccacacaatgctcggagggcggttgcccgctgaaccttttctcaacccatgcttggcgttgttgcctgttgtcttggagcattttgacacgcgttcgttctctgtttttttatgaagcccattgggtttgggtcgggcactgttttgggttcgcccgcacacatccccccctctattttaaactgcattggactggtagctcggggtctcatttactcgtctttggcttctctctgtggcgcannnnnnnnnnnnnnnnnnnnnnnnnnnnnnnnnnnnnnnnnnnnnnnnnnnnnnnnnnnnnnnnnnnnnnnnnnnnnnnnnnnnnnnnnnnnnnnnnnnnnnnnnnnnnnnnnnnnnnnnnnnnnnnnnnnnnnnnnnnnnnnnnnnnnnn

SEQ ID NO: 6497 - DNA, 647 bp, Zea mays
  misc_feature (39)..(41): n is a, c, g, or t
  misc_feature (578)..(580): n is a, c, g, or t
  misc_feature (583)..(590): n is a, c, g, or t
  misc_feature (608)..(609): n is a, c, g, or t
  misc_feature (611)..(612): n is a, c, g, or t
  misc_feature (616)..(616): n is a, c, g, or t
  misc_feature (618)..(626): n is a, c, g, or t
  misc_feature (636)..(638): n is a, c, g, or t
  misc_feature (640)..(642): n is a, c, g, or t
  misc_feature (644)..(647): n is a, c, g, or t
  Peptide Sequence Number=SeqID_11006
  Probeset Number=SeqID_20900
ccgtgtcaccctacccttaccctcctccccctcctcttnnncgccgccatcgccggcgtgcgttgcgcgccggtgtataggccggagtacctggtggacgggaaccagctggtagacatgcagtaccacatgggccccgtcgtgtcaggcgcgccgaccaacctgttcctcatctggtacggccggtgggaggccccggcgcaggctgtgctccgcgacttcctcgcctccctctccgctccggcgccgttccccgccgtctccgactggtgggcccgcacgccgcggctctacacggaccaatccggcgccaatgtcaccgccacattcgccatcgccggggagcactccgacgccgggtactcccacggcgcctccctgaagcggatcgacatgcagtccatcatccgcaccgccgtggtcgcgtacccggaccctctgccgctcgacccgtacaacggcgtgtacctggtgctctcctcaccggacgtgcaggtggaggagttctgccgcgccatgtgcggcttccactacttcacattcgcgtccgtggtcggggtcaccgtcccgtacgcgtnnntcnnnnnnnncagctcgcagtgcccagnnanntgtncnnnnnnnnncgccgcgccnnnannncnnnn

SEQ ID NO: 6498 - DNA, 1514 bp, Zea mays
  misc_feature (1514)..(1514): n is a, c, g, or t
  Peptide Sequence Number=SeqID_11007
  Probeset Number=SeqID_20901
atatttttattttatagaaagcaacattgtacatggcaggtctatgtaagcccactaggcaacgttttacagtgttgccaggtctatgtacagccggtctctagtgggcttacagtgttgcttccttgttgaattatgttgcatatatggcggggattaaccgaacaaacattttgagacaggtatttaaaccataaagatattaaatcccaaagggattaagtgaaaaggagggatccactcaatccctccctggattagatccacttggggaattaatccattgcaaccgaacaagcccttaaggggaaccaaaatttcagaagataggtatgagagttataaactattcttggaagaaaaggtgaggctacctgcacttgtttggatctcacagcaggaaacgagttgatgttgctaatccttcactaaaataggaaaactaggcagttttctagttaaattccatcttagggataggccctttgtagttagtacttacgaatgagatggacatgcaccctttctcttgatgcacacaagatttaatggtacaatatgaatacaatatgataacttccatgacatttcaaaatatatagttccactttagtaaaatagttttggatgcatttgctacaatttactgcatattcaaattgaggctaaccttgtggcgtcgataaccttgaggctagtcttttgtatgcatttgctacaatttagtgcattttctacacaaaggacgaggaggggtgggtgctgattcacttagtggcaagcttcgactactctcaaatcatcgacatcctgcttgagcgaagcatatcttatggtgagcgtgctgaacacgaaggacgaggagtggtgggcgctgattcactcagtggcaagcttcgactactctcaaatcatcgacatcctgcttgagcgaagcatatcttatggtgagcgtgctgaacacgaaggacgcgtaggggtgggcgctgattcactcagtggcaagcttcgactactctcaaatcatcgacatcctgcttgagcgaagcatatcttatggtgagcgtgctgaacacgaaggacgcgtaggggtgggcgctgattcaaccagtggcaagcttcgactactctcaaatcatcgacatcctgcttgagcgaagcatatcttatggtgagcgtgctgagcacgaaggacgtggaggggtgggcgccgattcactccatggcgtgctccgacaactctcaaatcatcgacatccaccttgagcgatctgtattcggttcaagcggctttgatgcagctccagctgaccatcctcttgtcagtgggaatggttacgagcatacctcatgcactatttgctgagttaattggataagaggtttgcttatgcttgtgaggaagacaacaagagttcaattagtcgaacatgaaaatagtctaaatgcttgcgcttaagcggggaaaaacaataattcttcctattgtgatggcaagaaaaaaaaaaaaaaan

SEQ ID NO: 6499 - DNA, 603 bp, Zea mays
  misc_feature (18)..(18): n is a, c, g, or t
  misc_feature (33)..(33): n is a, c, g, or t
  misc_feature (53)..(53): n is a, c, g, or t
  misc_feature (603)..(603): n is a, c, g, or t
  Probeset Number=SeqID_20902
atacgcacataccaatgncttttgctatcaagnagcatatgtccggtacgcgnaggttccttgtgtctacatacgacgagttctggaaaaggtacaacgatatggattccaaaattcgccatcattatgaggttatccaggaggcttcgccttgccacatttactttgatcttgagtttgatacaagattgaacaagaagagagacacagatgaaatggtggatatattgattgctgttgtattcagtgctttgcgtgataaatattctattgaaggacatgaagagtggatcacagagctagactcatccactgaagaaaagttttcacgccatctaatcattcgtatacccaagattgcatttaaagacaactcccatgttggtgcgtttgtctgtgaggtctgttcacaaattgcagctcagcgtacaaccaatcatgaccttgataaactttatattacaaaagaaatcagctcaggtcctgttgatcggctctttatggatactgcagtttactctcgtaatcgttgtttccgtttagttttctcatcaaagtctgggaagaaatcatttcttgtgccgaccaaacgtttcaaatgcn

SEQ ID NO: 6500 - DNA, 571 bp, Zea mays
  Peptide Sequence Number=SeqID_11008
  Probeset Number=SeqID_20903
acagcagcaagcccacgcgtccggagatagacaagcagctccagtccaaccaagaacaaacaacaaccgcagcaagaggagaggaggctcaccggtcgcgaccaaattctcccagagacggtcggaaatgaggagccaagcgctgttcttcctcacgatcgcccttctcaccgtgctcgcgcgatccagcaacaggcaccaccaccaccactcccacgttcaaagcagaggtatgtaggaaagcttaactagttcaagatttgtcctttcggttattcagtctggctggctcacggggttccgaatcggtctgcggtttcagggcagggagcagcatcaggaggaggagcaggacgggagctggcgagccgggggaaggaggcggcgagcgcgtggccgcggtgcaatacctagaacggttgacccatggcgaaaagcgcttctgtgccgggagtctgaacgcggcgccccgcgtggcgccgccggcctgccggggttgcctcaggtcgagcttcatcagaatccggcgggaaatcagtggatggaccccgcccctgaaggtggcagcaca

SEQ ID NO: 6501 - DNA, 782 bp, Zea mays
  misc_feature (601)..(782): n is a, c, g, or t
  Probeset Number=SeqID_20904
cggacgcgtggggtcgcgtatcacgacgaggagtggggagtgcccgtgcacgacgacgagtaagcaagccgccattattccttgctccttgcaagcgcaagctgatgctcacggcaacagctgtgctcacatgttcgagatgcactgaaacgacaggttgctattcgagatgctcacactgtctggcgtgcaagtcggggccgactggacttccatcctcaagaaaagacacgtgtacagggaggcgttctccggcttcaacgtggatgcggtcgccaagtacaccgagaagcagatggcgtcgctgagcgccgactacgggctggatttgggcaccgtcagaggaaccgtcaacaacgcctgccggattatcgaggtaccgggacccgtgagcggcatcttcaccccagttgaaagacactagtagtagtagtagttccagtaccatcctgcaacggaaagacgaagggagaggcggtcaatgaatggaggcggcctatctgaaacgaaaccggttagcaactgaaagcgaagtctattaacagaatccctgaactctctgttgatgcggaggagcaagtgcgccgttaatgcagctggnnnnnnnnnnnnnnnnnnnnnnnnnnnnnnnnnnnnnnnnnnnnnnnnnnnnnnnnnnnnnnnnnnnnnnnnnnnnnnnnnnnnnnnnnnnnnnnnnnnnnnnnnnnnnnnnnnnnnnnnnnnnnnnnnnnnnnnnnnnnnnnnnnnnnnnnnnnnnnnnnnnnnnnnnnnnnnnnnnnnnn

SEQ ID NO: 6502 - DNA, 1211 bp, Zea mays
  misc_feature (2)..(6): n is a, c, g, or t
  misc_feature (28)..(33): n is a, c, g, or t
  misc_feature (648)..(648): n is a, c, g, or t
  misc_feature (793)..(802): n is a, c, g, or t
  misc_feature (804)..(807): n is a, c, g, or t
  misc_feature (812)..(821): n is a, c, g, or t
  misc_feature (875)..(888): n is a, c, g, or t
  misc_feature (890)..(895): n is a, c, g, or t
  misc_feature (897)..(898): n is a, c, g, or t
  misc_feature (900)..(908): n is a, c, g, or t
  misc_feature (910)..(915): n is a, c, g, or t
  misc_feature (918)..(931): n is a, c, g, or t
  misc_feature (936)..(967): n is a, c, g, or t
  misc_feature (973)..(976): n is a, c, g, or t
  misc_feature (983)..(987): n is a, c, g, or t
  misc_feature (1001)..(1016): n is a, c, g, or t
  misc_feature (1019)..(1020): n is a, c, g, or t
  misc_feature (1026)..(1027): n is a, c, g, or t
  misc_feature (1031)..(1035): n is a, c, g, or t
  misc_feature (1037)..(1039): n is a, c, g, or t
  misc_feature (1041)..(1041): n is a, c, g, or t
  misc_feature (1049)..(1063): n is a, c, g, or t
  misc_feature (1068)..(1070): n is a, c, g, or t
  misc_feature (1072)..(1074): n is a, c, g, or t
  misc_feature (1076)..(1084): n is a, c, g, or t
  misc_feature (1089)..(1184): n is a, c, g, or t
  misc_feature (1197)..(1200): n is a, c, g, or t
  misc_feature (1203)..(1208): n is a, c, g, or t
  misc_feature (1211)..(1211): n is a, c, g, or t
  Peptide Sequence Number=SeqID_11009
  Probeset Number=SeqID_20905
gnnnnnctcgaggccggccgggccgggnnnnnnagctacggtgggtacggtccctccaccagctccctcccctcgcgttgtcatcttcttccttccgctgcctcccatagctcggtgggctcgacgcctgtggccaggaggaaaccaggattgaggacagagagcgatcagccgaagaagtcggtgcgctgccgacggttgtggtggtggatcatattcgcttccaagaagacacgaaatatcatcatcctcaacgcctcacagtcatctatgcatgccatagcgtgtgccgagggcgataaataatatggtgcaaaatccagcattaatgtttgggagcccaagattcagcaggctaacaaatttggcttgtcctagctctggatctttgggggttcatttaaggtggatgtcatcatgtcaacagtatagaggctggttaatagaaatagaataatgcgtaccaggccacagggtgctagatgttgtgctctggttttgttcagataaacaccaagatggctatcgcgactagcattctcaacatctcaaactacgcaggctcccaatgtgatatcagcatcttgatttataaggttagcatttagcaattaaagtgctccttccgcctcagcacattataatagngggtatatacaatgtacatatacaatctacaatatatatgaatagtatatctgaaaatatagttgctacctatattaaaaaaaaaaaaaaaaaaaaaaaaaaaaaaaaaaaaaaaaaaaaaaaaaaaaaaaaaaaaaaaaaaaannnnnnnnnngnnnnaaaannnnnnnnnnaaaaaaaaaaaaaaaaaaaaaaaaaaaaaaaaaaaaaaaaaaaaaaaaaaaaannnnnnnnnnnnnnannnnnncnnannnnnnnnntnnnnnnaannnnnnnnnnnnnnggggnnnnnnnnnnnnnnnnnnnnnnnnnnnnnnnncccccnnnnggggggnnnnnaaaaaaaaaggggnnnnnnnnnnnnnnnnggnngggggnnaaannnnngnnngnccccaaannnnnnnnnnnnnnnaaaannncnnntnnnnnnnnnggggnnnnnnnnnnnnnnnnnnnnnnnnnnnnnnnnnnnnnnnnnnnnnnnnnnnnnnnnnnnnnnnnnnnnnnnnnnnnnnnnnnnnnnnnnnnnnnnnggggggggggggnnnnccnnnnnnggn

SEQ ID NO: 6503 - DNA, 307 bp, Zea mays
  Peptide Sequence Number=SeqID_11010
  Probeset Number=SeqID_20906
cagtcttcccgcgtccgccgattcctcctccttggtcgccgcgtccttggctgccgtctgcgaaatggctacaaacttcctagcacatgagaggatctggttcgacaagttcactcatgacgacgcagagaggagattctacgagcagatgaacgggcctgtggcaggtgcctcccgccaggagaacggcgccagcgtgatcctccgtgacattgcgagagccagagagagcatccagaaatccctggctggaagtcaggccccggggcctccagcggcaccagcgagaccacggtgactcgtcgtc

SEQ ID NO: 6504 - DNA, 610 bp, Zea mays
  misc_feature (610)..(610): n is a, c, g, or t
  Peptide Sequence Number=SeqID_11011
  Probeset Number=SeqID_20907
atcgaatgtcacatctttactatataataggagttctatacaaaataaataagtaattacattataaggagacaacggtccagcaacccaaagttgactgggagacgacggcctagacctctcatgaactcgcacagcatcctccaagcacctcatcatgtggtacttgttcttgacctggcacttgagattccaggtaccaacttgctcttcaggtgactcgtgatctcactgccaagattggagtgtcacgggtgcagtccacggcggcgggcagcaagcaacgccgcgcatctgaggcaatggccgctggcgcgattccccccaggcttcggatcaacgcgaggaggaagtagcacgacaccggcaacgcgcttgcatgaagtggccatgagcggcaccagagctagcatgcaacgcccctaggactgcaacagaaactccagcgaggatcaccgaacagccgttctttccggactcgacgatgtcgaatgcacacgatggcgttgggtttgctgcggccgcgcctgccgccgatgctgtcagcggggaagccatgcatgatgcatccgagccggatccacgaggagattggtagatgcggcgtctn

SEQ ID NO: 6505 - DNA, 610 bp, Zea mays
  misc_feature (1)..(1): n is a, c, g, or t
  Probeset Number=SeqID_20908
nagacgccgcatctaccaatctcctcgtggatccggctcggatgcatcatgcatggcttccccgctgacagcatcggcggcaggcgcggccgcagcaaacccaacgccatcgtgtgcattcgacatcgtcgagtccggaaagaacggctgttcggtgatcctcgctggagtttctgttgcagtcctaggggcgttgcatgctagctctggtgccgctcatggccacttcatgcaagcgcgttgccggtgtcgtgctacttcctcctcgcgttgatccgaagcctggggggaatcgcgccagcggccattgcctcagatgcgcggcgttgcttgctgcccgccgccgtggactgcacccgtgacactccaatcttggcagtgagatcacgagtcacctgaagagcaagttggtacctggaatctcaagtgccaggtcaagaacaagtaccacatgatgaggtgcttggaggatgctgtgcgagttcatgagaggtctaggccgtcgtctcccagtcaactttgggttgctggaccgttgtctccttataatgtaattacttatttattttgtatagaactcctattatatagtaaagatgtgacattcgat

SEQ ID NO: 6506 - DNA, 739 bp, Zea mays
  misc_feature (1)..(1): n is a, c, g, or t
  Peptide Sequence Number=SeqID_11023
  Probeset Number=SeqID_20909
ncctactcgtctcttcaacagaaccttcctagctaatgttcttctctattccccaactcctacggtctcaatcagcagcgcacgccacacagccacaacggtggccagtcccaagagcatccaagtgtgcagccagcgattgattcggacggccaccatcggcgctcctcgcatgttcttaggtcccgcaacactggagcggtggagccagcgactaatccattgggagcagcagcaaccgaaagtaggcacaccgcgaggcaaggtacgctagatgattatgcgaattggagggcatggatcaggatggatcacaaggtggctttgatggacccatctcgatatggacgacttgatcaagtgtcaggattgttcatgctcgccaagcggacttcatctaaccacactaacatagtgtatcccagggttttattccctgttgtttttcaggttgtaattttgttctgttgtggatggtgctaagtgccggtaggctcggccttcttatataagtatatcccatctttagcttccctattaaggattgtcacttaagctagcatgtattttaaaacttataaatgttttatacattcaaattgtaatctttttgaatcaatttcttttgtaatcaactccgagtgatatatattgtaatcttgttataacttgtaaatgttgtaacttgtaatcattttgtaataaagaatttatttccgcggcaaaaaaaaaaaaaaaa

SEQ ID NO: 6507 - DNA, 1147 bp, Zea mays
  misc_feature (1)..(61): n is a, c, g, or t
  misc_feature (1146)..(1147): n is a, c, g, or t
  Probeset Number=SeqID_20910
nnnnnnnnnnnnnnnnnnnnnnnnnnnnnnnnnnnnnnnnnnnnnnnnnnnnnnnnnnnnnttgccatgaatggattctgttgcataaatatttgaagcgaggaacaaaacgaaaagacatgtgagtacaaaatgtgtgggttattagctaagaactaaaagttcttggttggtgtccgccaaggctcactgtttacggcaactccacaactgagtgtaaataaaattattctggtagcgcgcattgtaatcgatccccatttggtagaacaaaacgtcatccacgataccccttacgctctcgtcatataagaatcatcggctgtactgattacaatattctcacccgcttcaataaaaggttcgccggagcaaagttggaggtggaaccagtcgtgagatggcctttgaaagctttcttgattttgttttggctctagaaaacaaagatacccctgaaggcttgacatatttatttaggtcccttgatctcaatggaaggggtttccttccaactgcagatattcatactttatttagagacgtcccccagaaatggattgagggagggaactatgagctttgcatagaagacgtgagggatgaaatttgggacatggtgaaacccgcagatcctttcaggatttcgctatcagatttttttttttgcaagcaaggtgggactgttgccagcatgcttaaaaatgtgggtggcttttgggcccccgacaacagggagacccttttccaggaaaaggaaaagcaagtggaaaaggcatgagttttccaccccccaagtaaccgtacctggtgcctcaaaattgcaacatcctcggaactgcctgtaccccagtatcagtcattgtaccctaaaaagtgtattaaatctatcccccccagtttcctgaagcttgtttttaagtgtgccaaagtggttttcgaaacttgttgaggcaaacaagccccgtttggccatattgacatctatccgtgagggcctgattcctcggcagcctatatgtacatttaaatttgccccaagggggcaatcctgactacggcatcaccgcctgtaagcatatactccgtatgtaatccatcttaaaagttcgtccaaaaaaaaaaaaaaaaaaaaaaaaaaaaaann

SEQ ID NO: 6508 - DNA, 239 bp, Zea mays
  Peptide Sequence Number=SeqID_11024
  Probeset Number=SeqID_20911
gatctcctcagggcgccgggatgctgcttcctacacatcgtgcggctctctggtgcttgctctcgcccttggccatggagcagcaacaactatgaaacccccttcgtgtcgcgccctcgatgtgagcgagctccacctcgatctatgccgacccgatcaccacttcgtcgaaccccggtgagaactcgttgtttttcttgtgtttattcctcgctagtacatgtactcggcatagatta

SEQ ID NO: 6509 - DNA, 539 bp, Zea mays
  misc_feature (1)..(26): n is a, c, g, or t
  Probeset Number=SeqID_20912
nnnnnnnnnnnnnnnnnnnnnnnnnnaaaaagaatgtcacatctttactatataataggagttctgtacaaaatagttaaataattacaccatatgaagacaatgatccagcaaccacagttgactgggagacgatggcctagacctctcacgaactcatcataacatgttgcatacgcctcctcctacggtacctgatcttgaccgtactcagtgacgtaaaatttcctggcctcagtggacggcggcccaatggcagacgacatacaccggcgaggaattcaccagccctgatggatctttgggtcagaatctccatgcatacgttcttggcgcatggtgagtctctgattaccacccggcggcccagctccagctccattagcgctcacatcttggtcggccaggtgtctctccctccccaggaatcgtcggcgacggattttcaacaggaatccatggttagccatggtccttgcttcggtttggttacggcaaaggggatggacccggtaggagggccccaccaggccgcgacc

SEQ ID NO: 6510 - DNA, 539 bp, Zea mays
  misc_feature (514)..(539): n is a, c, g, or t
  Peptide Sequence Number=SeqID_11025
  Probeset Number=SeqID_20913
ggtcgcggcctggtggggccctcctaccgggtccatcccctttgccgtaaccaaaccgaagcaaggaccatggctaaccatggattcctgttgaaaatccgtcgccgacgattcctggggagggagagacacctggccgaccaagatgtgagcgctaatggagctggagctgggccgccgggtggtaatcagagactcaccatgcgccaagaacgtatgcatggagattctgacccaaagatccatcagggctggtgaattcctcgccggtgtatgtcgtctgccattgggccgccgtccactgaggccaggaaattttacgtcactgagtacggtcaagatcaggtaccgtaggaggaggcgtatgcaacatgttatgatgagttcgtgagaggtctaggccatcgtctcccagtcaactgtggttgctggatcattgtcttcatatggtgtaattatttaactattttgtacagaactcctattatatagtaaagatgtgacattctttttnnnnnnnnnnnnnnnnnnnnnnnnnn

SEQ ID NO: 6511 - DNA, 477 bp, Zea mays
  misc_feature (1)..(3): n is a, c, g, or t
  misc_feature (12)..(12): n is a, c, g, or t
  misc_feature (65)..(65): n is a, c, g, or t
  misc_feature (73)..(73): n is a, c, g, or t
  misc_feature (91)..(91): n is a, c, g, or t
  misc_feature (118)..(118): n is a, c, g, or t
  misc_feature (126)..(126): n is a, c, g, or t
  misc_feature (170)..(170): n is a, c, g, or t
  misc_feature (221)..(221): n is a, c, g, or t
  misc_feature (315)..(477): n is a, c, g, or t
  Probeset Number=SeqID_20914
nnntattattgngacatgatcataatgtaatattaatcccaaaaccaggtaaagcaatgtcaaanctacccanaagttcagtggtaaacanggggtgggataaacaatactagggaantctattangtcccatcaaattaacctgaacatgtcacagtgattaacatganctttattgggtaaataagagtgatcaagggcacaactcgcctgagactcangattcccaagcaccagcttggtctttaagattttcgcgacctcacttctatttgtagcaatacatataaatagactaggagtacataaaaatannnnnnnnnnnnnnnnnnnnnnnnnnnnnnnnnnnnnnnnnnnnnnnnnnnnnnnnnnnnnnnnnnnnnnnnnnnnnnnnnnnnnnnnnnnnnnnnnnnnnnnnnnnnnnnnnnnnnnnnnnnnnnnnnnnnnnnnnnnnnnnnnnnnnnnnnnnnnnnnnnn

SEQ ID NO: 6512 - DNA, 377 bp, Zea mays
  misc_feature (377)..(377): n is a, c, g, or t
  Peptide Sequence Number=SeqID_11026
  Probeset Number=SeqID_20915
atcgagcgtgcagaagccgagagcgaagagagagaagttgccgccgtaatatatctagacccgagcagctgccccgtcccggtgctcaccgaagcaggagttgggcgtcgtcatcgctgaagtgatctacttcatctaacaggcgaggttacgagaatctgaagatcatcctagtacctgaaacctaaagtctcaggtcaagaccaggtaccgcaggatgaggcgcatggaggatgctgtgatgtgttcgtgagaggtctaggccgtcgtctcccagtcaactttgggttgctggatcgtttcctcatatgatgtaattatttaattatttttgtatagaactcctgttatatagtaaagatgtgacattcgatccn

SEQ ID NO: 6513 - DNA, 465 bp, Zea mays
  Probeset Number=SeqID_20916
ggatcgaatgtcacatctttactatataatcggagttttgtacaaaataaataaataataacattataaggagacaacggtccagcaacccaaagttgactgggagacgacggcctagatctctctacgaactcatcgcagcatcctccatgcgcctcatcctgcggtacctgttcttgacctgggacttgagattccaggtaccaggatgatcttcagatgactcgcacctcgcgcggtttcgacgctgtcgctgccttgtccgcggcgaggctcttctttcctgcgaacttggccaatggcggctgggtcccttgcgtgatgaagtagcagggaaggtcgcggtcagaggcgggatccatatgcggtcggggcttctcctcacacaaggccatggtggagcccctctgcactcacccccatggctacgcttggacgcttggtgaccacggcgcccaacacaat

SEQ ID NO: 6514 - DNA, 465 bp, Zea mays
  Peptide Sequence Number=SeqID_11027
  Probeset Number=SeqID_20917
attgtgttgggcgccgtggtcaccaagcgtccaagcgtagccatgggggtgagtgcagaggggctccaccatggccttgtgtgaggagaagccccgaccgcatatggatcccgcctctgaccgcgaccttccctgctacttcatcacgcaagggacccagccgccattggccaagttcgcaggaaagaagagcctcgccgcggacaaggcagcgacagcgtcgaaaccgcgcgaggtgcgagtcatctgaagatcatcctggtacctggaatctcaagtcccaggtcaagaacaggtaccgcaggatgaggcgcatggaggatgctgcgatgagttcgtagagagatctaggccgtcgtctcccagtcaactttgggttgctggaccgttgtctccttataatgttattatttatttattttgtacaaaactccgattatatagtaaagatgtgacattcgatcc

SEQ ID NO: 6515 - DNA, 779 bp, Zea mays
  misc_feature (1)..(35): n is a, c, g, or t
  misc_feature (691)..(692): n is a, c, g, or t
  misc_feature (697)..(699): n is a, c, g, or t
  misc_feature (701)..(701): n is a, c, g, or t
  misc_feature (708)..(712): n is a, c, g, or t
  misc_feature (715)..(717): n is a, c, g, or t
  misc_feature (719)..(720): n is a, c, g, or t
  misc_feature (732)..(779): n is a, c, g, or t
  Probeset Number=SeqID_20918
nnnnnnnnnnnnnnnnnnnnnnnnnnnnnnnnnnncagagctcgttcatctctccagctctctagaatttttttttaatcagcagccctcgtcctcaacctttggccgccggactgcaggccatgttcggctcccaagcttactccctccatctctcctgccgtgctctgccccagcatcggtcgtccatctccctgagctccagcgcgcgcgttccttcctgttgcgcctctctccgtcgaagctccctgctgctcgccatggcatcttccagtctctcgctcgtcccctgctcctgtctttgcttggcgtccggcctcagtagctcgccctccccgttcagcagcaagcagctcctttcccctcgccatgcacgccgtcgatcccctgctgcagttcctccacatggtctggtcgtcgaccgcgcgcgtcacctgctcgtggttatgggaaaccagcgagcctctcctcacggcgtagtttcctcgcgtcatcgttcagcccgtggaggtaaatcctgtgagatttagatgataataaagctttagtgaggcgcttgccaagtgcttggtgaatcgcctcaaccagatgtggttgtcgatctcgcggagtcgagtttagtcgtggtaagtcgatccattgtttttgttagtcggataaatgattagttgtatggatatataaggcttgnnctatnnnantgatttnnnnnatnnnannaaaattatttcnnnnnnnnnnnnnnnnnnnnnnnnnnnnnnnnnnnnnnnnnnnnnnnn

SEQ ID NO: 6516 - DNA, 473 bp, Zea mays
  misc_feature (1)..(11): n is a, c, g, or t
  misc_feature (447)..(447): n is a, c, g, or t
  misc_feature (456)..(473): n is a, c, g, or t
  Peptide Sequence Number=SeqID_11028
  Probeset Number=SeqID_20919
nnnnnnnnnnncgcgtccgcccacgcgtccggagcattgcatggtagcattagagaactacgtcgcgtcggattcaggtgactggattctaagcgaggctactcatcgcccgtaactttggaagtgtcgatttataagaaggcagaaaatgatgcaaaatctaagtgttcttttggatctcaccaattgtcagcacgtctgcttatagcgaagttctagagaaggaaaagttggaatgaaactcaaattttggtggatgcataagtgtggagacttgaattcatatatacttaattaggctcaacgttagcgcaaacagttgatgaccaagtttttccattagtattttagtttggatttaaagtacacttatgtatgagttatttgacaatgcttatttatgatatattgaatgatacttatctatattatattaattataatgtntttaaatannnnnnnnnnnnnnnnnn

SEQ ID NO: 6517 - DNA, 1129 bp, Zea mays
  misc_feature (1)..(25): n is a, c, g, or t
  misc_feature (619)..(620): n is a, c, g, or t
  misc_feature (657)..(660): n is a, c, g, or t
  misc_feature (1098)..(1129): n is a, c, g, or t
  Probeset Number=SeqID_20920
nnnnnnnnnnnnnnnnnnnnnnnnntgtgaggttttatgtgtgttgatgtgtgcgatatggagtaaaatccttggagaattaggtggagaagaaggttaagttcaacactccttaggtgttcgatgatatgctcgaactggtggccgtctaagttcttgctgaaatcgagtcggagcatgatgtggtgagccaagtcgtttctccgactacttagctaatgaatgatttggttatataattattgctgtaatggtatttgatgtatgatgaaataatttggttgtgtgtcatgaatttttttgatgtcatgattggatagtagaagtgttgtttgaggggaagtttaggtattaggtgcaggttttacgaggagtgctttagagagtacatatgtcaagtataattaaatgaatgttataaaacacagaggatggttctgtttaggcaaggaatgctttgattgatgcgttggtaagctgtggttaaccaaaataggaactaaattgaatttttgttgtttggacttgctgtttggactgtgcacagttttaatatgcaggtagctaagtgaagtaaactttgttttctgaagagatgatatgcatataagttgtagcnnacttctttatcctggttgtgtaaaaattttatgaccnnnngtttagtagtttaggagttatgatttttcaagtccagtttcagaatctgtccagattctgtactgatttcgaaaatgaccttgtttgccaaattaaactgagaatcagctcttagtaattataggagaattgtagtactttgcttaagctttccaacaaattttggagcaccctttttggtggcctagagaccaagttacagctgtttgaactgtacagtctgaatctgtccaaatctggacagcaatgtttgtttgtattaactgactttgatacacattgaatcaccctgaaatgtttataaataaattgtagacaattctactagctttctaaaaagtctcggatcacctgatttggatgtctgaaactcaagttatggatttttaaagtaagtagtcgaattctgtccaaatctggatataatttacgtttagnnnnnnnnnnnnnnnnnnnnnnnnnnnnnnnn

SEQ ID NO: 6518 - DNA, 458 bp, Zea mays
  misc_feature (1)..(19): n is a, c, g, or t
  misc_feature (433)..(458): n is a, c, g, or t
  Peptide Sequence Number=SeqID_11029
  Probeset Number=SeqID_20921
nnnnnnnnnnnnnnnnnnnaaaccatacaccaacaagcctaagaagttgtataggagaaacactgtcgccacagctaggttcgaccatgtcgctgctactcctgctaccagcaagggagagagatagaggactgttcgttgccagggggacttcgacaccgagcaatctggcgctaacatcaccgtcgtttcccagttcagcgtgaggttacgagttacctgaagatcatcctggtacctggaatctcaagtcccaggtcaagaacaggtaccgcaggatgagacgcatggaggatgctgtgacgagttcgtgagaggtctaggccgtcgtctcccaatcaactttgggttgctggaccgttgtctccttataatgtaattatttatttattttgtatagaactcctattatatggtaaagttgtgacattcnnnnnnnnnnnnnnnnnnnnnnnnnn

SEQ ID NO: 6519 - DNA, 164 bp, Zea mays
  Probeset Number=SeqID_20922
taattgcctgtcttgcttcctctccatcgaaggtcaagccgtcaaggcatggggagcgtccatgggctaaggtgatacactgatacaacgacttgacttggacggtagtgcagaggctgaagcggatggcagcgctgaggccgaagcagacggtactgtagatc

SEQ ID NO: 6520 - DNA, 164 bp, Zea mays
  Peptide Sequence Number=SeqID_11030
  Probeset Number=SeqID_20923
gatctacagtaccgtctgcttcggcctcagcgctgccatccgcttcagcctctgcactaccgtccaagtcaagtcgttgtatcagtgtatcaccttagcccatggacgctccccatgccttgacggcttgaccttcgatggagaggaagcaagacaggcaatta

SEQ ID NO: 6521 - DNA, 1086 bp, Zea mays
  misc_feature (1)..(1): n is a, c, g, or t
  misc_feature (1010)..(1086): n is a, c, g, or t
  Probeset Number=SeqID_20924
ngggttttcccgccaccaccgctccgccatcccgcattcccgcccctgccgtcgctgcagcagcgatggccgccgccgccgacgacgcgacgtgggagcgcgccatctccaccgccaccaagtccacctccgcgcccaagaccctcactctcgacggcgccgtcaagtcctccacgggccgcctcccctccgccgcactcatcgggcgcttcgccgcttccctcgaggagctctccgtcgcgggggccggcctctcctcgctcacgggcctgccccgcctcccggcgcttcggcgcctctccctccccgacaaccgtctctcggggcccgccgcgctcgccgctgtcgcggaggcctgcggtgccacgctgcgccacctcgatctaggtaacaacctgttcgccgaagtcgaggagctcgcgccgctcgccgggatcggagtcgagttgctcgacctgtaccagtgccccgtcaccaaagtcaaggggtacagggagaaggtcttcgcgctgattcccagcttgaagcatctcgatggcgccgacgctgagggcaacgagcgtttggagatgggtgacgatgaggacgacgaggaggacaacgaggagggagaaggatggggagaggtgtctccctcggaggatggaaaagagggtgatggagaggaaatggatgaagcagatgacgaggatggtgaatgggaggatgaggaggaagatgaagacagtgaagacgatgaggacgaacttgatacagacgcagaggacaacgagaacatcgaaagcaaagtaggatcttccctgccaaataagaggaaacggtgtaacgaggatgatgccaatggagacaagtaaaacggtgaggtaaatattattttctttacttcggaagtgtttctgtgcactaatagtagactagggcatactgtttttaggtgattccatttttgaagtatcgtttggattctggaagttgactgacactgaaatcatgagtaggatgcgaccccnnnnnnnnnnnnnnnnnnnnnnnnnnnnnnnnnnnnnnnnnnnnnnnnnnnnnnnnnnnnnnnnnnnnnnnnnnnnn

SEQ ID NO: 6522 - DNA, 1037 bp, Zea mays
  misc_feature (1)..(28): n is a, c, g, or t
  misc_feature (36)..(37): n is a, c, g, or t
  misc_feature (41)..(43): n is a, c, g, or t
  misc_feature (68)..(70): n is a, c, g, or t
  misc_feature (955)..(956): n is a, c, g, or t
  misc_feature (1005)..(1037): n is a, c, g, or t
  Peptide Sequence Number=SeqID_11031
  Probeset Number=SeqID_20925
nnnnnnnnnnnnnnnnnnnnnnnnnnnngggagttnntgannnaactcatgctctcttgcgctgtagnnnataaaccccggggccttgaccgcggtgccgtgtaccaactgagacctggccaccaccattgacagcggaagggagcgcgagcggagaaatcaggggcaggcgccaccatcgattgcgcccatacaccatcggaaggtccgtgggccggagcttccttgggtcgccgtgggggttctcgtctagcatctcgggcgtgtgcgacgatcggcgagccgcaatttctcgccgaacttcgacatcgccgcacaactacgtatcaccgcgaattggccttcttgccggcgtctcgctcctcgtgacagcaccggagggggcgcctgggcagaaggagtctggtcctgaccttggcaagggtgcacgtaccaccagctaacacctggagcaaccgcgacgggcggaattcattgtcggtttctttacgccaccgccgtgccgcggctctgcgtgaaccacgtcgattgcgcccagattcacgaagagcccgtgcccgaggatcctggtgagcagcagatagaagtagctgagcaggagctcattgaaggagaagaacgggtggtttaggaggagccacaaagcgaggagtttgatcggatctaggtggcgtttctcagatgacttgcgccaaggatgatccttagttcgttttatatttatcttttattttgtaataagacttctactatgtaataaatactctgatgttattgtgacatttatctctatacactctgttattatatatgttgttgttgcgggccttcttcgccgaagatcctccaagcagaaacaccttcggcagggtgatatgcgagcaaacacaatacgaaggtataagccaaagctacaatccagggagcttcggtatgacgacgccttgagacgaanngcagcaccgacttaaagagtaaaagatcgtttagtccatgataatttgnnnnnnnnnnnnnnnnnnnnnnnnnnnnnnnnn

SEQ ID NO: 6523 - DNA, 1239 bp, Zea mays
  misc_feature (1)..(123): n is a, c, g, or t
  misc_feature (1103)..(1104): n is a, c, g, or t
  misc_feature (1150)..(1239): n is a, c, g, or t
  Probeset Number=SeqID_20926
nnnnnnnnnnnnnnnnnnnnnnnnnnnnnnnnnnnnnnnnnnnnnnnnnnnnnnnnnnnnnnnnnnnnnnnnnnnnnnnnnnnnnnnnnnnnnnnnnnnnnnnnnnnnnnnnnnnnnnnnnnntttccccaacgcttgcatcttcaggtcgttctctcccacaccgtccttatctccgtgcttggtgctggaatacttggagtgaagtttcgtaccttcttctcacatcacaagcaagcgttctggttcctaggaaaaaaatcccaccgctgttgctcctgtccgtgcccggccttgcctgggcgacatcatccttggccgattcgctccatcagtcgcgagctcggcaccctgctgcggtcggcgtagtcgtcttcagccaccggacaccactagccctgcttgtctccgtcgcggcccagaagcccagccgcccctgctactcgtccttgtgcctacaccctgccgcatccgctcaagccactggacgccggcgtcgcgttcggtctggtcgcgctcgtccttgcctctacatctaccagcgttcagcgtcctacaactgctcacctgctccccatcgcattcaacaccgccacagcctcaagcggcactcgctgaacaacatcctcctcgtcgcgcttggaatccgccacctgactcatttttccttgctctggtgcgtcgtctcatggagctgctgaacgccgacgtcaccctgagctcattccacaccagattacgttatccgtggatcaatcgcttggtgaaacaattttctggagacttgtcgtcaccttgaagacttgtgaaattttatttccttagtctttggctcttctctgcaacaaagggaccttcggccttgggatgaaggtgtacacgatatgaaaggcgcgatctgggagaaggatgaaccagttccgaagctacgtaaggagaagctttggcttagcggtggaaaataaaaccgacttaaaggggaaaaggctgtctagtcctcgatagattatcccttagtcaatagtaaatgtcaagggtatggatgtaattttacataggatgcgtcatgtgcctataaatagatgaacaatagcatcgtactnntcacgctgatttgtattcactcgcacgtcacacttggattcatacnnnnnnnnnnnnnnnnnnnnnnnnnnnnnnnnnnnnnnnnnnnnnnnnnnnnnnnnnnnnnnnnnnnnnnnnnnnnnnnnnnnnnnnnnn

SEQ ID NO: 6524 - DNA, 1307 bp, Zea mays
  misc_feature (1)..(1): n is a, c, g, or t
  misc_feature (678)..(678): n is a, c, g, or t
  Peptide Sequence Number=SeqID_11032
  Probeset Number=SeqID_20927
ngggaatgtttgttcttatgatacttgtatgatttggatctttgattgagtgtgatgggttgtggaagtaatgtccacaattgtatctgcatatacacctagacataagggaaaatatttataaaatagacaacacattccccattaaaaacatatccagtttaatagattcatcttaacttaaaagattctctcttatcttaatagatgcatcttatcttgaaagatttgtcttaccctaatcactttacttaactcatcctaatgaaacaatcgggacctaatccaaaataatgagatcttaactagtttaatctattcgtaccaacctaatctagattctatctaatctattatgatctaatctagagtaagttacttaatgctagtacaaaggataaagccatactccaaatccacttaagcctaaattggtgacctagatcaactcggccatacccaacaacttgacctacataacagatatatcttagcctcttgtcccaattccagatggagacaccaaagagcaagaaggaggagatcaacctcgacatggaagaataggagtcaaatcagatctcgagatgattcaagatttaccaccttggatggagccttcccttaccaagttcttcttaccatcagctaacctcactctgaccatctctcctcttncctaattgtgtgtctaaacataaaagatacccatgcatttctaattacttgctaaatagtattaaaaagagagatagagactcttaatttttgaatcaattagaaactacaatctcaattacaaaccaaacttggtataatcctttttttctacaaatctcgaggacgagatttctgttaaggggggtagaatttgtaacacccaataatactattttcggatttatgaaaaaaatactcccaaggttttgaatcaaaatatgttctaataagaattttcttacctacgaaactactcttgaaataaatgtgcttctaatagaatattaaataaaaaaattcttatatgaattaaaattacccctatgtataattatatatatttaggaatattcactaaaatatttaataaaaagtatttattcataaaggatctacattagaaattgttacttttgtgtgcataaattatatatttaacgcatttttcttaattgattaaaatagtaaataagtaaatagaagtatatttttcattcgtattggagattttgattctacatttttttataaaaaaaacttcaacacagatttaacgtgaaacaaatgaaatagaaaaaaaataaacc

SEQ ID NO: 6525 - DNA, 479 bp, Zea mays
  misc_feature (326)..(327): n is a, c, g, or t
  misc_feature (479)..(479): n is a, c, g, or t
  Probeset Number=SeqID_20928
attgtgttgggaccaacaagcctaagaagctgtatatgagagaacactgtcgccacagctaggttcgaccatgtcgttgctacgtccttagaaaccagttgggttaggaattcagtaccggagtaggagtttcgccatctgacagcatgacgttgatgagtgatattttctcttgcccccaccatcgaagcgaggttacgaagaacctgaaacactaattgcggaagtatttggagttgcaccaaaaagcagtgaggtcacgagaatcttaagatcatcctggtacctggaatctcaaatcccaggtcaagaacaggtaccgcaanntgaggcgcatggaggatgctgcgatgagttcgtgagagatctaggctgtcgtctcccagtcaactttgggttgctggaccgttgtctccttataatgtaatttattttgtatagaactcctgttatgtagtaaagatgtgacattcgatccn

SEQ ID NO: 6526 - DNA, 630 bp, Zea mays
  misc_feature (601)..(630): n is a, c, g, or t
  Peptide Sequence Number=SeqID_11033
  Probeset Number=SeqID_20929
gcacaatgatagatccacatcacataaatcatcaacaggcaccacaacaaaatcttttttttaacctacacatgttattatgttttgcacatatttgcaaacactatacaaaatcatccacaaaagtactaatgcttcaagtgattcgcaaaagccttcacaaaagcactccaacttcttgtatcctcttgttttaaggcacaagcttgtaggggttgtgatgtcaccatttacttgatgctaacaagatatttccttcactaaagccatcttcaacacttcgcccataaaaaagatcaattctcttttttaattgtctgttcaaaaattaaacccggaactgggaaagggtgtgaatctgatgcggcaaggaggcggagccgccacggattccattctgttccgttgcgcggcgtacgtcacagattccaatgcccgcaaatgtggcttcacggcgtggaggcatacaaaatttacagatgcctgcaaagaatttgtaaacctgtacagcttagcgcagcttgttgatcggctctgaattggagtaccagatgcagcctgaacttggagcgtcagattgcagattgcagcctgaccttgnnnnnnnnnnnnnnnnnnnnnnnnnnnnnn

SEQ ID NO: 6527 - DNA, 630 bp, Zea mays
  misc_feature (601)..(630): n is a, c, g, or t
  Probeset Number=SeqID_20930
actccaagttcagtctgcaatctggcactccaaggtcaggctgcaatctgcaatctgacgctccaagttcaggctgcatctggtactccaattcagagccgatcaacaagctgcgctaagctgtacaggtttacaaattctttgcaggcatctgtaaattttgtatgcctccacgccgtgaagccacatttgcgggcattggaatctgtgacgtacgccgcgcaacggaacagaatggaatccgtggcggctccgcctccttgccgcatcagattcacaccctttcccagttccgggtttaatttttgaacagacaattaaaaaagagaattgatcttttttatgggcgaagtgttgaagatggctttagtgaaggaaatatcttgttagcatcaagtaaatggtgacatcacaacccctacaagcttgtgccttaaaacaagaggatacaagaagttggagtgcttttgtgaaggcttttgcgaatcacttgaagcattagtacttttgtggatgattttgtatagtgtttgcaaatatgtgcaaaacataataacatgtgtaggttaaaaaaaagattttgttgtggtgcctgttgatnnnnnnnnnnnnnnnnnnnnnnnnnnnnnn

SEQ ID NO: 6528 - DNA, 776 bp, Zea mays
  misc_feature (1)..(48): n is a, c, g, or t
  misc_feature (776)..(776): n is a, c, g, or t
  Peptide Sequence Number=SeqID_11034
  Probeset Number=SeqID_20931
nnnnnnnnnnnnnnnnnnnnnnnnnnnnnnnnnnnnnnnnnnnnnnnnttatcggagtgatttataaaagtgattcaaagaaataactctaaactgctatgaattatttatagttttggaatatatgctagctcaagtgaccatccttaataagaagtatagaagaagtacttagacttataagaaggccgagcccactggcacttaacaccaccatcagtagcacaaactatagccaaatatcacgacagcttggcgacgagatgagcgagacaccaccgcgtgtggaatgagctcagggcgatgtcgagagcaccaatgatgctacctggcgaggctgatcacgttgaccaccagtgttgaactcgctagggagaggagggcaacgtcgagatgaacaacaacggtggtgtatgctggagcggctgggctggtgagttttgtgactgggaaagaatctcggcaagctagggctatgaaagccgggcgatgactagggaatttcgagggagccggcgagtagcagacaacgaccatggcgagctgatgccaagccaactgctgcagattcccgagcacgagcgttcaggcactcggctgggagacgacaagctgagaaagggtaggtgcgacgagtcgagctggagagacgagcgctggacttggcaacgtcgaacatcaagagggcaatacggcgtgagctgtcgagtctaggcgtacggcatcgtgcctggggaggtgagatgaaaacgcgagcgtggctgatggccgtggtn

SEQ ID NO: 6529 - DNA, 776 bp, Zea mays
  misc_feature (1)..(1): n is a, c, g, or t
  misc_feature (729)..(776): n is a, c, g, or t
  Probeset Number=SeqID_20932
naccacggccatcagccacgctcgcgttttcatctcacctccccaggcacgatgccgtacgcctagactcgacagctcacgccgtattgccctcttgatgttcgacgttgccaagtccagcgctcgtctctccagctcgactcgtcgcacctaccctttctcagcttgtcgtctcccagccgagtgcctgaacgctcgtgctcgggaatctgcagcagttggcttggcatcagctcgccatggtcgttgtctgctactcgccggctccctcgaaattccctagtcatcgcccggctttcatagccctagcttgccgagattctttcccagtcacaaaactcaccagcccagccgctccagcatacaccaccgttgttgttcatctcgacgttgccctcctctccctagcgagttcaacactggtggtcaacgtgatcagcctcgccaggtagcatcattggtgctctcgacatcgccctgagctcattccacacgcggtggtgtctcgctcatctcgtcgccaagctgtcgtgatatttggctatagtttgtgctactgatggtggtgttaagtgccagtgggctcggccttcttataagtctaagtacttcttctatacttcttattaaggatggtcacttgagctagcatatattccaaaactataaataattcatagcagtttagagttatttctttgaatcacttttataaatcactccgataannnnnnnnnnnnnnnnnnnnnnnnnnnnnnnnnnnnnnnnnnnnnnnn

SEQ ID NO: 6530 - DNA, 222 bp, Zea mays
  Peptide Sequence Number=SeqID_11035
  Probeset Number=SeqID_20933
taacagcatcatgtggtcgactcatctttggtcctctgcatcacgtggtccactagcgtacctggcagaatcaaactcaggtcgcgtgtgtgctgtccacaggcttgggacttttgttgagcacgcgatgcgcgagacgcgacatcgacggaggacaagggtattgtgacgtcgcgggttagggctgcacagatgaatcgacgcacgcgacacgaggagatc

SEQ ID NO: 6531 - DNA, 222 bp, Zea mays
  Probeset Number=SeqID_20934
gatctcctcgtgtcgcgtgcgtcgattcatctgtgcagccctaacccgcgacgtcacaatacccttgtcctccgtcgatgtcgcgtctcgcgcatcgcgtgctcaacaaaagtcccaagcctgtggacagcacacacgcgacctgagtttgattctgccaggtacgctagtggaccacgtgatgcagaggaccaaagatgagtcgaccacatgatgctgtta

SEQ ID NO: 6532 - DNA, 418 bp, Zea mays
  misc_feature (1)..(3): n is a, c, g, or t
  Peptide Sequence Number=SeqID_11036
  Probeset Number=SeqID_20935
nnnatcgaatgtcacaactttactatataataggagttctatacaaaataaataattacattataaggagacaacggtccagcaacccaaagttgactgggagacgacgacctagacctctcacgaactcatcatagcatcctccatgcgcctcaacttgcggtacctgttcttgacctggcacttgagattccaggtaccaacttgcttttcagatgactcgtgacctcgcgcatcgtcggagggcggagaggaaagctagctgtagcacacggcggcttgaccacgaatctgggctccggtgtgaaattccgggttcatcgaccgtgtatctcccccgccgtgacgctgaccacttccccggaccatccatgaaggtcctaggctaaccattttgtctcgagcggccccgcacgcc

SEQ ID NO: 6533 - DNA, 418 bp, Zea mays
  misc_feature (416)..(418): n is a, c, g, or t
  Probeset Number=SeqID_20936
ggcgtgcggggccgctcgagacaaaatggttagcctaggaccttcatggatggtccggggaagtggtcagcgtcacggcgggggagatacacggtcgatgaacccggaatttcacaccggagcccagattcgtggtcaagccgccgtgtgctacagctagctttcctctccgccctccgacgatgcgcgaggtcacgagtcatctgaaaagcaagttggtacctggaatctcaagtgccaggtcaagaacaggtaccgcaagttgaggcgcatggaggatgctatgatgagttcgtgagaggtctaggtcgtcgtctcccagtcaactttgggttgctggaccgttgtctccttataatgtaattatttattttgtatagaactcctattatatagtaaagttgtgacattcgatnnn

SEQ ID NO: 6534 - DNA, 331 bp, Zea mays
  misc_feature (1)..(3): n is a, c, g, or t
  Peptide Sequence Number=SeqID_11037
  Probeset Number=SeqID_20937
nnngaaacgaatgtcacatctttactatataataggagttctgtacataataaataaataattacatcatatggagacaacgatccagcaacctaaagttaactgggagacgacgacctagacatctcacgaactcatcacatcatcctccatgcgcctcatcttggggtacctgttcttgacaacggattatgtacaagctccaatccccaaggcaatagcgctctgatagctggcgaggttgcagatttggagggataggggcgatggcctcagtatttatcctccggccaagaattcgccgaggtgggggtggaagtcttcggcggtc

SEQ ID NO: 6535 - DNA, 331 bp, Zea mays
  misc_feature (329)..(331): n is a, c, g, or t
  Probeset Number=SeqID_20938
gaccgccgaagacttccacccccacctcggcgaattcttggccggaggataaatactgaggccatcgcccctatccctccaaatctgcaacctcgccagctatcagagcgctattgccttggggattggagcttgtacataatccgttgtcaagaacaggtaccccaagatgaggcgcatggaggatgatgtgatgagttcgtgagatgtctaggtcgtcgtctcccagttaactttaggttgctggatcgttgtctccatatgatgtaattatttatttattatgtacagaactcctattatatagtaaagatgtgacattcgtttcnnn

SEQ ID NO: 6536 - DNA, 633 bp, Zea mays
  misc_feature (1)..(4): n is a, c, g, or t
  misc_feature (633)..(633): n is a, c, g, or t
  Peptide Sequence Number=SeqID_11038
  Probeset Number=SeqID_20939
nnnnaaatgtgcgtaaaacatcagagtatttattacatagcgggaagacttattacaaaataaaataataattataaaacgaactaaggatcgttggcgccaatgtcaactgagaaacgccacctagatcagatcatactcctcgccttggggctcctcctgaaccacctgttcttgaccttcaatgagctcctgctcagctacttctacttgctgaacctcagattccacactggcttgctcgtcttggttcacggcgacagcaggtctggccacggggagttgcggccgcgagcggatgctccacgatggtgagcaatttgttgcccggtgatcccagtcaacgcaccaattatggcggggaaacgtgcgacgaacgccagggatcgcacccctgctatgaattggggcttgggagctataattcccggagtcaaccccggcgaccggtcaccattgccttcactgctcgcgacgaaggaccagaggatggggtggatagcggcacacgcaaaaattgaagaggagggaggagagaggttgcggccggcttcttatggaggcgcggaacggctgttagccagctggggccggaagacccgaggagaagtggttgcggtcacggcggcgacn

SEQ ID NO: 6537 - DNA, 633 bp, Zea mays
  misc_feature (1)..(1): n is a, c, g, or t
  misc_feature (630)..(633): n is a, c, g, or t
  Probeset Number=SeqID_20940
ngtcgccgccgtgaccgcaaccacttctcctcgggtcttccggccccagctggctaacagccgttccgcgcctccataagaagccggccgcaacctctctcctccctcctcttcaatttttgcgtgtgccgctatccaccccatcctctggtccttcgtcgcgagcagtgaaggcaatggtgaccggtcgccggggttgactccgggaattatagctcccaagccccaattcatagcaggggtgcgatccctggcgttcgtcgcacgtttccccgccataattggtgcgttgactgggatcaccgggcaacaaattgctcaccatcgtggagcatccgctcgcggccgcaactccccgtggccagacctgctgtcgccgtgaaccaagacgagcaagccagtgtggaatctgaggttcagcaagtagaagtagctgagcaggagctcattgaaggtcaagaacaggtggttcaggaggagccccaaggcgaggagtatgatctgatctaggtggcgtttctcagttgacattggcgccaacgatccttagttcgttttataattattattttattttgtaataagtcttcccgctatgtaataaatactctgatgttttacgcacatttnnnn

SEQ ID NO: 6538 - DNA, 573 bp, Zea mays
  misc_feature (555)..(573): n is a, c, g, or t
  Peptide Sequence Number=SeqID_11039
  Probeset Number=SeqID_20941
ttttttttttttttttttagagataaatgtcacaaatattattacatagctgaagtaccttaaaaaataaatgataacaataaagcaaactaataattattccttggcgccataaagctgactaggagacgccacctagataagctcgtattcctcgttgtagacctccacctgggctacctgctcttcaccttcaatgagctcctgctcagtattttccacctgctgtgtaccagggtcttcagtcgcttgctcgtaatgattacgaagtgcctttccctgcccatgacgtgcccaagatttgtggccatggtgtcaatttggcggcgcccatgtcacactccctcccagccaccacctcaacacgatcttggagcttggacggactctcccgaccgcgcacaaggcaccaattagtgcagttcacgccgaacgatggtggaggcctccggcggctccctgttctctctctcggtggtgagtatcccaattcggggtgctggtgcgtgtggtctagggggtgccctcccttttatcggcgaagatggcgaacgnnnnnnnnnnnnnnnnnnn

SEQ ID NO: 6539 - DNA, 761 bp, Zea mays
  misc_feature (1)..(100): n is a, c, g, or t
  misc_feature (105)..(107): n is a, c, g, or t
  misc_feature (109)..(109): n is a, c, g, or t
  misc_feature (123)..(128): n is a, c, g, or t
  misc_feature (143)..(151): n is a, c, g, or t
  misc_feature (165)..(170): n is a, c, g, or t
  misc_feature (180)..(185): n is a, c, g, or t
  misc_feature (216)..(216): n is a, c, g, or t
  misc_feature (237)..(241): n is a, c, g, or t
  misc_feature (256)..(256): n is a, c, g, or t
  Probeset Number=SeqID_20942
nnnnnnnnnnnnnnnnnnnnnnnnnnnnnnnnnnnnnnnnnnnnnnnnnnnnnnnnnnnnnnnnnnnnnnnnnnnnnnnnnnnnnnnnnnnnnnnnnnnntgaannnanttgacgcatcccgnnnnnnaccttgctcgactgnnnnnnnnnccatctctctcctnnnnnngtcgcgcacnnnnnncttgctccagctcgccgaccggagcttcgcncgtccccatggcgactgctcnnnnngcgcgctcgacgtcnatctccagccagcgctctctccaaccaaggaatcaggtgaagacgaggctagcatcacgatactccccaagtgttcgataaattgcttggaccggaaaatcgctaccgatcttgcggcttcgagtcagctgctgaaacggtacgataattgatcgcgtaatgcggaagacgagccaagtcgaccccaagcgcggactactctgcatggagatgctgatgaacgaacctgcctgatcaagtgctaggataaggatgatcgtcaagtggtcgcctaacaaacactaacctagtgttactcaggttttaactttgtgctgttgttgatggtgttaagtgccggtgggctcggccttcttataagtctaagtacttcttatatacttcttattgaggatggtcacttgagctagcatatatttcaaacttatacttttgtaatcacttcgataaaataatgtaaattttttttataacctgtaaaatttggtaataagatttccgctgc

SEQ ID NO: 6540 - DNA, 798 bp, Zea mays
  misc_feature (1)..(24): n is a, c, g, or t
  misc_feature (399)..(401): n is a, c, g, or t
  misc_feature (403)..(407): n is a, c, g, or t
  misc_feature (411)..(413): n is a, c, g, or t
  misc_feature (419)..(419): n is a, c, g, or t
  misc_feature (421)..(423): n is a, c, g, or t
  misc_feature (433)..(433): n is a, c, g, or t
  misc_feature (435)..(439): n is a, c, g, or t
  misc_feature (443)..(444): n is a, c, g, or t
  misc_feature (446)..(448): n is a, c, g, or t
  misc_feature (498)..(500): n is a, c, g, or t
  misc_feature (554)..(563): n is a, c, g, or t
  misc_feature (593)..(600): n is a, c, g, or t
  misc_feature (716)..(718): n is a, c, g, or t
  Peptide Sequence Number=SeqID_11040
  Probeset Number=SeqID_20943
nnnnnnnnnnnnnnnnnnnnnnnncgcgccgccatggccgcaggaaccccgccgtcgtggaaggtcgtaatccgccgtctgggctaacccgtgccggcctgggagtttctcctcaataccctgctggtgtccgcggcttcttcaggcaaaccttgcggctggggtggagtgaattggacaccggaggaaaagttccgccgtgtgctcgctcctcaccgtggtcagggcactgggctgcatacatctcgaagagcctgtgactgaggatcctggtgaccaacagatagaagtagctgagcaggagctcattgaaggcaagttgtccccttgaccactttttacccaataatgttctttaatatcatttattcatgcataggttaatttttatggtgttgnnncnnnnncgannncgctancnnncgctctagcntnnnnntatnncnnngcgccaacgggagcagaagaaccggcaaggtccacccttcgccttgcacnnnacgagacgaaggcctacgacgacgtcgccccatctcacatcctcactcgacctnnnnnnnnnntgggattcagcccattgtaacaggccccgnnnnnnnnagtgtgttacgggcccgatttgtaataacttttctgtaatgacagtatgtaaccctcctttgtaggaatattccggggatagtctagctgcctgagggtacatgcgtccttacatnnngacgttgggcactcaggcacctataaatacccccgtacagtgcccttgagaggctagattaacagagctattgccatctc

SEQ ID NO: 6541 - DNA, 816 bp, Zea mays
  misc_feature (1)..(11): n is a, c, g, or t
  misc_feature (601)..(816): n is a, c, g, or t
  Probeset Number=SeqID_20944
nnnnnnnnnnngagaaaatgattcaaaagaattacaaatttgaaatgttataaaatatttgtaaatttgaagatacatgctagcttaagagacaatcctcgatagagaagctaaagatgggatatacttatataagaagaccgagcccaccggcacttagcaccatccacaacagaacaaaattataacctgggataacactacgttagtgttgttagatgatgtccacgtggcgatcatctcacatcctggcgcttgatcagatcatccattcctctggtttattcgtcagcatcactttgaggttaatccaacacttttcctccacatcgtgcgatcaattaacgtacctccacaggctgaacgatgacgcgaggaaactacgtcgtgaggagaggctcgctggtttcccataaccacgagcaggtgacgcgcacggtcgacgaccagaccatgtggaggaactgcagcaggggatcgacagcgttcatggcgaggggaaaagagctgcttgctgctgggcggggagggcgacctactaaggtcggacgccagcggaccggaggcagaggaggcagccaagcacagggagttgagggcnnnnnnnnnnnnnnnnnnnnnnnnnnnnnnnnnnnnnnnnnnnnnnnnnnnnnnnnnnnnnnnnnnnnnnnnnnnnnnnnnnnnnnnnnnnnnnnnnnnnnnnnnnnnnnnnnnnnnnnnnnnnnnnnnnnnnnnnnnnnnnnnnnnnnnnnnnnnnnnnnnnnnnnnnnnnnnnnnnnnnnnnnnnnnnnnnnnnnnnnnnnnnnnnnnnnnnnn

SEQ ID NO: 6542 - DNA, 773 bp, Zea mays
  misc_feature (596)..(598): n is a, c, g, or t
  misc_feature (615)..(616): n is a, c, g, or t
  misc_feature (635)..(635): n is a, c, g, or t
  misc_feature (664)..(670): n is a, c, g, or t
  misc_feature (679)..(679): n is a, c, g, or t
  misc_feature (681)..(683): n is a, c, g, or t
  misc_feature (690)..(693): n is a, c, g, or t
  misc_feature (695)..(697): n is a, c, g, or t
  misc_feature (703)..(703): n is a, c, g, or t
  misc_feature (709)..(710): n is a, c, g, or t
  misc_feature (712)..(773): n is a, c, g, or t
  Peptide Sequence Number=SeqID_11041
  Probeset Number=SeqID_20945
ccggccggcgacacgactctcggcaacggatatctcggctctcgcatcgatgaagaacgtagcaaaatgcgatacctggtgtgaattgcagaatcccgcgaaccatcgagtttttgaacgcaagttgcgcccgaagccttctggcggagggcacgtctgcctgggcgtcacgcaatgcgcgcgcttttcgccgggtaggtgcaactaatcggccatgctatttccccgctgagatcctctccgctgaccggaacaaatccatcgggttgggagtataaaaccggcgccctgcaaccaccatcttcggatcgcgtcgcggagtggggaagctgggggtgggtcaccgtgtggagcgattgaatcctgcccgcgatccacctcatgccgcgggctgggtaccctccgactcgacgaacacgccggagcatcgcttcaccgaaccgcgcccatggaatcttcgtcgagcttcgtcgcaagtgagatcacgtgtcacctgaagagcaagttggtacctggaatctcaagtgccaggtcaagaacaggtaccgcaggatgaggcgcaaggaggatgctgcgatgggttcgtgagagatctnnnccgtcgtctcccagtcnnctttgggttgctggatcgnttcctcatatgatgtaattatttaattannnnnnntataactcntnnnatatagnnnngnnntgacantcgatnntnnnnnnnnnnnnnnnnnnnnnnnnnnnnnnnnnnnnnnnnnnnnnnnnnnnnnnnnnnnnnn

SEQ ID NO: 6543 - DNA, 419 bp, Zea mays
  Peptide Sequence Number=SeqID_11042
  Probeset Number=SeqID_20946
accgaattcccgtgcgattcctctcccctcgcctcctcgtctccccctaggggatcgtcggagaggaatcgcaaagagggccgtctcatccgaggcggaccaacaagctacggttgtggcggcaacgcgtttcttggcgcaggtggccaatgaattttttctaggctcatgtgtggcgatctagtcgtcggattggttgtcgccagaatgtgtgtgctacttttgcttagcaagctggaggagggacccaagaagtggttagaattatggcgacgatgatgaatggttgaagcagagagaggcggccgcggatcattcgaggccgaagcaacatcaacctcgagtcctcgacctgcaggtctcgttgtcatctcccgtctgtcacgctgcaaggttgaagtagacggtgtagaactcgt

SEQ ID NO: 6544 - DNA, 919 bp, Zea mays
  misc_feature (1)..(3): n is a, c, g, or t
  misc_feature (514)..(514): n is a, c, g, or t
  misc_feature (528)..(528): n is a, c, g, or t
  misc_feature (534)..(541): n is a, c, g, or t
  misc_feature (543)..(546): n is a, c, g, or t
  misc_feature (551)..(554): n is a, c, g, or t
  misc_feature (556)..(568): n is a, c, g, or t
  misc_feature (570)..(588): n is a, c, g, or t
  misc_feature (595)..(598): n is a, c, g, or t
  misc_feature (600)..(600): n is a, c, g, or t
  misc_feature (603)..(605): n is a, c, g, or t
  misc_feature (607)..(622): n is a, c, g, or t
  misc_feature (624)..(630): n is a, c, g, or t
  misc_feature (632)..(664): n is a, c, g, or t
  misc_feature (667)..(688): n is a, c, g, or t
  misc_feature (691)..(698): n is a, c, g, or t
  misc_feature (701)..(717): n is a, c, g, or t
  misc_feature (720)..(723): n is a, c, g, or t
  misc_feature (725)..(727): n is a, c, g, or t
  misc_feature (731)..(791): n is a, c, g, or t
  misc_feature (794)..(800): n is a, c, g, or t
  misc_feature (803)..(803): n is a, c, g, or t
  misc_feature (807)..(841): n is a, c, g, or t
  misc_feature (843)..(871): n is a, c, g, or t
  misc_feature (874)..(886): n is a, c, g, or t
  misc_feature (888)..(897): n is a, c, g, or t
  misc_feature (901)..(919): n is a, c, g, or t
  Probeset Number=SeqID_20947
nnnatatctatctggaaattcactcaccgggaacatacctggatggttattaagaagaaacaagatcgcggacatatcttttaataacttcacgatggggagttcaggtccgagccaatgccttcaagggagtgtcaatctggtggagagctattcagctgaagtgaaccgtttaaatagtattcatccatgcttaaagaggaacttcccatgtgttgcttcgaatggacaatatcactcttcactgcatatcaattgcggcgacaaagaagcaactattaacggaactaaatatgaagccgacacaacacccaaaggggcatcattgttgtatgtgtccccaggcttgaactgggcattcagcagcaccgggaacttcatggacgacaacataaatgacgacaactacatagcaacaagtgcatcaaaattggccgtgcccaattcagatctgtacaacaaagcccgtctttctcctctttcgctcacatattatgggctttgcatgttaagngggagctacacagntaatcnnnnnnnnannnnaaatnnnntnnnnnnnnnnnnncnnnnnnnnnnnnnnnnnnnaaaaatnnnnanttnnngnnnnnnnnnnnnnnnnannnnnnntnnnnnnnnnnnnnnnnnnnnnnnnnnnnnnnnnttnnnnnnnnnnnnnnnnnnnnnntannnnnnnnttnnnnnnnnnnnnnnnnncannnntnnntctnnnnnnnnnnnnnnnnnnnnnnnnnnnnnnnnnnnnnnnnnnnnnnnnnnnnnnnnnnnnnttnnnnnnnccncttnnnnnnnnnnnnnnnnnnnnnnnnnnnnnnnnnnntnnnnnnnnnnnnnnnnnnnnnnnnnnnnnccnnnnnnnnnnnnncnnnnnnnnnnaaannnnnnnnnnnnnnnnnnn

SEQ ID NO: 6545 - DNA, 194 bp, Zea mays
  Peptide Sequence Number=SeqID_11043
  Probeset Number=SeqID_20948
actttttgtgcggtagttgtgctttagagtcacagtgggggtctattccaacttcctagaccactccacgtaatggtgtgatggatgtttgtcacaagctgacctgaatcttgaaaatagtgctactgagaaatggcacactgttgcaaaaaaaaaaaaaaaaaaaaaaaaaaaaaaaaaaaaaaaccaaaatt

SEQ ID NO: 6546 - DNA, 484 bp, Zea mays
  Probeset Number=SeqID_20949
gcacgagcccaggctgcaggggattttgttgaggcatgggaggtgagcggctcatgcagggagaacggaggacacctaggagctgctgctggccgcggctcctcacactgcgatccatttccgagcttcgaggaatcgacggtcaagcttcggcgaccaagagaccaaactcctcaagttctacgaggctgaagatcctgaacatctgtttggtgaaggttgtccacattgcaaccactgctcaggagaagatgaagccgtggaaggagactcccaagagttccaagactacgactagttctaggtgtgggttggcggcaaactcccagtcagctgcctgtgaaggccctatctttactgcgtttcgtttagcactttgatttactcgttgagttgatgactatgtggatgtctatgacatcgtgatgtaataagttaatactcttctatgctattattcgagcactaaaaaaaaaaaaaaaaa

SEQ ID NO: 6547 - DNA, 484 bp, Zea mays
  Peptide Sequence Number=SeqID_11044
  Probeset Number=SeqID_20950
tttttttttttttttttagtgctcgaataatagcatagaagagtattaacttattacatcacgatgtcatagacatccacatagtcatcaactcaacgagtaaatcaaagtgctaaacgaaacgcagtaaagatagggccttcacaggcagctgactgggagtttgccgccaacccacacctagaactagtcgtagtcttggaactcttgggagtctccttccacggcttcatcttctcctgagcagtggttgcaatgtggacaaccttcaccaaacagatgttcaggatcttcagcctcgtagaacttgaggagtttggtctcttggtcgccgaagcttgaccgtcgattcctcgaagctcggaaatggatcgcagtgtgaggagccgcggccagcagcagctcctaggtgtcctccgttctccctgcatgagccgctcacctcccatgcctcaacaaaatcccctgcagcctgggctcgtgc

SEQ ID NO: 6548 - DNA, 569 bp, Zea mays
  misc_feature (513)..(513): n is a, c, g, or t
  misc_feature (516)..(516): n is a, c, g, or t
  misc_feature (531)..(531): n is a, c, g, or t
  misc_feature (538)..(538): n is a, c, g, or t
  misc_feature (550)..(550): n is a, c, g, or t
  Probeset Number=SeqID_20951
gagagctcactagtccccccccccccccacatcgttttgctcctgtttttttggaaaatttaggagagagatgacgccatcgatctggacgaatggcgagctcgacgatctagagtcagatctggtggggaagaagactggtcggtcgttaccgacggcaacgctgactgtagagctgatcgtgccaccagcacaagagatcaaggagttctttgccatcgtcgaggcgaccagtacaagcgcttcgcttccaagaaataactcttgaccatgtgaaggcagttgtctttcttggagatggttttggcaccacaccagagatgagcaaatgaaacttgatatagttcatactggagacttgctgctccaaaggcccttacctcctgttctgctagcgaaatgaaattgtgtttgggatctttaaaaaggggggctaggggttatccagagatgacaaggcccttcgaaattggctttccagcactgggatccgaagcgatgagtacaaaccgnccnggggagattgggtanactccgnaccccccctganaaaagctttttaaagaaaa

SEQ ID NO: 6549 - DNA, 360 bp, Zea mays
  misc_feature (277)..(279): n is a, c, g, or t
  misc_feature (344)..(345): n is a, c, g, or t
  misc_feature (357)..(359): n is a, c, g, or t
  Peptide Sequence Number=SeqID_11045
  Probeset Number=SeqID_20952
gaattctgccaagagggcatcctgtaattttgttgttcaaattgtaagaccggtcccaacggtcgtcggtactgtcgacggcctgcgatcggcaccgtctgcccctgagttccagccactgtcggtcgagctagcggtcggtgacgctgatgaccacccatgaaccgtagaccatctctgctgccacgtgtcgtcttttcattagtccatattatttttttatgtccaaaatattttaagaacctaaggaaatatttatgaaccatgtagcatctannnaaaaaaaaaaaaaaaaaaaaaaaaaaaaaaaaaaaaaaaagaaaaaaaaaaaaaaaaaaaactcnngggggggcccgnnnc

SEQ ID NO: 6550 - DNA, 360 bp, Zea mays
  misc_feature (2)..(4): n is a, c, g, or t
  misc_feature (16)..(17): n is a, c, g, or t
  misc_feature (82)..(84): n is a, c, g, or t
  Probeset Number=SeqID_20953
gnnncgggcccccccnngagttttttttttttttttttttcttttttttttttttttttttttttttttttttttttttttnnntagatgctacatggttcataaatatttccttaggttcttaaaatattttggacataaaaaaataatatggactaatgaaaagacgacacgtggcagcagagatggtctacggttcatgggtggtcatcagcgtcaccgaccgctagctcgaccgacagtggctggaactcaggggcagacggtgccgatcgcaggccgtcgacagtaccgacgaccgttgggaccggtcttacaatttgaacaacaaaattacaggatgccctcttggcagaattc

SEQ ID NO: 6551 - DNA, 494 bp, Zea mays
  Peptide Sequence Number=SeqID_11046
  Probeset Number=SeqID_20954
cggccaaagcagcagcttgcaataggatgaataacatcgctagttttccccaacagaaaatgtacatagttcccagcacactattggtgcgtctgtagttgttttcttatcaatatacaaagccaataacgaatttttcccaagaagaagaagaagaagacgatggcgacgactctacttgcacgagcatcttgatcttatcaaatatagcacaatcctgttgttgttggtggattttgcacaagtgctaatagaccaaaggcttgcaaatcaaaatggcccattgcacagaactgttgcaaaaaatgtgccaaactcacatcacggtgagttagtgatcgattgtgttacttggatacgagagaatatcgccaacgaagagggcggacatcggtggaaggggccttgtgtcaccgccgtcacttcctccaaatcgcgttgccgtcattgcttctacgccgttggctgggatgagttccacaactgttcattca

SEQ ID NO: 6552 - DNA, 1916 bp, Zea mays
  misc_feature (1)..(1): n is a, c, g, or t
  misc_feature (12)..(15): n is a, c, g, or t
  misc_feature (18)..(20): n is a, c, g, or t
  misc_feature (36)..(42): n is a, c, g, or t
  misc_feature (655)..(656): n is a, c, g, or t
  misc_feature (710)..(717): n is a, c, g, or t
  misc_feature (731)..(734): n is a, c, g, or t
  misc_feature (745)..(746): n is a, c, g, or t
  misc_feature (748)..(749): n is a, c, g, or t
  misc_feature (751)..(752): n is a, c, g, or t
  misc_feature (763)..(764): n is a, c, g, or t
  misc_feature (1916)..(1916): n is a, c, g, or t
  Probeset Number=SeqID_20955
nggggatgcgannnnacnnncactaaagcaccggannnnnnncagaactccgaagttaagcgtgcttgggcgagagtagtactaggatgggtgacctcctgggaagtcctcgtgttgcattccatcgatcgtcaatgcaagtttgtccattcgcattggtctgaatactgtagctactagcgcgagtgccactgtgccgcagctgcctgctcgccattactgcaagctgtgttcaatcaaagcttaattaggctccctctacatctgatccagctaagtagctagccagcactacagaagggcgtggcaagaatcaggagagagatagcaggggggctagctagctgagctcgtgcgacgaagaatggccggaattggcaggaacatggtggcgccgctcctggtgctcaacctcatcatgtacatcatcgtcatcggcttcgcgagctggaacctgaaccacttcatcaacgggcagaccaactaccccggcgtggccggcaacggcgcgacgttctacttcctggtgttcgccatcctggccggcgtggtgggcgcggcgtccaagctggcgggcgtgcaccacgtgcgcgcctggcgccacgacagcctggccaccaacgcctgggccatcacggcgctcgccttcgggctnncctgcaaggagatccacatcggcggacaccgcggctggcgcctgcgcgtgctgnnnnnnnncgtcatcatcctcnnnntcacgcagctnntnnanntgctcatgctnnaaccctagccgcctgcctctcctcctccagagctcgtcgccaccggccaccgccaccctcgatcacgccgtccgtcgaggtaaggtcagcatggtgagggtcagtgtgctcaacgatgcgctcaagtccatgtacaacgctgagaagatcggcaagaggcaggtcatgatcaggccgtcgtccaaggtcatcatcaagttcctgacggtcatgcagcgccacggctacattggagagttcgagtacgttgatgaccaccgatcgggcaagatcgtggtcgaactcaacgggaggctgaacaagtgcggcgtcatcagccctcgctttgatatcggcgtgaaagacattgagggattgactgcaaggctgctcccgtccaggcagttcggatacatcgtcctcacaacttcggcaggcatcatggaccacgaggaggcccgccggaagagcgtcggaggcaaggttctaggtttcttctattgaagaagctgagaatctttgttatggcctgcctgcctgtcttactctctcagactagagtcggtgttattttaggatgcgatcataccagcactaaagcaccggatcccatcagaactccgaagttaagcgtgcttgggcgagagtagtactaggatgggtgacctcctgggaagtcctcgtgttgcattccggaatttcttccattcaaccaactgtctacactgaaccctgctgcttatttgcagcaacaacaactactaccattcagccagctagctactgcctacgctcagcagcaacaatttcttccatttaaccaattggccgcactgaacccctctgcttatttccagcaacaaatactactaccatttggccagctagctacaacaagccccgcttcctttttgacacaacaacaattgcttccgttctaccagcagtttgtggctaaccccgcaaccctcttacaactgcaacagttgcttccctttgtccaacttgctttgacaaacccagcagccttctaccaacaacacatcattggcgatgccctcttttagattgcttattagttgtaattcaataatgaagttttttggctgatgtatgtggcctcctagaaataagaagttacatttctaaaaaaaaaaaaaaaaaaggcccctn

SEQ ID NO: 6553 - DNA, 616 bp, Zea mays
  misc_feature (1)..(2): n is a, c, g, or t
  misc_feature (613)..(616): n is a, c, g, or t
  Peptide Sequence Number=SeqID_11047
  Probeset Number=SeqID_20956
nncaggctatcatgtcttctaggaatagaaagtatgattctggttttgaaaggcataagaagaaacggagactagaagcagctgatcaatctcaaacgggttctatggacagatttgttgtgaaagactctcaacttaattccaaaaatcaaactccagaagctaatcgtgttggtgaaattgagagtcatggtgaccagggacagggagatgctaacattgcagtacaacatgaggctcaggttgaagaaattggctagggagatggtgctaatactactgaagaagttagtggccataccgatgatgtcgatacttattttcaacctgatatatttgatccaagaatgtgggatgcacttgatttttgtactttaggggcccatttctcgtttcgccccggggcctaaaaaactcggagacggccctgcccaggataaggagtactttgctgaacttgcagttgacgctgtattaaggcttaagggcagcaccaacctggaagccattcaaattctgaagaaacctggagaattgagaatgccaaaactttcgttgcaaacactgctatggacacagatttaagactatgggcgacagcaacggaattcgnnnn

SEQ ID NO: 6554 - DNA, 616 bp, Zea mays
  misc_feature (1)..(4): n is a, c, g, or t
  misc_feature (615)..(616): n is a, c, g, or t
  Peptide Sequence Number=SeqID_11048
  Probeset Number=SeqID_20957
nnnncgaattccgttgctgtcgcccatagtcttaaatctgtgtccatagcagtgtttgcaacgaaagttttggcattctcaattctccaggtttcttcagaatttgaatggcttccaggttggtgctgcccttaagccttaatacagcgtcaactgcaagttcagcaaagtactccttatcctgggcagggccgtctccgagttttttaggccccggggcgaaacgagaaatgggcccctaaagtacaaaaatcaagtgcatcccacattcttggatcaaatatatcaggttgaaaataagtatcgacatcatcggtatggccactaacttcttcagtagtattagcaccatctccctagccaatttcttcaacctgagcctcatgttgtactgcaatgttagcatctccctgtccctggtcaccatgactctcaatttcaccaacacgattagcttctggagtttgatttttggaattaagttgagagtctttcacaacaaatctgtccatagaacccgtttgagattgatcagctgcttctagtctccgtttcttcttatgcctttcaaaaccagaatcatactttctattcctagaagacatgatagcctgnn

SEQ ID NO: 6555 - DNA, 618 bp, Zea mays
  Peptide Sequence Number=SeqID_11049
  Probeset Number=SeqID_20958
aattcggcacgacgttttgattggatgctttatttttccccatatagctttgtgggtttgtatgttggagttagctgaaaatactaatgattttaccatgtatttggccctttgttctgtcagatgggctcgcaaattctataaggattcttctcgagttggcaatcagaaactgtgataatttccttggactggaagagaagtgccctgaaacaagtcaaaatctcattcaagcgcgcctgtatcctctaggctgcttggatcctgagaacttctgcaaataaagaagcccaacttcatctttagctgaccccgacggtggcgacgatgtcgttctccatcccggatgcgcgggagatccctacggcagtgggtcagaggggagggctgagctctgtcgcggtgatgggagggagtggtcgaggtgctcgaagctctcactgacaacagtgggggagaggatacaagtttactgcggctaggggaggagagagggagaggagagccccgctgaagaagccccccctcttcgccatagaaggtatgtgtttagtagatatgaaatgttgttctaagagagcatggaacaacaacgaaaaagaaaaaaaaaaaaaaaaa

SEQ ID NO: 6556 - DNA, 618 bp, Zea mays
  Probeset Number=SeqID_20959
tttttttttttttttttctttttcgttgttgttccatgctctcttagaacaacatttcatatctactaaacacataccttctatggcgaagagggggggcttcttcagcggggctctcctctccctctctcctcccctagccgcagtaaacttgtatcctctcccccactgttgtcagtgagagcttcgagcacctcgaccactccctcccatcaccgcgacagagctcagccctcccctctgacccactgccgtagggatctcccgcgcatccgggatggagaacgacatcgtcgccaccgtcggggtcagctaaagatgaagttgggcttctttatttgcagaagttctcaggatccaagcagcctagaggatacaggcgcgcttgaatgagattttgacttgtttcagggcacttctcttccagtccaaggaaattatcacagtttctgattgccaactcgagaagaatccttatagaatttgcgagcccatctgacagaacaaagggccaaatacatggtaaaatcattagtattttcagctaactccaacatacaaacccacaaagctatatggggaaaaataaagcatccaatcaaaacgtcgtgccgaatt

SEQ ID NO: 6557 - DNA, 509 bp, Zea mays
  Peptide Sequence Number=SeqID_11050
  Probeset Number=SeqID_20960
atcgatcgatctccgtatcgccggccgcttcctctcccccgcctgtcccctgcggccgtcgactcagccgctttctttctccgatcatccattgctgacgactgccggacgacgactgccagtgccatggcgactcaagcacccgagaaccaccgccattctcctactactaaggacgagaggagtggtgcaggtgcggaggatcaggcgatcgacgactggctcccaatcacctcgtccaggaatgccaagtggtggtactccgcgttccacaacgtcaccgccatggtcggcgccggcgtgctcagccttccttacgccatgtccaagctcggctggtacgtgtgtgtgacactgtcatcatcgacacactgcatatgcatatgcatgccacattcttcaattcacaagggcgtcgtcacaacttgcacacaggggacctggcatcgcggtgctgatgctgtcgtgggtcgtcaccctgtacaccatgtggcagatggtggagatgc

SEQ ID NO: 6558 - DNA, 691 bp, Zea mays
  misc_feature (565)..(567): n is a, c, g, or t
  misc_feature (593)..(598): n is a, c, g, or t
  misc_feature (610)..(611): n is a, c, g, or t
  misc_feature (624)..(628): n is a, c, g, or t
  misc_feature (630)..(631): n is a, c, g, or t
  misc_feature (638)..(638): n is a, c, g, or t
  misc_feature (640)..(644): n is a, c, g, or t
  misc_feature (647)..(649): n is a, c, g, or t
  misc_feature (654)..(657): n is a, c, g, or t
  misc_feature (659)..(663): n is a, c, g, or t
  misc_feature (666)..(677): n is a, c, g, or t
  misc_feature (680)..(685): n is a, c, g, or t
  misc_feature (687)..(691): n is a, c, g, or t
  Peptide Sequence Number=SeqID_11051
  Probeset Number=SeqID_20961
ggcaacgctccctccctgcttctctctccctctcgcgtctacttccctgcgcacgcgccgcgccctggattcctctctctccctcgcgtcttcctcccactgccatggcgcccctctccctggtgctttcccatggcatgccccgagctcctcccagcccaaccgctccttcctctgctcctccctgtttgccatcgctctagctcgcctggtcgccaaactccaagaacctgcgccgctcgcctccctgtgccgacgtcgtattctggtggccgcgctccactcctgcacctccccttccatggctaccgccgcccccaagcctagggccttgtcgagctccctcagctcgcccccgaacacaaccatatgccaacctcgccttggctccccagcgtcgctcgcccttgctgttccctgtcgagcttgccctacttccgtgctcgtgcaacctgctggtggcccggctactcatcatcggctcccctgtccgatgcgccgtcagccaactcgctggcggactttgctgtggtctggctcggtcgcgcgctcggctacttggtgnnngaccggcgccactcctggtgccgatnnnnnntgctggacatgnntcgaagctttctnnnnntnngcgctangnnnnncannntggcnnnngnnnnnctnnnnnnnnnnnnccnnnnnncnnnnn

SEQ ID NO: 6559 - DNA, 471 bp, Zea mays
  Probeset Number=SeqID_20962
atcctagtaggagctagcatagtgttgcctcgacaaatcgccgggcttcatcaccatacacggagagaaaaaaaacggggcccccatctactgtaaaccccgccgtggtggccgttcgaagcatgcagcaggggtaggatgtaccacgtgcacgtgaggctcgtgcttggtgaaaccgcgggatgcgctccgccgccgcgtctggccatgggggaaaagttagagcttgcgcagagaatggaggaaggatgtgacgaggtccgccgtggactgattttcgtccacgcccgtgccagggcttcgattgtgaccaggtagcttcgcagtgtcgtggggaagcgattcctaccactgaatcgtcgtgtgggtggccggagctaggccaatggctcgacggagcaattggcgccgctgtggatcgctccgcgccgtggccgagggccacaccaactccaaccactggtaagccac

SEQ ID NO: 6560 - DNA, 957 bp, Zea mays
  misc_feature (11)..(14): n is a, c, g, or t
  misc_feature (735)..(735): n is a, c, g, or t
  misc_feature (779)..(783): n is a, c, g, or t
  misc_feature (785)..(792): n is a, c, g, or t
  misc_feature (802)..(806): n is a, c, g, or t
  misc_feature (808)..(811): n is a, c, g, or t
  misc_feature (815)..(815): n is a, c, g, or t
  misc_feature (833)..(849): n is a, c, g, or t
  misc_feature (853)..(863): n is a, c, g, or t
  misc_feature (865)..(869): n is a, c, g, or t
  misc_feature (871)..(929): n is a, c, g, or t
  misc_feature (934)..(943): n is a, c, g, or t
  misc_feature (947)..(955): n is a, c, g, or t
  Peptide Sequence Number=SeqID_11052
  Probeset Number=SeqID_20963
gcgggccgggnnnnccgcctccccctccctccctcgccgagcccaagagagaatcggagaccacggcccggccagctcctccccctcgcccccgaccccgcgtcctcctcgctactacatggcagctcggcgtctccacggccaatccgactccgagaccctcaagaacaacccctgcttctgcttctcctgcccctgtcctcagccgcgcgccgcgcatctcgattccgccgccgctgcccccgcccgcgcccgctcctgattgggccctcgcgtgcgccgcgtcctgactcctgactgactgccgctgcgcgggttcttgcgcggtgccggtggtttcttgctgcgattcgtaggacgccgtccgtttcttgattccggttcttgctgccgcgcggcctcgccatggggaagagcaagaagagcaaggtccgcggcggcggaggggacgaccttctggacagcagcgacgctgacagcgtgggctcgtcgtccaccgcgctctcagatctctccatctcgtacgccaccgagaacgtcaactcgcacgagtttgttctcgacaagtacatcgacgctctctacgagaagaggggttctacaagagaggcagcgttggcttcattggttgatgcttttgaaagttttatgcttggtggtcttgttgagaacaaatatgccactctactgagtctattcaatacttcgatcaagaagggatctaccaaggaggcntgcctggcatctcgcgccattgggctactgtctattacacttgnnnnngnnnnnnnntcacatgaannnnngnnnnaatnacattccacagctttctnnnnnnnnnnnnnnnnngtcnnnnnnnnnnnannnnnannnnnnnnnnnnnnnnnnnnnnnnnnnnnnnnnnnnnnnnnnnnnnnnnnnnnnnnnnnggaannnnnnnnnntctnnnnnnnnnca

SEQ ID NO: 6561 - DNA, 986 bp, Zea mays
  misc_feature (1)..(202): n is a, c, g, or t
  misc_feature (208)..(230): n is a, c, g, or t
  misc_feature (232)..(251): n is a, c, g, or t
  misc_feature (253)..(280): n is a, c, g, or t
  misc_feature (282)..(288): n is a, c, g, or t
  misc_feature (291)..(291): n is a, c, g, or t
  misc_feature (294)..(299): n is a, c, g, or t
  misc_feature (301)..(301): n is a, c, g, or t
  misc_feature (304)..(306): n is a, c, g, or t
  misc_feature (308)..(314): n is a, c, g, or t
  misc_feature (316)..(334): n is a, c, g, or t
  misc_feature (337)..(340): n is a, c, g, or t
  misc_feature (342)..(346): n is a, c, g, or t
  misc_feature (357)..(358): n is a, c, g, or t
  misc_feature (363)..(363): n is a, c, g, or t
  misc_feature (374)..(382): n is a, c, g, or t
  misc_feature (385)..(386): n is a, c, g, or t
  misc_feature (982)..(986): n is a, c, g, or t
  Peptide Sequence Number=SeqID_11053
  Probeset Number=SeqID_20964
nnnnnnnnnnnnnnnnnnnnnnnnnnnnnnnnnnnnnnnnnnnnnnnnnnnnnnnnnnnnnnnnnnnnnnnnnnnnnnnnnnnnnnnnnnnnnnnnnnnnnnnnnnnnnnnnnnnnnnnnnnnnnnnnnnnnnnnnnnnnnnnnnnnnnnnnnnnnnnnnnnnnnnnnnnnnnnnnnnnnnnnnnnnnnnnnnnnnnnnnnntttttnnnnnnnnnnnnnnnnnnnnnnngnnnnnnnnnnnnnnnnnnnngnnnnnnnnnnnnnnnnnnnnnnnnnnnngnnnnnnnagntcnnnnnntntannntnnnnnnngnnnnnnnnnnnnnnnnnnnatnnnngnnnnnatcgtcgaganngtcancgtcatcagcnnnnnnnnntcnnatccgcacgtggacatccgcgaggccggcgtgcgcgccgccaacgtcatcgtgcgcacgctgcggggcgagatcaagccggtcatgacctgggccggcaagcccatgctgccgcacgtcatgtgccagggcacccacgccgagcccaacaaatcgctgcaggaacgctgccgccagctggaggccgacggcgtgctggcggcgtcggtgttcgtgggcttcccgcatgccgacatccgcgaggccggcctgagcgcggtggtctgtacggacgccaacctggcgcaggccgagcaataccgcgacgaactgctggagcgcgcctggaacgaccgcgccaagtgggtgttccatccggaaccgctggcccccaccatcgcccgcgccaaggccatcgagcaaggcccggtggtgctgctggaccacttcgacaacaccggctccggcggcaccatggacaccaccgcggtgctggccgaagtgctgcgccaggaactggacaacgtggtgttctacgccatctgtgatccgcaggcggcgcgcgaggccgccacggccggcgtcggcagcaccatcaccctgccgctgggcggcaannnnn

SEQ ID NO: 6562 - DNA, 927 bp, Zea mays
  misc_feature (1)..(16): n is a, c, g, or t
  misc_feature (25)..(28): n is a, c, g, or t
  misc_feature (32)..(35): n is a, c, g, or t
  misc_feature (123)..(125): n is a, c, g, or t
  misc_feature (146)..(148): n is a, c, g, or t
  misc_feature (199)..(204): n is a, c, g, or t
  misc_feature (221)..(223): n is a, c, g, or t
  misc_feature (225)..(225): n is a, c, g, or t
  misc_feature (236)..(236): n is a, c, g, or t
  misc_feature (241)..(243): n is a, c, g, or t
  misc_feature (248)..(249): n is a, c, g, or t
  misc_feature (254)..(257): n is a, c, g, or t
  misc_feature (261)..(261): n is a, c, g, or t
  misc_feature (281)..(283): n is a, c, g, or t
  misc_feature (294)..(296): n is a, c, g, or t
  misc_feature (306)..(310): n is a, c, g, or t
  misc_feature (312)..(312): n is a, c, g, or t
  misc_feature (314)..(314): n is a, c, g, or t
  misc_feature (316)..(320): n is a, c, g, or t
  misc_feature (324)..(330): n is a, c, g, or t
  misc_feature (393)..(393): n is a, c, g, or t
  misc_feature (410)..(410): n is a, c, g, or t
  Peptide Sequence Number=SeqID_11054
  Probeset Number=SeqID_20965
nnnnnnnnnnnnnnnngtcgacccnnnngtcnnnngacgcgtgggcggacgcgtgggccggctcccctttcccattggcctccacgatggcgctccgcctcaacgacgtcgcgctctgcctcnnnccgccgctcgccgcccgccgnnnccgcagccgcagccgcagcagcggcaggttcgtcgccgtcgcctccatgannnnnnccgtctccaccaaggtnnngnataagaagccntttgnnnctccnngggannnncatntccaggttacacattcaatnnnacctcacaagnnngaaattttcnnnnnantngnnnnntggnnnnnnnacgggtcaccagtctcccaagccctccctcagctgtgatttgtttggttgttcctccctcagnctcgatcgccaccaggnaggaggcatcccaatctcgcgagagtcagtagcggcgtccgccgcctcgctgagggtcgccccccacccacccacgggggcacccgacagtacgaaccccacccactctcgaggcgcgtggggcttaccatgccccaccctgacccagatatatatgagatccccaacattacaccaccagtagactcacccccccaccgcggcggggggcgggggtgctgatgccttaacattctgtgcagaagcacccttgctgaagggtagatagaatacatcggtaaccctcgccaccgaacttactagacccccccccgcacgacaagttcgcgtgtattccgcgacccggaattcttactgcccgcactacccgcctatcacagcaccacggacataatgggccgcgacacgagccgccgttacatgcgcgcggccaatcgagattgaggagtgaacagccagacaacgcgaaagaataaccagatgacgaatcgagcggagagacaatagcacaatatag

SEQ ID NO: 6563 - DNA, 910 bp, Zea mays
  misc_feature (9)..(14): n is a, c, g, or t
  misc_feature (139)..(146): n is a, c, g, or t
  misc_feature (177)..(179): n is a, c, g, or t
  misc_feature (282)..(282): n is a, c, g, or t
  misc_feature (320)..(320): n is a, c, g, or t
  misc_feature (354)..(355): n is a, c, g, or t
  misc_feature (617)..(910): n is a, c, g, or t
  Peptide Sequence Number=SeqID_11055
  Probeset Number=SeqID_20966
tgtccactnnnnnntgttgtatccacacgacctttctgttctataagttcgttttgttgtttctgccattctgcctgctctgctgctcctcgtgagccttaactgatgatcttactatcttcctcttttgtgaagggtnnnnnnnnggaacgatgatacactatggcggatttctcnnnggtcgagaataagaagccatttgctcctctgagggaggtacatgtctagattacacattcaatgccatctcacaagattaaaatcttcaagtatgattcggcnagagataatatcttgacacatctcaagtcagtcgagangtgttggcagccacatgattttctccctgacccnnaatctgaatgattgcttgttcctctcgctcgccagtcgccaccaggcagcaggcatccgatgcttgtgagagccagtagcggcggaggcgcttacggcttcccttcccattggcctccgggatggcgctccgcctccacgacgtcgcgctctgcctctccccgccgctcgccgcccgccgccgcagcggcggcagtttcgtcgccgtcgcctccatgacgtccgccgccgtctccaccagggtggagaacaagaagccattnnnnnnnnnnnnnnnnnnnnnnnnnnnnnnnnnnnnnnnnnnnnnnnnnnnnnnnnnnnnnnnnnnnnnnnnnnnnnnnnnnnnnnnnnnnnnnnnnnnnnnnnnnnnnnnnnnnnnnnnnnnnnnnnnnnnnnnnnnnnnnnnnnnnnnnnnnnnnnnnnnnnnnnnnnnnnnnnnnnnnnnnnnnnnnnnnnnnnnnnnnnnnnnnnnnnnnnnnnnnnnnnnnnnnnnnnnnnnnnnnnnnnnnnnnnnnnnnnnnnnnnnnnnnnnnnnnnnnnnnnnnnnnnnnnnnnn

SEQ ID NO: 6564 - DNA, 417 bp, Zea mays
  misc_feature (391)..(391): n is a, c, g, or t
  Peptide Sequence Number=SeqID_11056
  Probeset Number=SeqID_20967
tatggttgtttatacgctattggttgctagtaatttctttggccgtgtgattgactttttgggaagctggaaaaggttcaagttacaacaggaagaagagaatatagatggtttagatccctctggaatgattattgtacaaaaagagagatcttggatcgaacaagggtgcaaagtgggtgagcatgttattccattggcaaggaatttcaatggcgtgaacacagatattgaatcacaaaatgtgccattgagaatttctgaaaattgcatgcatgatcttttttacccactggttatggaaggtccaaatgataacccttgcccttgccccaaaatcctgtcctgtgtcgactaggtgcgcgaaccatgtcaacatactctgaaaacngaattggatcagcacatcagttaaac

SEQ ID NO: 6565 - DNA, 903 bp, Zea mays
  misc_feature (1)..(6): n is a, c, g, or t
  misc_feature (796)..(797): n is a, c, g, or t
  misc_feature (800)..(800): n is a, c, g, or t
  misc_feature (807)..(807): n is a, c, g, or t
  misc_feature (810)..(810): n is a, c, g, or t
  misc_feature (818)..(821): n is a, c, g, or t
  misc_feature (834)..(835): n is a, c, g, or t
  misc_feature (848)..(850): n is a, c, g, or t
  misc_feature (854)..(857): n is a, c, g, or t
  misc_feature (860)..(862): n is a, c, g, or t
  misc_feature (871)..(885): n is a, c, g, or t
  misc_feature (890)..(903): n is a, c, g, or t
  Peptide Sequence Number=SeqID_11057
  Probeset Number=SeqID_20968
nnnnnntatgcacattcatattctcggtatttgcggcacgttcatgggctcgatggcggttctcgccaaagaactgggccatcatgttactggctccgatgccaatgtttatccacccatgagcacgcaactgcaggcccagggcattgagctgacccaaggctacgacccggcgcagttcgacccggtcccggatctggtggtgatcggcaatgccatgagccgcggcaacccggcggtcgagtatgtactgaataaaggtttgccttacgtgtctggcccgcaatggctggcagaccacgtgttgcaaggccgttgggtgctggcggttgccggaacccacggcaagaccaccaccagcagcatgctggcctgggtgctggagcacgcgggcatgagcccgggcttcctgatcggcggcgtaccgcagaatttctcggtgtcggcgcgcctcggcgacaccccgttctttgtcatcgaagccgatgaatacgacagcgcattcttcgacaagcgttccaagttcgttcactaccgcccgcgcaccgcgatcctgaacaacctggagttcgatcacgcggatatcttccccgatctggcggccatcgagcggcagttccaccacttggtgcgcacaatccccagcgaaggcctggtgattcacccgaccaccgagccagccctgcagcgggtcatcgagatgggctgctggaccccggtacaaaccaccggcgcgggcggccaatggcaggtcaagcttctgagtgaaaacggttcaaaatttgaagtgctgttnnaangcgtcgnccnaggcgtcnnnnattgggacatganngggccccacaacnnncgcnnnnccnnngtccccctnnnnnnnnnnnnnnnaaagnnnnnnnnnnnnnn

SEQ ID NO: 6566 - DNA, 739 bp, Zea mays
  misc_feature (1)..(12): n is a, c, g, or t
  misc_feature (44)..(47): n is a, c, g, or t
  misc_feature (428)..(428): n is a, c, g, or t
  misc_feature (430)..(430): n is a, c, g, or t
  misc_feature (441)..(442): n is a, c, g, or t
  misc_feature (474)..(474): n is a, c, g, or t
  misc_feature (488)..(490): n is a, c, g, or t
  misc_feature (492)..(495): n is a, c, g, or t
  misc_feature (500)..(500): n is a, c, g, or t
  misc_feature (507)..(508): n is a, c, g, or t
  misc_feature (511)..(523): n is a, c, g, or t
  misc_feature (525)..(534): n is a, c, g, or t
  misc_feature (536)..(540): n is a, c, g, or t
  misc_feature (564)..(566): n is a, c, g, or t
  misc_feature (574)..(580): n is a, c, g, or t
  misc_feature (582)..(582): n is a, c, g, or t
  misc_feature (609)..(613): n is a, c, g, or t
  misc_feature (626)..(626): n is a, c, g, or t
  misc_feature (639)..(646): n is a, c, g, or t
  misc_feature (653)..(656): n is a, c, g, or t
  misc_feature (659)..(661): n is a, c, g, or t
  misc_feature (663)..(663): n is a, c, g, or t
  misc_feature (676)..(678): n is a, c, g, or t
  misc_feature (680)..(680): n is a, c, g, or t
  misc_feature (682)..(682): n is a, c, g, or t
  misc_feature (698)..(701): n is a, c, g, or t
  misc_feature (704)..(714): n is a, c, g, or t
  misc_feature (716)..(716): n is a, c, g, or t
  misc_feature (718)..(719): n is a, c, g, or t
  misc_feature (735)..(739): n is a, c, g, or t
  Peptide Sequence Number=SeqID_11058
  Probeset Number=SeqID_20969
nnnnnnnnnnnnggcgccagcgcgtcgcgcagcgccgccaggtnnnngggcgtgtccaggtcggtgacgtaggcgcggttggcgctgtcgaagacggcatggcgcccgctgcgcgggtccagccattggcgcaatccggcgccggccggcagcgcgttggccgcccgcgccgccgcggccgacagcagcagcggatggcccggcgcgccgtccacgcgcgggcgcaggctgtctgcgccgggcgcgcaggcgcgccattgcgccagcaggtcggcgatggcgttcgcgtcgagcaggggcaggtcggccagcaccagcagcaggtcatggtcgggatgggcgcggacgtgttcgcgcagcgccaggcgctgggaatcggcgagcgaggcgtccggcagcgcctgcgccagcggcgcgatcgcggcgcntngcgccagcggnntcaggatatccgcataggggccgatgacggcncgcaccggcgcgannncnnnnttgancgcgcannccnnnnnnnnnnnnntnnnnnnnnnngnnnnnaccgcccgcgcaccgcgatcctgnnnaacctgcnnnnnnntngcgcggatatcttccccgatctggcgnnnnncgagcggcagttncaccacttggtgnnnnnnnnccccagnnnnggnnngntgattcacccgannncngngccagccctgcaccgnnnnatnnnnnnnnnnngntnnaccccggtacaaaccnnnnn

SEQ ID NO: 6567 - DNA, 739 bp, Zea mays
  misc_feature (1)..(5): n is a, c, g, or t
  misc_feature (21)..(22): n is a, c, g, or t
  misc_feature (24)..(24): n is a, c, g, or t
  misc_feature (26)..(36): n is a, c, g, or t
  misc_feature (39)..(42): n is a, c, g, or t
  misc_feature (58)..(58): n is a, c, g, or t
  misc_feature (60)..(60): n is a, c, g, or t
  misc_feature (62)..(64): n is a, c, g, or t
  misc_feature (77)..(77): n is a, c, g, or t
  misc_feature (79)..(81): n is a, c, g, or t
  misc_feature (84)..(87): n is a, c, g, or t
  misc_feature (94)..(101): n is a, c, g, or t
  misc_feature (114)..(114): n is a, c, g, or t
  misc_feature (127)..(131): n is a, c, g, or t
  misc_feature (158)..(158): n is a, c, g, or t
  misc_feature (160)..(166): n is a, c, g, or t
  misc_feature (174)..(176): n is a, c, g, or t
  misc_feature (200)..(204): n is a, c, g, or t
  misc_feature (206)..(215): n is a, c, g, or t
  misc_feature (217)..(229): n is a, c, g, or t
  misc_feature (232)..(233): n is a, c, g, or t
  misc_feature (240)..(240): n is a, c, g, or t
  misc_feature (245)..(248): n is a, c, g, or t
  misc_feature (250)..(252): n is a, c, g, or t
  misc_feature (266)..(266): n is a, c, g, or t
  misc_feature (298)..(299): n is a, c, g, or t
  misc_feature (310)..(310): n is a, c, g, or t
  misc_feature (312)..(312): n is a, c, g, or t
  misc_feature (693)..(696): n is a, c, g, or t
  misc_feature (728)..(739): n is a, c, g, or t
  Peptide Sequence Number=SeqID_11059
  Probeset Number=SeqID_20970
nnnnnggtttgtaccggggtnnancnnnnnnnnnnnatnnnncggtgcagggctggcncngnnntcgggtgaatcancnnnccnnnnctggggnnnnnnnncaccaagtggtgnaactgccgctcgnnnnncgccagatcggggaagatatccgcgcnannnnnnngcaggttnnncaggatcgcggtgcgcgggcggtnnnnncnnnnnnnnnnannnnnnnnnnnnnggnntgcgcgntcaannnngnnntcgcgccggtgcgngccgtcatcggcccctatgcggatatcctgannccgctggcgcnangcgccgcgatcgcgccgctggcgcaggcgctgccggacgcctcgctcgccgattcccagcgcctggcgctgcgcgaacacgtccgcgcccatcccgaccatgacctgctgctggtgctggccgacctgcccctgctcgacgcgaacgccatcgccgacctgctggcgcaatggcgcgcctgcgcgcccggcgcagacagcctgcgcccgcgcgtggacggcgcgccgggccatccgctgctgctgtcggccgcggcggcgcgggcggccaacgcgctgccggccggcgccggattgcgccaatggctggacccgcgcagcgggcgccatgccgtcttcgacagcgccaaccgcgcctacgtcaccgacctggacacgcccnnnnacctggcggcgctgcgcgacgcgctggcgccnnnnnnnnnnnn

SEQ ID NO: 6568 - DNA, 2155 bp, Zea mays
  misc_feature (730)..(731): n is a, c, g, or t
  misc_feature (748)..(749): n is a, c, g, or t
  misc_feature (751)..(751): n is a, c, g, or t
  misc_feature (783)..(783): n is a, c, g, or t
  misc_feature (792)..(793): n is a, c, g, or t
  misc_feature (795)..(799): n is a, c, g, or t
  misc_feature (803)..(803): n is a, c, g, or t
  misc_feature (827)..(828): n is a, c, g, or t
  misc_feature (2128)..(2155): n is a, c, g, or t
  Peptide Sequence Number=SeqID_11060
  Probeset Number=SeqID_20971
ctgggagggactgggccaaaccaagaccatcccatacctcttctcccctgccggtggtgtggttcacctcccacttactcactcactcactcgcggacactgccacaaacttccgccccagatctccgtatataacacgccggcggcccgtccgtccgggctcctgactccggatccaccgccgccgcgccgcactctccctctcactccaccgccgaagtactccccgcctgccactgccagcctgtgcctgcacaaaagcaaaaatggcgccttggccgcggcggcccgtgctgacgctggtgctgctcctgctgctcgcgctcctgtgctcccacgtcgcgctctgctcctccgccgaaccggggaaacccaagcccaagcccaaggtctccggcagccgcaaggcgctgcttgcggacaacgacggcgacgaggtgcccgccgccaagccgggcaagtcggccgcggcggggaagaccaaaaagaagctgctcgccggcgacgccacttccaagaaccagaccaaggttgccaaggctaagaagccagagtcagctgccgcggcgaaaggggccgccaagaagcccgctggcaaagcggctgcggctgcgggtggtgacgccgccattgccaaggtctccaaggcccccaagacccccaaggcggacaaggccaaggtgccgaagccggacaaggcggcgactgcggcggcggctggtgccaagannaagggcgccgattcggnnangcctgccaaggtttccaagacgggcgccaagncggtgaagnngnnnnngacngccaaatctgaggctgccaccgcnnttgggaaggcaaagaaaccgccgccggcaaattcgaccgtggatgccggtgccaagacggccaaatccggcaagaaggctccggtggtcgtcgacgccgaggtgaaggcgaatgcgaccgtcgtgagcaaggagaagtcagcggcgacggagacggtggagatggaggatgaggaggaggtggtgttggccaaggaggcgggggagggcacggacgatctcatctccgaattccgggacctacccagtcggctgcaggagacgctgatgccggacctggcgcgcctctcgcaccactccaaggcgtacctgtccgcggcgaacgccgggatcgccgacggcgtgcgcccgatcctgggcggccggtgggcggcggtggccgcctccgcggcgtcggtggcggtgctgctgctgccgctcttcatgctcaccgcgctggtgcgccggatgggcccgtacctgccgctcctccaccgcgcgctgctgctggcgcaggcgtacctcgccatctacttcgccacgctcgcgctcgccgcggccgccacggggctggagccgctgcgcttcttccacgcggcctcccccgccgcctacgcctggacgcaggccgcgcagtccctcggcttcatgggctacctcgtgctccagatggtggacctcgttgctgtcttctcggacgccgcctcccccgaggacgacggcaacggggacgccgccaaggcgctcggccttgcgcagatggtggtgggcctcgccgtcggcctgcactactacgccgccgtcttccaccgcgccgcggcgggagaggcgccccgcgccaactggcgcgtctacgccgtgtacgcggcctgcttcgccatcgtgtgcgcctgcgcgcgcgccgagaggaggaagaaggcctacctcgcgggcaccgacggcgccgcggaggagtggaagaagagctgagctgcttatctcgggatacacgactagatcagaattcgggactcagtagggatttgtctgaaaaagatcccaatatggttatggtgaaaactcggaatttaggaagaaaaggagggtataaaaggaaaaaaactggaagctgtgattcttttccttttctacatttattattattcatataatatgttccccctttcgtgttaagttattggttcgagtacagagggataataaactcataaacctgtatggaacgaccaggtttatttcatggatttcactggctctggccatgtcaacttcactgctcaaaacgtgaacgtgcatgtataagataaaaaaaaaaaaaaaannnnnnnnnnnnnnnnnnnnnnnnnnnn

SEQ ID NO: 6569 - DNA, 494 bp, Zea mays
  misc_feature (31)..(31): n is a, c, g, or t
  misc_feature (101)..(101): n is a, c, g, or t
  misc_feature (128)..(128): n is a, c, g, or t
  misc_feature (181)..(181): n is a, c, g, or t
  misc_feature (248)..(249): n is a, c, g, or t
  misc_feature (257)..(257): n is a, c, g, or t
  misc_feature (268)..(268): n is a, c, g, or t
  misc_feature (271)..(271): n is a, c, g, or t
  misc_feature (273)..(273): n is a, c, g, or t
  misc_feature (293)..(293): n is a, c, g, or t
  misc_feature (300)..(300): n is a, c, g, or t
  misc_feature (311)..(311): n is a, c, g, or t
  misc_feature (315)..(316): n is a, c, g, or t
  misc_feature (320)..(320): n is a, c, g, or t
  misc_feature (323)..(323): n is a, c, g, or t
  misc_feature (328)..(328): n is a, c, g, or t
  misc_feature (333)..(333): n is a, c, g, or t
  misc_feature (337)..(337): n is a, c, g, or t
  misc_feature (360)..(362): n is a, c, g, or t
  misc_feature (364)..(364): n is a, c, g, or t
  misc_feature (370)..(370): n is a, c, g, or t
  misc_feature (379)..(379): n is a, c, g, or t
  misc_feature (389)..(389): n is a, c, g, or t
  misc_feature (391)..(393): n is a, c, g, or t
  misc_feature (400)..(400): n is a, c, g, or t
  misc_feature (409)..(412): n is a, c, g, or t
  misc_feature (415)..(415): n is a, c, g, or t
  misc_feature (427)..(427): n is a, c, g, or t
  misc_feature (431)..(432): n is a, c, g, or t
  misc_feature (439)..(443): n is a, c, g, or t
  misc_feature (446)..(446): n is a, c, g, or t
  misc_feature (451)..(451): n is a, c, g, or t
  misc_feature (474)..(474): n is a, c, g, or t
  misc_feature (482)..(482): n is a, c, g, or t
  misc_feature (484)..(484): n is a, c, g, or t
  misc_feature (489)..(489): n is a, c, g, or t
  Peptide Sequence Number=SeqID_11061
  Probeset Number=SeqID_20972
gggggtgttattaaaagtgcgccgttaaggngaatatggactatggttcttgatccaacaatagggaaggccatattacaggcagcttgaggaggtcgcanagggaatgttggatgatcacttcccanttgttatctggcaaactggctgtggctctcaaagcaatatgaatgccaatgangtaattgctttttgggccttcggttatccttggacacaagcgcggtgagatagtttgtgctccccanntgaccttntgtttaggttnttntntttaaatgattctttttccnctgtatntttgcttttangcgnngggncgnttganattcntttnagggttttatttccttgtttggnnntntttggnttgtttttntttttttttngnnntttttgngttttgttnnnnttnttttttttttgngggnntgttttnnnnntgnttttntgccttttttttttttgtttgtntaattttngngtggntttgt

SEQ ID NO: 6570 - DNA, 494 bp, Zea mays
  misc_feature (6)..(6): n is a, c, g, or t
  misc_feature (11)..(11): n is a, c, g, or t
  misc_feature (13)..(13): n is a, c, g, or t
  misc_feature (21)..(21): n is a, c, g, or t
  misc_feature (44)..(44): n is a, c, g, or t
  misc_feature (49)..(49): n is a, c, g, or t
  misc_feature (52)..(56): n is a, c, g, or t
  misc_feature (63)..(64): n is a, c, g, or t
  misc_feature (68)..(68): n is a, c, g, or t
  misc_feature (80)..(80): n is a, c, g, or t
  misc_feature (83)..(86): n is a, c, g, or t
  misc_feature (95)..(95): n is a, c, g, or t
  misc_feature (102)..(104): n is a, c, g, or t
  misc_feature (106)..(106): n is a, c, g, or t
  misc_feature (116)..(116): n is a, c, g, or t
  misc_feature (125)..(125): n is a, c, g, or t
  misc_feature (131)..(131): n is a, c, g, or t
  misc_feature (133)..(135): n is a, c, g, or t
  misc_feature (158)..(158): n is a, c, g, or t
  misc_feature (162)..(162): n is a, c, g, or t
  misc_feature (167)..(167): n is a, c, g, or t
  misc_feature (172)..(172): n is a, c, g, or t
  misc_feature (175)..(175): n is a, c, g, or t
  misc_feature (179)..(180): n is a, c, g, or t
  misc_feature (184)..(184): n is a, c, g, or t
  misc_feature (195)..(195): n is a, c, g, or t
  misc_feature (202)..(202): n is a, c, g, or t
  misc_feature (222)..(222): n is a, c, g, or t
  misc_feature (224)..(224): n is a, c, g, or t
  misc_feature (227)..(227): n is a, c, g, or t
  misc_feature (238)..(238): n is a, c, g, or t
  misc_feature (246)..(247): n is a, c, g, or t
  misc_feature (314)..(314): n is a, c, g, or t
  misc_feature (367)..(367): n is a, c, g, or t
  misc_feature (394)..(394): n is a, c, g, or t
  misc_feature (464)..(464): n is a, c, g, or t
  Peptide Sequence Number=SeqID_11062
  Probeset Number=SeqID_20973
acaaanccacncnaaaattanacaaacaaaaaaaaaaaaggcanaaaancannnnnaaaacanncccncaaaaaaaaaanaannnnaacaaaacncaaaaannncnaaaaaaaaanaaaaacaanccaaanannnccaaacaaggaaataaaaccctnaaangaatntcaancgncccnncgcntaaaagcaaanatacagnggaaaaagaatcatttaaananaanaacctaaacanaaggtcanntggggagcacaaactatctcaccgcgcttgtgtccaaggataaccgaaggcccaaaaagcaattacntcattggcattcatattgctttgagagccacagccagtttgccagataacaantgggaagtgatcatccaacattccctntgcgacctcctcaagctgcctgtaatatggccttccctattgttggatcaagaaccatagtccatattcnccttaacggcgcacttttaataacaccccc

SEQ ID NO: 6571 - DNA, 218 bp, Zea mays
  misc_feature (1)..(33): n is a, c, g, or t
  Peptide Sequence Number=SeqID_11063
  Probeset Number=SeqID_20974
nnnnnnnnnnnnnnnnnnnnnnnnnnnnnnnnngatgggggtcggttgggtttggtctaggtagtctggttgtctttatcgggctgttttctgtggggttgtactgcatcattctagtttctagtccatgtgctgtaatatctcgctgctgtaatcaatggaatgtcctcgtttcaagcctcatgacataaaaaaaaaaaaaaaaaactcgagcccgg

SEQ ID NO: 6572 - DNA, 961 bp, Zea mays
  misc_feature (1)..(10): n is a, c, g, or t
  misc_feature (822)..(825): n is a, c, g, or t
  misc_feature (876)..(961): n is a, c, g, or t
  Probeset Number=SeqID_20975
nnnnnnnnnncggcgggccgggcccgaaaaactcaaacacagatagcacagacacacaccccgatccctcactccctcgcgtgtactagcaaccaagggaaacaatggcgccggtgaaggtgttcgggccggcgatgtcgaccaacgtggcccgggtgctggtgtgcctggaggaggtcggcgccgagtacgaggtggtcgacatcgatttcaaggccatggagcacaagagccccgagcatctcgtcagaaacccgttcggccaaatccctgccttccaggatggggatctgcttctcttcgagtcacgcgcaattgcgaggtacgtgctccgcaagtacaagaagaacgaagtggacctgctgagggaaggcgacctcaaggaggcggcgatggtggacgtatggacggaggtggacgcgcacacctacaacccggccatctcgccgatcgtgtacgagtgcctcatcaacccgctcatgcgcggcctgccgaccaaccaaacggtggtggacgagagcctggagaagctcaagaaggtgctggaggtctacgaggcgcgcctgtccaagcacgactacctcgccggggacttcgtcagcttcgcggacctcaaccacttcccctacaccttctacttcatggccacgccgcacgcggccctcttcgactcgtacccgcacgtcaaggcctggtgggagagaatcatggcgaggcccgccgtcaggaagctcgccgcgcagatggttcccaagaagccgtgatttgctaggcgggatctcgcatcgtgggatccgttccgatcgctgatctgtgtggcannnnctttgttggtgtcgcgaataaggcaataagcttgtgtggctggatttgcannnnnnnnnnnnnnnnnnnnnnnnnnnnnnnnnnnnnnnnnnnnnnnnnnnnnnnnnnnnnnnnnnnnnnnnnnnnnnnnnnnnnn

SEQ ID NO: 6573 - DNA, 874 bp, Zea mays
  misc_feature (1)..(1): n is a, c, g, or t
  misc_feature (3)..(4): n is a, c, g, or t
  misc_feature (6)..(7): n is a, c, g, or t
  misc_feature (17)..(26): n is a, c, g, or t
  misc_feature (29)..(33): n is a, c, g, or t
  misc_feature (37)..(40): n is a, c, g, or t
  misc_feature (46)..(47): n is a, c, g, or t
  misc_feature (59)..(70): n is a, c, g, or t
  misc_feature (85)..(85): n is a, c, g, or t
  misc_feature (365)..(366): n is a, c, g, or t
  misc_feature (419)..(419): n is a, c, g, or t
  misc_feature (437)..(439): n is a, c, g, or t
  misc_feature (443)..(443): n is a, c, g, or t
  misc_feature (445)..(445): n is a, c, g, or t
  misc_feature (449)..(453): n is a, c, g, or t
  misc_feature (458)..(461): n is a, c, g, or t
  misc_feature (485)..(486): n is a, c, g, or t
  misc_feature (490)..(490): n is a, c, g, or t
  misc_feature (493)..(493): n is a, c, g, or t
  misc_feature (537)..(540): n is a, c, g, or t
  misc_feature (549)..(559): n is a, c, g, or t
  misc_feature (563)..(563): n is a, c, g, or t
  misc_feature (573)..(574): n is a, c, g, or t
  misc_feature (587)..(587): n is a, c, g, or t
  misc_feature (680)..(680): n is a, c, g, or t
  misc_feature (684)..(685): n is a, c, g, or t
  misc_feature (770)..(771): n is a, c, g, or t
  Peptide Sequence Number=SeqID_11064
  Probeset Number=SeqID_20976
ntnntnnatcgcgagcnnnnnnnnnntgnnnnntttnnnntcactnngatggttataannnnnnnnnnnnacaacaacaacagcnacaacaacaacaacaacaacaacaacaacaacaacaacaacaacaacaacaacaacaacaacaacaagctttaaatccttctgagctcgcgcgcgcacagggcgaatgtacaatacagcttgttttgtgctcaccgggggcacggaccccctgagatggaagtcgtcagcgtcactcctgcccccgggcggcgcctgagaagaaagagctgcttgacctcagggaccccttcacatccgccgcgaacgagggagcctaggcgtcccttcctccatattcnntcattcaaacaaaagagacttagccagagggaccctggctataggattcagcnagtaccttcaaattcccnnnttcncntccnnnnnttttnnnnttaaagtaagggggggagagaggnncatnccncggaggggggaggagggcggaggaggctggaaggagtccccccnnnnagagagttnnnnnnnnnnntttnttgggggggnntagggtcctagantggggggtggggagggttggaggggggggcgggggggtggctggtggggggggggggggaggggggcgatttagttggaagggagaggagggntctnntaggggggggggctcagggcgggggggaggggggggatgggggcgcggaggaggagtgaacaaggggcgggagaggagggggggnngcgggcacccccggccgatgagtccgggggggggggggaggccggcttgtggggatcgtgggggggggggcaaagggggagaggtgggcggcaatgaggtgcg

SEQ ID NO: 6574 - DNA, 748 bp, Zea mays
  misc_feature (1)..(19): n is a, c, g, or t
  misc_feature (597)..(599): n is a, c, g, or t
  misc_feature (623)..(626): n is a, c, g, or t
  misc_feature (727)..(729): n is a, c, g, or t
  misc_feature (748)..(748): n is a, c, g, or t
  Probeset Number=SeqID_20977
nnnnnnnnnnnnnnnnnnnagcgagcggatcaggaagctgcaggagctcgtgcccgacatggacaaggtgactgcgcctgcacccaccggtttcagcgcgcgctagctaggcgatcgatagacagaacagtgcgcattgagttgctgccatgcatgccaggaccactccggccggccagccagagctgatgacctacttgcgttcccgttgccttgcagcaaaccaacacctccgacatgctggacttggccgtcgactacatcaaggatctccagaagcaggtcaaggtgttgaacgagagccgcgccagctgcacctgcccggcgagcaagcaccagcagcggttctccggctgaagcaccggccgggccggcagtccctatcggtccccggcggctgcgtagcacgctccactactgagaacctgactgagaccgagatagagaggaaccccgccatcgtctgcagtgcatgcgcgcgagcagcatgtacagcgccggagcgatcgaggctcgctggactgctggatcgagcagtgtgtggcatcatcaagtattcaagcgactggaggaaggaaggaagaatcgagtcatggnnncgaggaggaagaacgaatgaattnnnnagtgctgtttcctttttttttttttttgggctgtaacacttttgctacatctgtgctgctgcagcatatgccgttgctcattgtttactacgttaagaatnnnagtgagatatagatcgagn

SEQ ID NO: 6575 - DNA, 794 bp, Zea mays
  misc_feature (2)..(2): n is a, c, g, or t
  misc_feature (86)..(89): n is a, c, g, or t
  misc_feature (113)..(113): n is a, c, g, or t
  misc_feature (120)..(121): n is a, c, g, or t
  misc_feature (132)..(138): n is a, c, g, or t
  misc_feature (164)..(168): n is a, c, g, or t
  misc_feature (172)..(173): n is a, c, g, or t
  misc_feature (403)..(403): n is a, c, g, or t
  misc_feature (435)..(435): n is a, c, g, or t
  misc_feature (793)..(794): n is a, c, g, or t
  Peptide Sequence Number=SeqID_11065
  Probeset Number=SeqID_20978
tnaggtgacactatagaagagctatgacgtcgcatgcacgcgtacgtaagctcggaattcggctcgagcacacattaagcattggnnnnaacttaagcattttatccaccttngaagcannaagtgctatgnnnnnnnaagaaaagtttttttttattaagcannnnnattnnacatgctctaatgctcttcgggactcttgcttaccgctgccatatatcccgacttgccgcctccgcctactatcgggctctccaatggtatccatgctatgcatcctcaggcccacggcgccggccccgctcgcggggcgccggggcagggaggccgcgccgcgcaccgggggggcgcccccggcgccccggcccggcgcggcggggcgcggcggggcggcgggcgcggngggccgcgcccgcgcggcggcgcggccgggcnccggttttttttccccccccccccggggggccgcctccctctctcctctccctgcctccccccggccggcccggcgtcggcctcccgcccctcgctccgcccccgccccctcccccttcctcctctccgctctgtgcttcggtgccccccccccctccgtcgccggtctctccttccttgcctctcccccccttcggcgtccccccccctcccgcgtctcctcgcccctcccgctccccccccccccctcgtcttctctccccctccctccctcccccctgtcttcttcgcgtcgtgtgccctgtgccgtcgcggtgttggcccggcggcttgtcgcgccccgcgctctccccccccnn

SEQ ID NO: 6576 - DNA, 794 bp, Zea mays
  misc_feature (1)..(194): n is a, c, g, or t
  misc_feature (360)..(360): n is a, c, g, or t
  misc_feature (392)..(392): n is a, c, g, or t
  misc_feature (622)..(623): n is a, c, g, or t
  misc_feature (627)..(631): n is a, c, g, or t
  misc_feature (657)..(663): n is a, c, g, or t
  misc_feature (674)..(675): n is a, c, g, or t
  misc_feature (682)..(682): n is a, c, g, or t
  misc_feature (706)..(709): n is a, c, g, or t
  misc_feature (793)..(793): n is a, c, g, or t
  Probeset Number=SeqID_20979
nnnnnnnnnnnnnnnnnnnnnnnnnnnnnnnnnnnnnnnnnnnnnnnnnnnnnnnnnnnnnnnnnnnnnnnnnnnnnnnnnnnnnnnnnnnnnnnnnnnnnnnnnnnnnnnnnnnnnnnnnnnnnnnnnnnnnnnnnnnnnnnnnnnnnnnnnnnnnnnnnnnnnnnnnnnnnnnnnnnnnnnnnnnnnnnnnncggcgacggagggggggggggcaccgaagcacagagcggagaggaggaagggggagggggcgggggcggagcgaggggcgggaggccgacgccgggccggccggggggaggcagggagaggagagagggaggcggccccccggggggggggggaaaaaaaaccggngcccggccgcgccgccgcgcgggcgcggcccnccgcgcccgccgccccgccgcgccccgccgcgccgggccggggcgccgggggcgcccccccggtgcgcggcgcggcctccctgccccggcgccccgcgagcggggccggcgccgtgggcctgaggatgcatagcatggataccattggagagcccgatagtaggcggaggcggcaagtcgggatatatggcagcggtaagcaagagtcccgaagagcattagagcatgtnnaatnnnnntgcttaataaaaaaaaacttttcttnnnnnnncatagcacttnntgcttcnaaggtggataaaatgcttaagttnnnnccaatgcttaatgtgtgctcgagccgaattccgagcttacgtacgcgtgcatgcgacgtcatagctcttctatagtgtcacctna

SEQ ID NO: 6577 - DNA, 502 bp, Zea mays
  misc_feature (6)..(6): n is a, c, g, or t
  misc_feature (8)..(8): n is a, c, g, or t
  misc_feature (53)..(53): n is a, c, g, or t
  misc_feature (70)..(70): n is a, c, g, or t
  misc_feature (81)..(81): n is a, c, g, or t
  misc_feature (120)..(120): n is a, c, g, or t
  misc_feature (131)..(131): n is a, c, g, or t
  misc_feature (137)..(137): n is a, c, g, or t
  misc_feature (143)..(143): n is a, c, g, or t
  misc_feature (188)..(188): n is a, c, g, or t
  misc_feature (190)..(190): n is a, c, g, or t
  misc_feature (198)..(198): n is a, c, g, or t
  misc_feature (204)..(204): n is a, c, g, or t
  misc_feature (237)..(237): n is a, c, g, or t
  misc_feature (243)..(243): n is a, c, g, or t
  misc_feature (245)..(245): n is a, c, g, or t
  misc_feature (247)..(247): n is a, c, g, or t
  misc_feature (254)..(254): n is a, c, g, or t
  misc_feature (266)..(266): n is a, c, g, or t
  misc_feature (284)..(284): n is a, c, g, or t
  misc_feature (301)..(301): n is a, c, g, or t
  misc_feature (305)..(305): n is a, c, g, or t
  misc_feature (314)..(314): n is a, c, g, or t
  misc_feature (351)..(351): n is a, c, g, or t
  misc_feature (353)..(353): n is a, c, g, or t
  misc_feature (403)..(403): n is a, c, g, or t
  misc_feature (439)..(439): n is a, c, g, or t
  misc_feature (455)..(455): n is a, c, g, or t
  misc_feature (459)..(459): n is a, c, g, or t
  misc_feature (468)..(471): n is a, c, g, or t
  misc_feature (476)..(476): n is a, c, g, or t
  misc_feature (479)..(479): n is a, c, g, or t
  misc_feature (481)..(481): n is a, c, g, or t
  misc_feature (493)..(494): n is a, c, g, or t
  misc_feature (497)..(497): n is a, c, g, or t
  Peptide Sequence Number=SeqID_11066
  Probeset Number=SeqID_20980
gggaananactagcaactgaagcgtaccaacaaaaaacgcccgattcgcctcncaaaatcgccgccgccntcggctactcnaccagacgccgataggtccgccttcctttcctgctgcgngcctgtcgccntggtgnaggggnggcttcccctcgaggacaaccccgacgtcatgaaccaggtcatgngngggactgngggtcnccgagggacgagatgatgctgcgatgatgtgcnaacatntncntgacgcngctcgctactgntgtcccactcggaagccntgattcatatttccaantcanctacatcgnctacctggagtaaatcagtcagcttcatctcataggnangggagatttgtcctgttgctagtcctcccaatagcaggaaatgcttcagntgccaaacaacgggatgagatggaccccaaactccntggaatggttttgtanatgntggaaatcnnnnttggnggnancgaaaaagtacnnccntaagg

SEQ ID NO: 6578 - DNA, 391 bp, Zea mays
  Probeset Number=SeqID_20981
atcgtctttgctcgaggagtcgaggttcaggttccacggtgcggcgagagctcgcagccatggagagcaagagcccatggtcgctgcggctgctagtttgctgcgcggcaatggtggccgtcgcgcttctctcccagcaaggaggccaggccgcttgtttcgtgccgacgccgggtccagctccggcaccgccaggctcctccgcgacgaacacgaacgactcctccgctgctcctcggccagccaagcccagcgcattccaacccccaatggtgagtgggtactaccgatagtacaatcaaacacagtatcaagactgatccaatgaacgtgcctttgattttaccttggcaacaacgttcgattatctgcatgcagtacggtggtgtca

SEQ ID NO: 6579 - DNA, 745 bp, Zea mays
  Peptide Sequence Number=SeqID_11067
  Probeset Number=SeqID_20982
ctccaccagtccaccatcgccacctacgcccaaccaaacccaactccatctcttccgactataaacgcaacccaccaccgctggcgcgaacctctgcgctccgaataccccagacccccgatcctcccaatgggccaccgcattttcgctgcgcgctgcggccccggccacccgctcccgcggcgtctcccgaatcacctcccgcgggagggtcgtgcccgtggccctcgcactgggcggacccggaaggctggtggcgcgtgcaccagttacggcaaagggcgatggacatcgagcaccgtccgacgggcatgagggcttgctggtggaactcttcgggaggcctggatgggaaaatgggaattaatcccacgggggggggattggggggaaaggttgcctattaacgggggccttacaggggaaaaaaggtttgggtgtaaacgtgggaaacccctcgggtttgggacccccttggggggaaacccctttgggggggggggggggggggaaaaaaaaggggggagcccccccccaaaggagaaaaaaaggattttcgccctttggtaaaaaaaaaaaaaaaaggggggggggtggtttaaaacaccgggggggagaaaaaacactttttgtggggcgcccccggggggggggtttctctttttgagaaaaaacaccccccgggggggggtttttttcccccccccccggggggggggggggcgcgcccccccacaaagagagt

SEQ ID NO: 6580 - DNA, 745 bp, Zea mays
  Probeset Number=SeqID_20983
actctctttgtgggggggcgcgccccccccccccccgggggggggggaaaaaaacccccccccggggggtgttttttctcaaaaagagaaaccccccccccgggggcgccccacaaaaagtgttttttctcccccccggtgttttaaaccaccccccccccttttttttttttttttaccaaagggcgaaaatcctttttttctcctttgggggggggctccccccttttttttcccccccccccccccccccaaaggggtttccccccaagggggtcccaaacccgaggggtttcccacgtttacacccaaaccttttttcccctgtaaggcccccgttaataggcaacctttccccccaatcccccccccgtgggattaattcccattttcccatccaggcctcccgaagagttccaccagcaagccctcatgcccgtcggacggtgctcgatgtccatcgccctttgccgtaactggtgcacgcgccaccagccttccgggtccgcccagtgcgagggccacgggcacgaccctcccgcgggaggtgattcgggagacgccgcgggagcgggtggccggggccgcagcgcgcagcgaaaatgcggtggcccattgggaggatcgggggtctggggtattcggagcgcagaggttcgcgccagcggtggtgggttgcgtttatagtcggaagagatggagttgggtttggttgggcgtaggtggcgatggtggactggtggag

SEQ ID NO: 6581 - DNA, 151 bp, Zea mays
  Peptide Sequence Number=SeqID_11068
  Probeset Number=SeqID_20984
acaccagagtatatcgatgcttctaggaccttacgggcataacacagtgcgctggtgggcaaatagaaatgtcattgtctacatatatcgcattgaacgccaggactgccattctggtagacatgccgcacactagatagcatatagatac

SEQ ID NO: 6582 - DNA, 565 bp, Zea mays
  Probeset Number=SeqID_20985
agttctctggaagaggagggtagcagcagagggaggagtgggattaaaaatgcagatcttcgtgaaatccctaaggggggagaccataaccctcgaggtcgaaagcagcgacaccattgacaatgtcaaggctaacattcaagacaaggaaggcatccctccggatcagcagcgtttgattttcgccggaaagcaacttgaagatggaaggaccttgctcgattacaacatacaaaatgaatcaagccttcaccttgtcctcaggcttcgtggtggcatcatcgagccttccctcatggctttggctcgcatatacaaccaggacaagatgatttgccgcaaatgctatgctcgtctgcaccctagggctgtgaactgccgtaagaagaagtgcggtcatagtaaccagttgaggcctaggaagaagatcaagtaaattcctggctgggatattgttggcctctactttgcgttgtgttgtctctgaaccggggctgggtcgtggtatctatcgtatctggaatttgattaaggtaaattgttttgagacagtagttttgaacta

SEQ ID NO: 6583 - DNA, 1062 bp, Zea mays
  misc_feature (14)..(16): n is a, c, g, or t
  misc_feature (934)..(938): n is a, c, g, or t
  misc_feature (951)..(951): n is a, c, g, or t
  misc_feature (967)..(969): n is a, c, g, or t
  misc_feature (982)..(987): n is a, c, g, or t
  misc_feature (989)..(989): n is a, c, g, or t
  misc_feature (1018)..(1034): n is a, c, g, or t
  misc_feature (1036)..(1042): n is a, c, g, or t
  misc_feature (1044)..(1053): n is a, c, g, or t
  misc_feature (1061)..(1062): n is a, c, g, or t
  Peptide Sequence Number=SeqID_11069
  Probeset Number=SeqID_20986
ccggccgggttgtnnntttccgtttatgtccctgagcgcgcagcacgggcttgcctgctagtcccacaagccgccggcatcggcgcacggggagcagaggcagagcagcgcttgccgcagcaatctggacgacgctccagcggcagacggcagcaggtccggccaccttccgcgcctcgccccggccagtggcgttcacgccttcggccttccgccatgaaggccgccgcggtcctctccgtcccgacgccgtcccccgtgacacttgtgtcagtggtggcgcggcgcgcgctggtgccggcggccctgcgcggcaacgcgcggcctccaacaaggacaaggccaaggcgcccaatgggatggagtcaactgtagctgaagtaatgacatctcctgcgataacgctgaccctctacaagactgtcttggaagctgcagcgctgatgctcaaggagaaagttcccaggataccggttgtgaatgagcaagtactccggcctgcaatccgtggtcgctccacgacggcaggtgcgttggcgtgatctccaacaagatgaaggtgaggccgcccaatgggatggactcaactgtagctgaagtcatgacatctcctgcgataacgctgacactctacaagactgtcttggaagctgcagcgctgatgctcaggaatagctgccacagaagaccggttgtgaatgagcagcagcacgtgatcggaatcgtgactcgctccgacgtgttccaggctcttgaggccaccaacaaagcatgagagtgagtcagtgagggctttctcgccagatgttaccccctttatgtgtagtgatctcagcagagagtatagttatgctaccaatattggacgaagatggacagaaaaggctaggtatttatatactggaatcgctgcaatacaagacaaattaaatgnnnnnaatttatagagtnactgaaacttatagtnnnggatgacgaactnnnnnntnacctaagggagccccaaacaatttaatannnnnnnnnnnnnnnnntnnnnnnnannnnnnnnnnttaggatnn

SEQ ID NO: 6584 - DNA, 511 bp, Zea mays
  misc_feature (1)..(1): n is a, c, g, or t
  misc_feature (31)..(31): n is a, c, g, or t
  misc_feature (296)..(296): n is a, c, g, or t
  misc_feature (415)..(415): n is a, c, g, or t
  misc_feature (480)..(481): n is a, c, g, or t
  misc_feature (483)..(483): n is a, c, g, or t
  misc_feature (496)..(496): n is a, c, g, or t
  misc_feature (509)..(509): n is a, c, g, or t
  Peptide Sequence Number=SeqID_11070
  Probeset Number=SeqID_20987
ngaaatggcgttagacccttagtgctagcancccccccccccaagaattttgtgtccaagaagtcgggccacccttttttgggctggttctgggagttttctggccattgttgctaccaggccattgctggggatttagaacttcccattaggtccccagggttttgctttatcaggcttttcttctgagattcttggctttatatctatgctcccttggatgctgtatcccccaccattcagtatagggagatggctttgcaggagaattccctatcccaagtgatccattcggncctatgttaggagagatgctagcaacaacaggagccccctgagaccttcatagaagaagcttcgtattgcggcctaaatgcttcaaaaggaggccggctccctaatgcgcgtagagttntaagtccatcagcatttgcaagtatcttaaaacccattgtctgctgtagtggggggggggggggnnantagtgagctctcntctctctctctcnca

SEQ ID NO: 6585 - DNA, 618 bp, Zea mays
  misc_feature (1)..(18): n is a, c, g, or t
  Peptide Sequence Number=SeqID_11071
  Probeset Number=SeqID_20988
nnnnnnnnnnnnnnnnnngggccaggccgtttccaaggaggttcggaacccccctttcccgggccccggttcgggagaaattcgggcgaccaaaggcggttcgaagccgggggcccgacccagccggggcggagtccccgggagcccgaagagccagggccccgggacctccctccggggccgaaggaggaaagggattcgagggaggggggcccgtcccagggcgaggggagaaggacgtcgtccggcttccgggaggtcggccaaggagttggcgcggccccggcgctggaaggcggtctgtggcgtctggcggcggcgggaaggagtgggatccggttcctggtcccggcggagcgagcggatggagcggccgatggaggacagcggcgccgccgccggcgaggaggaggaggaggaggaggagtcggtggccggcattgtgcctcgcatcgatcgaggcgggtgggagggctggggactggagcgtctgttgggctgggcgactgggtgatgattgctttgattggccgccgccgccgctgcgaatccaaatcgacggaggaggcggaggcagcggatgcggagactgctactgcagacgagacgagacgagag

SEQ ID NO: 6586 - DNA, 462 bp, Zea mays
  Peptide Sequence Number=SeqID_11072
  Probeset Number=SeqID_20989
aatcttatcctcttctcattctcctttctccctcttgtgtcttccaccaggaacaagccgccgccgcacgcctccgcttgctcccacccgcgcccgccggtgcacccgccccggccccgcccgtcgcggctgcccccaccccgcccgcccctaccaccggcgcggccgcctccggccccggccccaaacgctgcacccaacagccccagccgtcccactcccagggtccatctcagtcgccgtcgcagaccacgcagcaggcgtcaccccagcagcagcaggtggcggcggtggcagcggcataggcacaagcacagacccaggcggcatgggtacgaagccccgagatggagatggcgctgcaggacgccatgcgggtctgcaatccggacgtcaatacgcccttccagtccatcgaggacgctgtcaacaggctgcatatggcgaggcgatgtctagtca

SEQ ID NO: 6587 - DNA, 864 bp, Zea mays
  misc_feature (205)..(205): n is a, c, g, or t
  misc_feature (212)..(212): n is a, c, g, or t
  misc_feature (666)..(669): n is a, c, g, or t
  misc_feature (671)..(680): n is a, c, g, or t
  misc_feature (683)..(691): n is a, c, g, or t
  misc_feature (697)..(697): n is a, c, g, or t
  misc_feature (703)..(703): n is a, c, g, or t
  misc_feature (705)..(705): n is a, c, g, or t
  misc_feature (712)..(715): n is a, c, g, or t
  misc_feature (729)..(730): n is a, c, g, or t
  misc_feature (742)..(746): n is a, c, g, or t
  misc_feature (748)..(748): n is a, c, g, or t
  misc_feature (753)..(756): n is a, c, g, or t
  misc_feature (759)..(760): n is a, c, g, or t
  misc_feature (762)..(762): n is a, c, g, or t
  misc_feature (764)..(769): n is a, c, g, or t
  misc_feature (771)..(780): n is a, c, g, or t
  misc_feature (786)..(786): n is a, c, g, or t
  misc_feature (788)..(788): n is a, c, g, or t
  misc_feature (796)..(798): n is a, c, g, or t
  misc_feature (800)..(816): n is a, c, g, or t
  misc_feature (853)..(862): n is a, c, g, or t
  misc_feature (864)..(864): n is a, c, g, or t
  Peptide Sequence Number=SeqID_11073
  Probeset Number=SeqID_20990
agaaaatacgcacctgctcctcactcttctttatatttttttctccatttggcaacttttgcttgtcgttcatgtatatgcatgaccctttcacacatatgatcagaagataagcacatgcaagacgatctcgcgtggatatgatgcatggatcagaactaacctctatatcatcacccaaacgctcgtagatgatgctattacnattccantgatgaaattatatataggtaaaaaaaaaggacccggaccggccttaccttaaattttaaaatttaatcggctggcaatggaccacttatgccatgggacagggtaacttggggatcccactgaaacccgggaaggggcccaatttccgggccctgatcgcggattgatccacgggaggcacgagaacttaaaccccttgccaacccagtgggggccccaaaagaaaccgggggtgcaggggggggggcccctcccccccccccccgataccgggggggattaaatactaattttggactggaaaaccgccaccccgcgggggcccccctttttttaacaaaaaaaggggaaacttcaatttctccttcaccccgccttttcccgggtttaggaagcactaatgggcccccaaaaaaatcttataaacaaccccccttaatagagaaaaccccnnnntnnnnnnnnnncannnnnnnnntcaacnccgtcngnctcggcnnnnttgcctcggggtannttttggattgcnnnnncntttcnnnncanntntnnnnnngnnnnnnnnnnttggangnaataaacnnnannnnnnnnnnnnnnnnnttaaaaaaaaaaaaaaaaaaaaaaaaaaaaaaaaaannnnnnnnnnan

SEQ ID NO: 6588 - DNA, 864 bp, Zea mays
  misc_feature (1)..(1): n is a, c, g, or t
  misc_feature (3)..(12): n is a, c, g, or t
  misc_feature (49)..(65): n is a, c, g, or t
  misc_feature (67)..(69): n is a, c, g, or t
  misc_feature (77)..(77): n is a, c, g, or t
  misc_feature (79)..(79): n is a, c, g, or t
  misc_feature (85)..(94): n is a, c, g, or t
  misc_feature (96)..(101): n is a, c, g, or t
  misc_feature (103)..(103): n is a, c, g, or t
  misc_feature (105)..(106): n is a, c, g, or t
  misc_feature (109)..(112): n is a, c, g, or t
  misc_feature (117)..(117): n is a, c, g, or t
  misc_feature (119)..(123): n is a, c, g, or t
  misc_feature (135)..(136): n is a, c, g, or t
  misc_feature (150)..(153): n is a, c, g, or t
  misc_feature (160)..(160): n is a, c, g, or t
  misc_feature (162)..(162): n is a, c, g, or t
  misc_feature (168)..(168): n is a, c, g, or t
  misc_feature (174)..(182): n is a, c, g, or t
  misc_feature (185)..(194): n is a, c, g, or t
  misc_feature (196)..(199): n is a, c, g, or t
  misc_feature (653)..(653): n is a, c, g, or t
  misc_feature (660)..(660): n is a, c, g, or t
  Probeset Number=SeqID_20991
ntnnnnnnnnnnttttttttttttttttttttttttttttttttttaannnnnnnnnnnnnnnnntnnngtttattncntccaannnnnnnnnncnnnnnnananntgnnnngaaangnnnnngcaatccaaaanntaccccgaggcaannnngccgagncngacggngttgannnnnnnnntgnnnnnnnnnnannnnggggttttctctattaaggggggttgtttataagatttttttgggggcccattagtgcttcctaaacccgggaaaaggcggggtgaaggagaaattgaagtttcccctttttttgttaaaaaaaggggggcccccgcggggtggcggttttccagtccaaaattagtatttaatcccccccggtatcgggggggggggggaggggcccccccccctgcacccccggtttcttttggggcccccactgggttggcaaggggtttaagttctcgtgcctcccgtggatcaatccgcgatcagggcccggaaattgggccccttcccgggtttcagtgggatccccaagttaccctgtcccatggcataagtggtccattgccagccgattaaattttaaaatttaaggtaaggccggtccgggtcctttttttttacctatatataatttcatcantggaatngtaatagcatcatctacgagcgtttgggtgatgatatagaggttagttctgatccatgcatcatatccacgcgagatcgtcttgcatgtgcttatcttctgatcatatgtgtgaaagggtcatgcatatacatgaacgacaagcaaaagttgccaaatggagaaaaaaatataaagaagagtgaggagcaggtgcgtattttct

SEQ ID NO: 6589 - DNA, 575 bp, Zea mays
  misc_feature (525)..(525): n is a, c, g, or t
  misc_feature (530)..(530): n is a, c, g, or t
  misc_feature (538)..(538): n is a, c, g, or t
  misc_feature (554)..(554): n is a, c, g, or t
  misc_feature (566)..(567): n is a, c, g, or t
  misc_feature (571)..(572): n is a, c, g, or t
  misc_feature (575)..(575): n is a, c, g, or t
  Peptide Sequence Number=SeqID_11074
  Probeset Number=SeqID_20992
aaaaaagaatcttcctccgccactgtcgactcccatctgcgagggtagcttcgcgccgaggcgtcagtggcgcgatgaacgtccctgtagtcgatccatattcagggggaatttcctgagacaatcgaagagtacttgcatcacggtactatgaaatgtatcgcgtttaaccgcaaaggaacacttcttgctgctggatgctcaaatgggtagctgtattatatgggactttggaaacaagggggcttgcaaaaaaaatttcgtgataaaagatagcaccgcaccctataacaagtgtggtccctgggtccaggtatgggccacccggtttgcttggcctctgctactggacaagtcaattgacacctttggggatgtggcccaactgggggaaaaaaattgcacggtattactcctttcagcagaattccattacgtggccagcctttcaacctgggttctcccaacccccttcctattttgttttggccatggcccctctaacttttcctggaccccctttcnttgtncgatttcngaaaaacatgggaaangaacctaacagnngttnntcn

SEQ ID NO: 6590 - DNA, 3425 bp, Zea mays
  misc_feature (14)..(16): n is a, c, g, or t
  misc_feature (331)..(333): n is a, c, g, or t
  misc_feature (349)..(350): n is a, c, g, or t
  misc_feature (378)..(378): n is a, c, g, or t
  misc_feature (401)..(403): n is a, c, g, or t
  misc_feature (406)..(424): n is a, c, g, or t
  misc_feature (427)..(430): n is a, c, g, or t
  misc_feature (439)..(444): n is a, c, g, or t
  misc_feature (447)..(453): n is a, c, g, or t
  misc_feature (455)..(455): n is a, c, g, or t
  misc_feature (1331)..(1334): n is a, c, g, or t
  misc_feature (1471)..(1473): n is a, c, g, or t
  misc_feature (1475)..(1481): n is a, c, g, or t
  misc_feature (1483)..(1488): n is a, c, g, or t
  misc_feature (1490)..(1495): n is a, c, g, or t
  misc_feature (1497)..(1497): n is a, c, g, or t
  misc_feature (1501)..(1508): n is a, c, g, or t
  misc_feature (1511)..(1514): n is a, c, g, or t
  misc_feature (1516)..(1518): n is a, c, g, or t
  misc_feature (1520)..(1520): n is a, c, g, or t
  misc_feature (1523)..(1523): n is a, c, g, or t
  misc_feature (1525)..(1525): n is a, c, g, or t
  misc_feature (1528)..(1535): n is a, c, g, or t
  misc_feature (3098)..(3149): n is a, c, g, or t
  misc_feature (3151)..(3236): n is a, c, g, or t
  misc_feature (3238)..(3364): n is a, c, g, or t
  misc_feature (3366)..(3425): n is a, c, g, or t
  Peptide Sequence Number=SeqID_11075
  Probeset Number=SeqID_20993
cgcgggaactttcnnncggattcattccataagtaaacgattgaatgggattcgcttgggcaacgaaatcaagtacgagtccccttttcttttttattgaattaactaattcatttccttttgacttttggatttttggatattttttttgatttggcattattcaacaagaaaaaaaatttcgacaaattcctttttttttgaaaattatgtgataattatgagaaccaatcctactacttcgcgtcccgggatttccacaattgaagaaaaaagcgtagggcgtattgatcaaattattggacccgtgctggatatcacttttcccccnnncaagttgccttatatnnataatgctttgatagtcaagagtcgagncactgccgataagcaaattaatnnnacnnnnnnnnnnnnnnnnnnncgnnnnggccgcccnnnnnnggnnnnnnngnggctctataacaattcaagctggagctccccgcggtggcggccgctctagaactcctggcatcccccgggctgcagggagagagtcactagtcccccccccccccccccattttggtgctagcctcagattatttctgtttgagagttatgtaaggtactactaactctgcattttttagttatggtttcgaaacatgtattttcaaaccatgactaatcaagtatattctccaccattaattcctctaggcatgacctggaaaactgcttagctgatgctgtaacattttgatgtctctgttctctgctttctggaggtgccatcccctctctttggggaggcttctggttaaacttgcttcagtcacgatgttactgtgctggataaagaagatgccaaagctgaactttgaggttgctaaaccatgcacccagaatcggagttttgtagttgaagctccatgtgagttgagatacttgcaactatacacaatagaatgttcttcgaacctcaagctgcagctcttgctccaactattacttgcctactttgtttttcctatcagtaatgcttgctgactcattgaaacaaaccagtctttcctttgtttggttttacattttgagagcttttcttaaaaacaaccggaggctggattggttatgtgcaaaactattatagaggccggaataaaatttctattttctaagaaaatagaaataaaccaaatacgagtccgagtccgactatgtgcaatgtacaagaatatcttaaaataagggagatactatcctacaagtgtttggttttcattttttcatgtttattatctatatgatcatgactcatatggctcaggtcatgttatctattnnnncgtcttcttgtctccctcgacattgcccgtctgcttccttgcgccttgcttgtgctgtgggctcccttgtctcgcctcttttccagccgtggccaattgtgtccattgctgggtttgccaccaccttcccgtgtcannncnnnnnnntnnnnnncnnnnnngntccnnnnnnnnacnnnncnnngnctncnttnnnnnnnnagccaaagctgaactttgaggttgctaaaccatgcacccagaatcggagttttgtagttgaagctccatgtgagttgagatcccggacaagcgggcctcgtcgagttggcattggcaggcctggggagctgaacgtttctgtcaaataaggccgagaacaggcagagcaccgggatctagggtttcgcacccaacacccggagtgagcggcggcgagggatcggatcgtcggcggcgatggaggacgaggtgcagagggcagcggtgagcagttggaacgagcttgactatgaggcggaagcgcgtttggtggcggaggcgagggcgtcgtgggataggaaggcaaggggggaggaggaggatgaagaagaacatgatcctgagatgaccttggactactacgcctaccaggctaaaaagtttcgcaacacctggaacatcctctatttcggccacttcggtcgcttcgaggacaccacaaggatccctcctatgcgctttacagagaagccgcctgactccccggcgtacccgcgcactacactgcaggtcttttcgatcaaagttgcagggatagaggggggtttacagtggccactccatgtgtttgggaaggttgccctacgcgacgcagttgatcacaatcgcaatatggtcttcgatcgcactagagacaactgccaaatccttacaaaagaggttccaaatttgaaactgacaggtcctagccgtgctgttctgctggtggatcctgtgactattgaggctgacctgaaagttaaaggccgtactgaatctgaggataaacacttgagctttctagcagtgccattcttgatcacgatcccgctcgagtcatgcctgcgtacaagagatttcaccagcaagcttagcacgctgaggtttggtctcgcaattgttgttctctcagtggaggctacaattagtgtgcgagttcgtggtgggtcatggcctgatggtctccgtgcccagtttgctgcccacacggtgagtataggtcgtgaggaagttgtcttgcttgattctggggacgataaactgcctgtttctgatgatggcactatcacacttggtcgtcgagttgcatctgttgaagtgagtggggagctgaacgtttctgtcaaggcatggcaaggtggtgaagtctttacgcacagagagaggggtttcaaacctaaagaggcaggttggagttatggcactcttgacgttggcttctgccaaatggatgtatctgtggcctggtcgcttctttcgtcgtacggtgaaaatgaagctttgtaagagtcggtgttagccgtggtcgttgcttcgattctctagcatgtaatgataagttcacattgggatatgcttgctgttttgctgtaatgataagttcacattgggatatgcttgctgttttgctttttatttatttttctccaaaaaaaaaaaaaaaaaaaaagaaaaaaaaaaaaaaaaaaaactcatcctctagcatgtaatagagtttttttttccttgatcccaatgcataaagcccaagttgctcattgcttnnnnnnnnnnnnnnnnnnnnnnnnnnnnnnnnnnnnnnnnnnnnnnnnnnnngnnnnnnnnnnnnnnnnnnnnnnnnnnnnnnnnnnnnnnnnnnnnnnnnnnnnnnnnnnnnnnnnnnnnnnnnnnnnnnnnnnnnnnannnnnnnnnnnnnnnnnnnnnnnnnnnnnnnnnnnnnnnnnnnnnnnnnnnnnnnnnnnnnnnnnnnnnnnnnnnnnnnnnnnnnnnnnnnnnnnnnnnnnnnnnnnnnnnnnnnnnnnnnnnnnnntnnnnnnnnnnnnnnnnnnnnnnnnnnnnnnnnnnnnnnnnnnnnnnnnnnnnnnnnnnnn

SEQ ID NO: 6591 - DNA, 655 bp, Zea mays
  Peptide Sequence Number=SeqID_11076
  Probeset Number=SeqID_20994
ggttttggttctcttccagccagccaccgctctctccgctcaaaagctggcgtcagcgcgcagctttcaaagcgttgggagagatggcagaggagacgcaaccagaggccgccgcagccgccgccgcgcccgccgcggacgaggtagtcgtgaccgaagctgcgccggcggaggcggaggtgcctgcggcgcaggaagctgaagccgaggccaaggatgagaagaaaggtgacgagctggagctcaccgccgatgacgcgggggtgcatgaccggctcgttcaggaggaaagcgccggggggaagacctcgcccgagccgcgaaataaaggagctcggaaaggtcacacggaggggaggggctggcggcccctccgcatggaaggccgcctccatcccctgacctccccccgatgactcccgcctacattccgagggcacccaaagtccccacaggctacctttcgcccggggtgccccggctatgagtggcggcgcgcggtcccccgcgctttacccggcgagggtgaggggggggaggggggtcccacagtggggcgccgcggcccctcccccacccacccagcggcagcccgcgaaacccaagcgaccgccggtggccgcgcccacgggcccccccgacaccactccccccg

SEQ ID NO: 6592 - DNA, 527 bp, Zea mays
  Probeset Number=SeqID_20995
tgcaccatacaacatagcaggcttaatcgttgtcctataaaacttgccttttagcttctgtggttccctcttgtcgtatagaacgacagatgcttgacgccacttcatccaccttgctttgattctatagctatcatatttatcaatatttccgtctctgtaacattgatcctaaatacctaaaaatgtccttcctaggaactatctaaccttccaaactaacatctccttcctcatgtgtagtgccgaatcacatctcataaattatgttttagttacactaagtctaaaacctttggattctagagtctcccgccacaaccctaatttcctatttagcgaaagagcctctagcctagtggttaaggacttccgagtagcacctccaagtcctgggttcgattcccctcgggagcgaattcttaggtttggttaaaaaatcccctcgctgtgccccatccgctctcgggttacgattgaaaaaaaaaaaaaaaaaaaagaaaaaaaaaaaaaaaaaaggggcggcc

SEQ ID NO: 6593 - DNA, 719 bp, Zea mays
  misc_feature (1)..(3): n is a, c, g, or t
  misc_feature (11)..(19): n is a, c, g, or t
  misc_feature (23)..(24): n is a, c, g, or t
  misc_feature (26)..(39): n is a, c, g, or t
  misc_feature (41)..(41): n is a, c, g, or t
  misc_feature (45)..(46): n is a, c, g, or t
  misc_feature (51)..(54): n is a, c, g, or t
  misc_feature (69)..(79): n is a, c, g, or t
  misc_feature (82)..(90): n is a, c, g, or t
  misc_feature (96)..(98): n is a, c, g, or t
  misc_feature (108)..(113): n is a, c, g, or t
  misc_feature (116)..(118): n is a, c, g, or t
  misc_feature (125)..(128): n is a, c, g, or t
  misc_feature (132)..(134): n is a, c, g, or t
  misc_feature (148)..(152): n is a, c, g, or t
  misc_feature (177)..(179): n is a, c, g, or t
  misc_feature (181)..(181): n is a, c, g, or t
  misc_feature (183)..(183): n is a, c, g, or t
  misc_feature (208)..(208): n is a, c, g, or t
  misc_feature (210)..(210): n is a, c, g, or t
  misc_feature (232)..(235): n is a, c, g, or t
  misc_feature (263)..(267): n is a, c, g, or t
  misc_feature (273)..(274): n is a, c, g, or t
  misc_feature (290)..(292): n is a, c, g, or t
  misc_feature (294)..(296): n is a, c, g, or t
  misc_feature (317)..(325): n is a, c, g, or t
  misc_feature (328)..(328): n is a, c, g, or t
  misc_feature (330)..(335): n is a, c, g, or t
  misc_feature (337)..(337): n is a, c, g, or t
  misc_feature (341)..(345): n is a, c, g, or t
  misc_feature (352)..(353): n is a, c, g, or t
  misc_feature (357)..(360): n is a, c, g, or t
  misc_feature (370)..(372): n is a, c, g, or t
  misc_feature (414)..(418): n is a, c, g, or t
  misc_feature (421)..(421): n is a, c, g, or t
  misc_feature (423)..(423): n is a, c, g, or t
  misc_feature (448)..(449): n is a, c, g, or t
  misc_feature (484)..(486): n is a, c, g, or t
  misc_feature (544)..(548): n is a, c, g, or t
  misc_feature (554)..(556): n is a, c, g, or t
  misc_feature (558)..(558): n is a, c, g, or t
  misc_feature (562)..(564): n is a, c, g, or t
  misc_feature (571)..(571): n is a, c, g, or t
  misc_feature (573)..(573): n is a, c, g, or t
  misc_feature (577)..(577): n is a, c, g, or t
  misc_feature (587)..(588): n is a, c, g, or t
  misc_feature (673)..(677): n is a, c, g, or t
  misc_feature (682)..(692): n is a, c, g, or t
  misc_feature (700)..(711): n is a, c, g, or t
  misc_feature (713)..(719): n is a, c, g, or t
  Peptide Sequence Number=SeqID_11077
  Probeset Number=SeqID_20996
nnnctttttcnnnnnnnnngttnngnnnnnnnnnnnnnnantganngtggnnnnttcaaattatatggnnnnnnnnnnntgnnnnnnnnntttttnnntttgaaatcnnnnnnaannnattgaannnnatcnnntttattaccttatnnnnntgcatctttttgagttaggcatatnnngntnccacgggcacaacacagttccatgngnggcgcagggaagatgctgttgnnnncgcagaggaagctgcattcagcaaagcnnnnncatggnncggttttggcctgtannngnnnctccaggatgaatctcattannnnnnnnnctncnnnnnngnctcnnnnngcaaaanngttnnnnataagttgtnnnatgcggtggatgcgcccctagaatttggcctgtaccgaatcnnnnnggngnctttgcgtagtatcatactcataanntaaggcagtgaacctaaatagattgttcataagcnnntttttttattagttttgcctctattaaaacttcgcatctagaatcaatttttgctctnnnnntagtannntnctcnnnacacaananagtnaacctatgtnnatgctattcgaaaccttctttttattaatattagaattcttattaatattattgtataattatttttttaatgtatatgtgtcgnnnnnaatcnnnnnnnnnnnctatattnnnnnnnnnnnntnnnnnnn

SEQ ID NO: 6594 - DNA, 346 bp, Zea mays
  misc_feature (275)..(276): n is a, c, g, or t
  misc_feature (290)..(290): n is a, c, g, or t
  misc_feature (319)..(320): n is a, c, g, or t
  misc_feature (325)..(326): n is a, c, g, or t
  misc_feature (329)..(337): n is a, c, g, or t
  misc_feature (343)..(346): n is a, c, g, or t
  Probeset Number=SeqID_20997
ctcgaacgtgatgaccgacgtaattgtaccattatctgcaaccttggcaacagaggaacttttgaatccctcgaaagtcactctaagtttatcgcgctcttacatgaccattcatacactgtttatggtatgggctatactgcaacactaaacgctatggactgatatcaggatcctattcgcaccttgatgccgggtcgatgaaactcaaggagtttttttcaagcgcagctcaatcatgctttgaatggggaaattcgttttcggcaacttgnnactcgactcaaagnaagatagctatgttgagagataccttgannggatnngcnnnnnnnnnataccnnnn

SEQ ID NO: 6595 - DNA, 2320 bp, Zea mays
  misc_feature (1)..(1): n is a, c, g, or t
  misc_feature (2173)..(2177): n is a, c, g, or t
  misc_feature (2184)..(2185): n is a, c, g, or t
  misc_feature (2187)..(2190): n is a, c, g, or t
  misc_feature (2192)..(2192): n is a, c, g, or t
  misc_feature (2194)..(2194): n is a, c, g, or t
  misc_feature (2234)..(2234): n is a, c, g, or t
  misc_feature (2247)..(2250): n is a, c, g, or t
  misc_feature (2252)..(2252): n is a, c, g, or t
  misc_feature (2255)..(2268): n is a, c, g, or t
  misc_feature (2270)..(2289): n is a, c, g, or t
  misc_feature (2293)..(2295): n is a, c, g, or t
  misc_feature (2302)..(2312): n is a, c, g, or t
  misc_feature (2319)..(2319): n is a, c, g, or t
  Peptide Sequence Number=SeqID_11078
  Probeset Number=SeqID_20998
ncccaagcaaccctagctctcccatcccctcacgccaggaaacatgttcttcctccaggagcccccgatctgcaccgccgacggcgtcatctgcgccgccacgacatccctccgcctgcccaggaggcccggcaccgctcgattaccgcacggcgacaccacgctacccttcgcgaccacctcgccgctgccatcgccaaatcgtgctccaagacggtacgaagagctcgcgagacacaagagggatcacgacgcaagagagaagaagaggaatggaagatgcggaagcggcgaagaaaagtagcgccttttaaaaaggaggcccacacggataagcaatgtcgagagatgtctttaccagataagcaatggcacgatacatgaagactggaggtatgcaatgactgagttgcaatctctcgtgacagaaagtcgctcgacatagatgtcatttggagcaatgggttttcctatcctcctcaatattttgaaagaagaccgtgaggatgtagagtttgtgagaggtgccctggagacctttatgagtgcattgactcatattgagacgtcacaagggtcaaatactccgcttcaaccagcgttagtgaattctaatacgctatctcgagaaactgagaatatttctcttattttaattttactgtgaatcctgcaacaaggatgtccccatcgtccacgtcgacatgcacaactatagccttgatgagaagatcaggatgacgctcgaggcgcacattgtcgagaagaccgacgaggtccatgaggtttcttttacttttcttcacaagctgaatccttctgcaagaccatggacagaacatttgctattgatttgtattcgtcctatataaaacagaaactatcagaattttctctatcaaatagttctaaatgtcttgtagcactaattatagaaccaggtaaaaaagtttcactctttgagcttcttgggaatattttcattttttcctctttagcctttagtatgtaactatgcgcactatcatttgatgctaatagctgaaaaaaactcagtacttttccatgccatttactggttcaacctcttaacccatatttgtgtagtaatatacaaggtgcaggtggaatcctcatgatggatcctcttttccagcgagtacttgtgagtgagtgtagaagtcgaaaaatacctgtcatatttgatgagatatttttaggattctgacatcgtggtgtggatatcatatttgacaatacctttttagaggataaataggtattttctttgtattttatgaccttaataacttctctttcagtctacttctgagttacttggttgtttacctgttatcgcttgctatgcaaaactgatgactgaggtaattgtaccattatctgcaaccttagcaacagaggaagtttttgaatccttcgaaagtgactctaagtttatggcgctcttacattcccattcatacactgtttatggtatagtagatgcgttggtacaactcaagctacagagtcgtccctgtgctcccctgtagaatctgaacaagggtaggacatggacatgaaggctgtggcacatagacttgtgctactcgtagttcacttgtaagaacagcacatctgaattctgatccgcaaattgacaaagcttggggtgaaaagaacggtagcccaggcaggcaggagagaagaagtggacgacgatgagcctgtgacaggcgttgggcaagttatcgattaggtcttgggagctccctacagctcgcagatcaagctgcactccctttaaatgctagacctcagcgatttcctaagggcaaggttcatgttcatctgcgtcatagtagtatggcagcatagcaaaaagcgccgttttagaacacaatccttgcacactcttggttgcaaatgaaccgcgagcttcgacgtttacccagctcatccttcacacaccttacccgttaggctcggaaacgttctgttcacccattgattgacgatgttcaccaaacctgcttcctaagcctagcccattgcgaagccgccatcgtcaattgttacacgaagatgggatgtaagcacaagagaggttaaaggttcagcgaaaacaatatttaaagattttctgtgttgagcttgttttgcttttggcccnnnnnctcatcnngnnnnangnatgcatgatctttgatgttatatcaaaagtatcacaatgnatgagtcattacnnnntnacnnnnnnnnnnnnnntnnnnnnnnnnnnnnnnnnnncgcnnntacatgnnnnnnnnnnnactgttna

SEQ ID NO: 6596 - DNA, 476 bp, Zea mays
  misc_feature (364)..(364): n is a, c, g, or t
  Peptide Sequence Number=SeqID_11079
  Probeset Number=SeqID_20999
ttttttccaagtagccaccctctccctctcggttctctgctggccggcgctctctgctccagcagctcccatggcgagctcgtcctcccatctcctctgctccctgcgcggcttcctcctccctgctgcgtccttgcgttcggtgccccccctccatcagcggacgtgttcagtctcgctctcctcgtcgtggcatggccatggccacgacgtcatccttggtgagccccattgctgtgcactcgccgagctctcctcccttcgctcatcttcgtcggcgctcggccatgccggaactcggccgaccggacctccacttcgccatggccggttgctcgtgccctaggtacgccaattgatcacntgatgtggaggacaagagctggatttgtctcatggtgatgctgatgaatatacctgaagatttatgatctgatcgagtgccaaaatgggagatgctcgccaagcaagcatca

SEQ ID NO: 6597 - DNA, 833 bp, Zea mays
  misc_feature (1)..(76): n is a, c, g, or t
  misc_feature (267)..(267): n is a, c, g, or t
  misc_feature (274)..(284): n is a, c, g, or t
  misc_feature (291)..(293): n is a, c, g, or t
  misc_feature (298)..(300): n is a, c, g, or t
  misc_feature (302)..(304): n is a, c, g, or t
  misc_feature (310)..(314): n is a, c, g, or t
  misc_feature (318)..(326): n is a, c, g, or t
  misc_feature (331)..(348): n is a, c, g, or t
  misc_feature (350)..(353): n is a, c, g, or t
  misc_feature (356)..(380): n is a, c, g, or t
  misc_feature (392)..(395): n is a, c, g, or t
  misc_feature (401)..(407): n is a, c, g, or t
  misc_feature (412)..(422): n is a, c, g, or t
  misc_feature (428)..(435): n is a, c, g, or t
  misc_feature (441)..(441): n is a, c, g, or t
  misc_feature (443)..(443): n is a, c, g, or t
  misc_feature (445)..(453): n is a, c, g, or t
  misc_feature (458)..(460): n is a, c, g, or t
  misc_feature (466)..(470): n is a, c, g, or t
  misc_feature (482)..(487): n is a, c, g, or t
  misc_feature (491)..(496): n is a, c, g, or t
  misc_feature (530)..(534): n is a, c, g, or t
  misc_feature (540)..(540): n is a, c, g, or t
  misc_feature (554)..(554): n is a, c, g, or t
  misc_feature (557)..(561): n is a, c, g, or t
  misc_feature (563)..(565): n is a, c, g, or t
  misc_feature (568)..(570): n is a, c, g, or t
  misc_feature (572)..(584): n is a, c, g, or t
  misc_feature (600)..(600): n is a, c, g, or t
  misc_feature (602)..(602): n is a, c, g, or t
  misc_feature (604)..(609): n is a, c, g, or t
  misc_feature (616)..(617): n is a, c, g, or t
  misc_feature (619)..(623): n is a, c, g, or t
  misc_feature (635)..(638): n is a, c, g, or t
  misc_feature (644)..(660): n is a, c, g, or t
  misc_feature (662)..(662): n is a, c, g, or t
  misc_feature (664)..(667): n is a, c, g, or t
  misc_feature (669)..(833): n is a, c, g, or t
  Probeset Number=SeqID_21000
nnnnnnnnnnnnnnnnnnnnnnnnnnnnnnnnnnnnnnnnnnnnnnnnnnnnnnnnnnnnnnnnnnnnnnnnnnnncacacacgtcgtacgcgccgtgaagcaagcaatgatgatggctggctggtacctgattcccctgagctcgtcgaagaagcggaggtcgaacacgtcgccgaggcccgcgaagaggacgacgccggcgaggcggtggtgctcgatgtgtccgagcgccacgttgcgctggtggtgccgctccctgcccgcgncggcgtnnnnnnnnnnnaagttgnnnttgtnnntnnngtggtnnnnnatgnnnnnnnnngtgcnnnnnnnnnnnnnnnnnncnnnngcnnnnnnnnnnnnnnnnnnnnnnnnnctcctaatcggnnnngccatnnnnnnnctggnnnnnnnnnnnttcttnnnnnnnnaggcantngnnnnnnnnnctttnnnggctannnnntttctaggaacnnnnnnactnnnnnntttacaccacttgaacagatccagtttgctgaannnnnccattnatttggaattgagnttnnnnnannnatnnngnnnnnnnnnnnnntctgttccaccattgnancnnnnnngttgacnnannnnngcattgaagttnnnnaccggnnnnnnnnnnnnnnnnntngnnnnannnnnnnnnnnnnnnnnnnnnnnnnnnnnnnnnnnnnnnnnnnnnnnnnnnnnnnnnnnnnnnnnnnnnnnnnnnnnnnnnnnnnnnnnnnnnnnnnnnnnnnnnnnnnnnnnnnnnnnnnnnnnnnnnnnnnnnnnnnnnnnnnnnnnnnnnnnnnnnnnnnnn

SEQ ID NO: 6598 - DNA, 833 bp, Zea mays
  misc_feature (1)..(165): n is a, c, g, or t
  misc_feature (167)..(170): n is a, c, g, or t
  misc_feature (172)..(172): n is a, c, g, or t
  misc_feature (174)..(190): n is a, c, g, or t
  misc_feature (196)..(199): n is a, c, g, or t
  misc_feature (211)..(215): n is a, c, g, or t
  misc_feature (217)..(218): n is a, c, g, or t
  misc_feature (225)..(230): n is a, c, g, or t
  misc_feature (232)..(232): n is a, c, g, or t
  misc_feature (234)..(234): n is a, c, g, or t
  misc_feature (250)..(262): n is a, c, g, or t
  misc_feature (264)..(266): n is a, c, g, or t
  misc_feature (269)..(271): n is a, c, g, or t
  misc_feature (273)..(277): n is a, c, g, or t
  misc_feature (280)..(280): n is a, c, g, or t
  misc_feature (294)..(294): n is a, c, g, or t
  misc_feature (300)..(304): n is a, c, g, or t
  misc_feature (338)..(343): n is a, c, g, or t
  misc_feature (347)..(352): n is a, c, g, or t
  misc_feature (364)..(368): n is a, c, g, or t
  misc_feature (374)..(376): n is a, c, g, or t
  misc_feature (381)..(389): n is a, c, g, or t
  misc_feature (391)..(391): n is a, c, g, or t
  misc_feature (393)..(393): n is a, c, g, or t
  misc_feature (399)..(406): n is a, c, g, or t
  misc_feature (412)..(422): n is a, c, g, or t
  misc_feature (427)..(433): n is a, c, g, or t
  misc_feature (439)..(442): n is a, c, g, or t
  misc_feature (454)..(478): n is a, c, g, or t
  misc_feature (481)..(484): n is a, c, g, or t
  misc_feature (486)..(503): n is a, c, g, or t
  misc_feature (508)..(516): n is a, c, g, or t
  misc_feature (520)..(524): n is a, c, g, or t
  misc_feature (530)..(532): n is a, c, g, or t
  misc_feature (534)..(536): n is a, c, g, or t
  misc_feature (541)..(543): n is a, c, g, or t
  misc_feature (550)..(560): n is a, c, g, or t
  misc_feature (567)..(567): n is a, c, g, or t
  misc_feature (758)..(833): n is a, c, g, or t
  Peptide Sequence Number=SeqID_11080
  Probeset Number=SeqID_21001
nnnnnnnnnnnnnnnnnnnnnnnnnnnnnnnnnnnnnnnnnnnnnnnnnnnnnnnnnnnnnnnnnnnnnnnnnnnnnnnnnnnnnnnnnnnnnnnnnnnnnnnnnnnnnnnnnnnnnnnnnnnnnnnnnnnnnnnnnnnnnnnnnnnnnnnnnnnnnnnnnnnnntnnnncnannnnnnnnnnnnnnnnnccggtnnnnaacttcaatgcnnnnntnngtcaacnnnnnngntncaatggtggaacagannnnnnnnnnnnncnnnatnnntnnnnnaanctcaattccaaatnaatggnnnnnttcagcaaactggatctgttcaagtggtgtaaannnnnnagtnnnnnngttcctagaaannnnntagccnnnaaagnnnnnnnnncnantgcctnnnnnnnnaagaannnnnnnnnnnccagnnnnnnnatggcnnnnccgattaggagnnnnnnnnnnnnnnnnnnnnnnnnngcnnnngnnnnnnnnnnnnnnnnnngcacnnnnnnnnncatnnnnnaccacnnnannnacaannncaacttnnnnnnnnnnnacgccgncgcgggcagggagcggcaccaccagcgcaacgtggcgctcggacacatcgagcaccaccgcctcgccggcgtcgtcctcttcgcgggcctcggcgacgtgttcgacctccgcttcttcgacgagctcaggggaatcaggtaccagccagccatcatcattgcttgcttcacggcgcgtacgacgtgtgtgnnnnnnnnnnnnnnnnnnnnnnnnnnnnnnnnnnnnnnnnnnnnnnnnnnnnnnnnnnnnnnnnnnnnnnnnnnnn

SEQ ID NO: 6599 - DNA, 727 bp, Zea mays
  misc_feature (613)..(624): n is a, c, g, or t
  misc_feature (626)..(640): n is a, c, g, or t
  misc_feature (644)..(659): n is a, c, g, or t
  misc_feature (667)..(672): n is a, c, g, or t
  misc_feature (684)..(703): n is a, c, g, or t
  misc_feature (705)..(713): n is a, c, g, or t
  misc_feature (720)..(725): n is a, c, g, or t
  misc_feature (727)..(727): n is a, c, g, or t
  Peptide Sequence Number=SeqID_11081
  Probeset Number=SeqID_21002
gacgaacactacgacggaggcccatggcggcactggagcgatgcgagggtcgctactggctatcgtgcggagcaggtaaacccaaccgtaatccaccttttcagaaatgaaattgggcggtggagggcggctccatgttctactactctgcaccccaaactcgaatccacctgcaacggagacattatatggctgtttgttggacctttcatctgggagtggagctcctattctggatgcacaacaggtgtttgaggtaatgcccgttggatgtcccttttcctttttctttaatcaacattgctctaaatccgagcgcagacgcagcagcatcatctcctttctcgtcctacccagtctccacctcgccagctccaccccgctagctttttttccctttatttttcccacaacatgcaagctgtagttgaagccaccgaagatcaggcaggaacaatgcaacagcaacatccactcccgccggcttctcattgatttcccacaaggcgaaagctaaagctcaagccgctgtaggccaaccatcagcatttgcgttgttttactgtacctatttgaaatctaatgtttttcctttcctttcaaccacatacannnnnnnnnnnnannnnnnnnnnnnnnnttcnnnnnnnnnnnnnnnnggttaaannnnnntcactacacatnnnnnnnnnnnnnnnnnnnnannnnnnnnnttaatcnnnnnntn

SEQ ID NO: 6600 - DNA, 615 bp, Zea mays
  Probeset Number=SeqID_21003
ggccacccgttgcagcatatctccctctacctaccggaccagggagcccgccgcccgagccctttccgccgccgccaaaatggtgaccgttcctaagcccaagaagccctcctccaagaccaaggagtccaagaacccccctctccccaaggttccccagtccaagaagggtaaggataccctgtctgcccagggaaacccccgttatgcccccaaccagccaggatatggtggccagaccaagcctgtcttccccaagaaggccaagccccccaagaaaatcgtgttgaacctccagtgccagacctcgcaacgccctcctcccagcccccaattaagaggtcgcaaccattttgagattggtggagccaagaaggcgcaagggaccatctctcttctaagtttctcactcgctcatctcgatgttggatcgaacctgtgggtctcctcctgttctaaaacctcgccaaatttcaatgttactagtagttctgaaagcaggtcatcctgtgtatcaaattccaatgcctcacatttgcgctgagtgtgggttgtcttttggctaaatgaagttttgccccctgaatcctcattgaatgtgttgtgtgtttgccc

SEQ ID NO: 6601 - DNA, 635 bp, Zea mays
  misc_feature (1)..(32): n is a, c, g, or t
  misc_feature (633)..(635): n is a, c, g, or t
  Peptide Sequence Number=SeqID_11082
  Probeset Number=SeqID_21004
nnnnnnnnnnnnnnnnnnnnnnnnnnnnnnnnttccgccgccgccacctgttcaagcttctcaaccggataggtagcaccggagcaggtacaacgctgcacatttccctttgccgccgccaagatggtgaacgttcctaagaccaaaaaaacgttctgcaagaacaaagagtgcaagaagcaccccctccccaaggtggctcagtataaaaagggaaaggatagcctgtttgctcagggaaagcgccgttatgtcccccaacagtcaggatatggtggtcagaccaagcctgtttttctcaaaaaggccaagaccccccaaaagattgtttttaagctgcagtgccaaagctgcaagcactactcacagcacgccatcaaaaaatgcaagcatttttagattggtgggggcaaaaagggcaagggcacatctcttttttaagcttctcgtccccctgtctggttgttgagttgaaactgtgggtctactactactgttataaaaacctctcgccaaatttcaatgttaatgtagcaattaaagcagaccatgctatgtatccaaattccaatgccggacatttgttttggggtgttggtcgacctttgggtaaataaaagttttgtagcttgnnn

SEQ ID NO: 6602 - DNA, 615 bp, Zea mays
  misc_feature (1)..(15): n is a, c, g, or t
  misc_feature (174)..(175): n is a, c, g, or t
  misc_feature (189)..(189): n is a, c, g, or t
  misc_feature (267)..(267): n is a, c, g, or t
  misc_feature (283)..(283): n is a, c, g, or t
  misc_feature (287)..(287): n is a, c, g, or t
  misc_feature (375)..(375): n is a, c, g, or t
  misc_feature (393)..(393): n is a, c, g, or t
  misc_feature (411)..(411): n is a, c, g, or t
  misc_feature (474)..(474): n is a, c, g, or t
  misc_feature (613)..(615): n is a, c, g, or t
  Peptide Sequence Number=SeqID_11083
  Probeset Number=SeqID_21005
nnnnnnnnnnnnnnnggtccccggggaccttctccagcctctccatccggataggtagccccggaccaggttcaacgctgcacattccccttcgcccccgccaagatggtgaccgttcctaagcccaagaagacgtcctccaagaacaaagagtgcaagaagccccccctcccnnaaggtgcctcagtntaaaaagggaaaggatagcctgtctgctcagggaaagccccgttatgcccccaaccagtcaggatatggtggtcagcncaagcctgttttccanaaanaggccaagccccccaagaagattgttctgaagctgcagtgccagagctgcaagccctactcacagcacgccatcaagagatgcaagcnttttgagattggtggggncaaaaagggcaagggcanctctcttttttaagcttctcgtccccctgtcttgttgttgagttaaagctgtgggtctactantactgttctaaaaccctctccccaaatttcaatgttaatgtagcaatgaaagcagcccgttctatgtatccaaattccaatgcctcacatttgttctggggtgttggtcgacttttggctaaatgaaagttttgtagcnnn

SEQ ID NO: 6603 - DNA, 1426 bp, Zea mays
  misc_feature (1)..(164): n is a, c, g, or t
  misc_feature (166)..(188): n is a, c, g, or t
  misc_feature (190)..(230): n is a, c, g, or t
  misc_feature (232)..(250): n is a, c, g, or t
  misc_feature (253)..(261): n is a, c, g, or t
  misc_feature (263)..(266): n is a, c, g, or t
  misc_feature (269)..(300): n is a, c, g, or t
  misc_feature (302)..(305): n is a, c, g, or t
  misc_feature (307)..(315): n is a, c, g, or t
  misc_feature (317)..(317): n is a, c, g, or t
  misc_feature (321)..(321): n is a, c, g, or t
  misc_feature (323)..(353): n is a, c, g, or t
  misc_feature (355)..(363): n is a, c, g, or t
  misc_feature (365)..(377): n is a, c, g, or t
  misc_feature (380)..(385): n is a, c, g, or t
  misc_feature (387)..(411): n is a, c, g, or t
  misc_feature (419)..(419): n is a, c, g, or t
  misc_feature (970)..(970): n is a, c, g, or t
  misc_feature (998)..(998): n is a, c, g, or t
  misc_feature (1004)..(1019): n is a, c, g, or t
  misc_feature (1021)..(1026): n is a, c, g, or t
  misc_feature (1031)..(1036): n is a, c, g, or t
  misc_feature (1042)..(1056): n is a, c, g, or t
  misc_feature (1058)..(1079): n is a, c, g, or t
  misc_feature (1083)..(1245): n is a, c, g, or t
  misc_feature (1248)..(1278): n is a, c, g, or t
  misc_feature (1280)..(1315): n is a, c, g, or t
  misc_feature (1317)..(1318): n is a, c, g, or t
  misc_feature (1320)..(1320): n is a, c, g, or t
  misc_feature (1324)..(1426): n is a, c, g, or t
  Peptide Sequence Number=SeqID_11084
  Probeset Number=SeqID_21006
nnnnnnnnnnnnnnnnnnnnnnnnnnnnnnnnnnnnnnnnnnnnnnnnnnnnnnnnnnnnnnnnnnnnnnnnnnnnnnnnnnnnnnnnnnnnnnnnnnnnnnnnnnnnnnnnnnnnnnnnnnnnnnnnnnnnnnnnnnnnnnnnnnnnnnnnnnnnnnnnnnnngnnnnnnnnnnnnnnnnnnnnnnnannnnnnnnnnnnnnnnnnnnnnnnnnnnnnnnnnnnnnnnngnnnnnnnnnnnnnnnnnnnggnnnnnnnnngnnnnggnnnnnnnnnnnnnnnnnnnnnnnnnnnnnnnngnnnngnnnnnnnnntngagngnnnnnnnnnnnnnnnnnnnnnnnnnnnnnnnannnnnnnnngnnnnnnnnnnnnnggnnnnnngnnnnnnnnnnnnnnnnnnnnnnnnngggggggnttttttttttttttttggaaggtatcaaactggtttataaatgcgagggtaaggctatggaagccgatgatagaagacatgtacgcagaaattaacaaagatttaaagacacaaccacagtctaagcccacatataacaaaacattaaaaagatttaaagacacaaagcagttattacaataattggacacaaccaattaccatcacttcatttcctctgtccacttgcccatactggcctccattttttccagactttggagatctttaatgaaaagctcttcattttcccgaagcccctttgagacggggcttgttgtcacaccaccgagcaggaatccaccaccaccaaaggccgctacaacgcagtatccaaaaaatttcgacacagctttctcactcacggatgaaaattcacgatactgcaacctccccttgatacgacaagactgcttagccaacaacaaacgcaacatcgtcctcgtcgaattggagactctagggttttcgagatttggggatcttggttccaaaattttttcgataaggangttctaggtaattgggtctcgtgcgatncgaatnnnnnnnnnnnnnnnntnnnnnncactnnnnnnctagannnnnnnnnnnnnnngnnnnnnnnnnnnnnnnnnnnnncctnnnnnnnnnnnnnnnnnnnnnnnnnnnnnnnnnnnnnnnnnnnnnnnnnnnnnnnnnnnnnnnnnnnnnnnnnnnnnnnnnnnnnnnnnnnnnnnnnnnnnnnnnnnnnnnnnnnnnnnnnnnnnnnnnnnnnnnnnnnnnnnnnnnnnnnnnnnnnnnnnnncgnnnnnnnnnnnnnnnnnnnnnnnnnnnnnnngnnnnnnnnnnnnnnnnnnnnnnnnnnnnnnnnnnnngnncnacannnnnnnnnnnnnnnnnnnnnnnnnnnnnnnnnnnnnnnnnnnnnnnnnnnnnnnnnnnnnnnnnnnnnnnnnnnnnnnnnnnnnnnnnnnnnnnnnnnnnnn

SEQ ID NO: 6604 - DNA, 615 bp, Zea mays
  misc_feature (601)..(615): n is a, c, g, or t
  Probeset Number=SeqID_21007
aattctgtgataactttctaccagcgatcaatttgataaacattctctgctatttcttcggtctttctcgagaaaatgtcttgctgtggtggaaactgtggttgtggatctggctgcaagtgcggcaacggttgcggaggttgcaaaatgtacccggacttgggcttttccggcgagtcgaccacgaccgagacttttgtcttcggcgttgcaccggcgatgaagaaccagtacgaggcttctggagagggtgtcgctgagaacgatgcatgcaagtgtggatctgactgcaagtgtgatccttgcacctgtaaatgaataataatggaacctttctaaggaggcagagatatgtttaaattaattatattaggaaaccggagggatgaaactaagcttttgtttacggtgtaataacggctgccaggcttttgtcttttagccggaaaatggctttccggcttggggttgacgccatatatccaggtggtctctgccatggggtgcgggaatgaaccacaggtctgtaccttctcttcgctgggagacgacacgagccatggatatccctagcgaaaaaatacggacgctcctatttgannnnnnnnnnnnnnn

SEQ ID NO: 6605 - DNA, 615 bp, Zea mays
  misc_feature (1)..(15): n is a, c, g, or t
  Peptide Sequence Number=SeqID_11085
  Probeset Number=SeqID_21008
nnnnnnnnnnnnnnntcaaataggagcgtccgtattttttcgctagggatatccatggctcgtgtcgtctcccagcgaagagaaggtacagacctgtggttcattcccgcaccccatggcagagaccacctggatatatggcgtcaaccccaagccggaaagccattttccggctaaaagacaaaagcctggcagccgttattacaccgtaaacaaaagcttagtttcatccctccggtttcctaatataattaatttaaacatatctctgcctccttagaaaggttccattattattcatttacaggtgcaaggatcacacttgcagtcagatccacacttgcatgcatcgttctcagcgacaccctctccagaagcctcgtactggttcttcatcgccggtgcaacgccgaagacaaaagtctcggtcgtggtcgactcgccggaaaagcccaagtccgggtacattttgcaacctccgcaaccgttgccgcacttgcagccagatccacaaccacagtttccaccacagcaagacattttctcgagaaagaccgaagaaatagcagagaatgtttatcaaattgatcgctggtagaaagttatcacagaatt

SEQ ID NO: 6606 - DNA, 309 bp, Zea mays
  misc_feature (128)..(128): n is a, c, g, or t
  Peptide Sequence Number=SeqID_11086
  Probeset Number=SeqID_21009
atccatctgatcatctcgattctttttgagcaaaagatataatacgttgttatcaagctgttaatactagttagttaccataccctagacactaaggaatggaactacacagttgtaaagtgtagtanaaacgattattcttttagttccatcctagtgtcagggaaaaaatgagagcccggaatggcatgttccttgtttgaacggcaatgcgtggttggtgttagttaagctctgctccatgttattttgttgtacccgtgaaaaaggtatcatgttcatggtgtgctactatttttgatgtgtaag

SEQ ID NO: 6607 - DNA, 931 bp, Zea mays
  misc_feature (1)..(1): n is a, c, g, or t
  misc_feature (603)..(603): n is a, c, g, or t
  misc_feature (605)..(628): n is a, c, g, or t
  misc_feature (631)..(640): n is a, c, g, or t
  misc_feature (642)..(647): n is a, c, g, or t
  misc_feature (650)..(699): n is a, c, g, or t
  misc_feature (701)..(710): n is a, c, g, or t
  misc_feature (712)..(722): n is a, c, g, or t
  misc_feature (724)..(732): n is a, c, g, or t
  misc_feature (734)..(751): n is a, c, g, or t
  misc_feature (753)..(771): n is a, c, g, or t
  misc_feature (774)..(790): n is a, c, g, or t
  misc_feature (794)..(818): n is a, c, g, or t
  misc_feature (820)..(827): n is a, c, g, or t
  misc_feature (829)..(863): n is a, c, g, or t
  misc_feature (865)..(881): n is a, c, g, or t
  misc_feature (883)..(905): n is a, c, g, or t
  misc_feature (907)..(931): n is a, c, g, or t
  Probeset Number=SeqID_21010
ntttttgtcctaccattattctattcttgctaaacaagatggccatgaaacatgttattatctgttgtcttctcttagccctcatgctgcagtcagatcaaacatctgctgctgacatatgcagctatgcagattttagggccatgttttgcaagaattagatgtgcaagagccagtgctggtttcaatcgcagctaataacgcctccgaatgtagtgaaggaacacaggtgtataaaaggaggaatctatgggttgtgtcactgtgtcttctgtaaaaagtagttgtatcatctttgttaatttttattaggaacataatgtctcttggcagggacctctcagacatttagatagtagtttagcctcatcctctctatagtagttgtctgtttctgctctaggaattcaacatatttgcttcaatcttctgttttctgaaaaggaaaatctttgcatgaataatacaatggtctccaacattggttcaaaaaaaaaaaaaaaaaaaaaaaaaaaaaaaaaaaaacaaaaaaaaaaaaaaaaatttttttttaccccccccccccggggggggggccgggacccaaattccccaaaaaggggngnnnnnnnnnnnnnnnnnnnnnnnnccnnnnnnnnnncnnnnnnacnnnnnnnnnnnnnnnnnnnnnnnnnnnnnnnnnnnnnnnnnnnnnnnnnncnnnnnnnnnncnnnnnnnnnnncnnnnnnnnncnnnnnnnnnnnnnnnnnncnnnnnnnnnnnnnnnnnnncannnnnnnnnnnnnnnnncccnnnnnnnnnnnnnnnnnnnnnnnnncnnnnnnnncnnnnnnnnnnnnnnnnnnnnnnnnnnnnnnnnnnnannnnnnnnnnnnnnnnncnnnnnnnnnnnnnnnnnnnnnnnannnnnnnnnnnnnnnnnnnnnnnnn

SEQ ID NO: 6608 - DNA, 1130 bp, Zea mays
  misc_feature (1)..(4): n is a, c, g, or t
  misc_feature (17)..(19): n is a, c, g, or t
  misc_feature (23)..(25): n is a, c, g, or t
  misc_feature (30)..(30): n is a, c, g, or t
  misc_feature (32)..(34): n is a, c, g, or t
  misc_feature (47)..(60): n is a, c, g, or t
  misc_feature (63)..(64): n is a, c, g, or t
  misc_feature (1102)..(1106): n is a, c, g, or t
  misc_feature (1108)..(1130): n is a, c, g, or t
  Peptide Sequence Number=SeqID_11087
  Probeset Number=SeqID_21011
nnnncctttcccccctnnngttnnnacttncnnntgtttaacacctnnnnnnnnnnnnnngannacattcaccatgttcttcctcatcctcctttgatcacgtcttttgtgtgttctccctcgccattttattttctttctgacatttccttttaggctttccacatttacataggtttttatttgtgcgggagatggttaactgaatgtaaatggtagacggttcagaggaattggcttcatattgtggtgttcctcaggcgtagatctgaggttgattatttctttctctgtgtgtgtattgtgtggtcatcacgtgtggtttaggcaatgagtgcatcaaggttcataaaatgcgtcacggttggtgatggagctgttggcaaaacatgtttgcttatctcttacaccagcaacacctttcccacggactatgttccgactgtttttgataactttagtgccaatgtggttgttaatggagcgacggtcaatctaggcttgtgggatactgcagggcaggaggactacaacagattaagaccattgagttaccgtggtgcagatgttttcattctagccttctctctgattagtaaggctagttatgaaaatgtttccaagaagtggatccctgagttgaagcactatgctcctggtgtccccatcgtccttgttggtaccaaactagatcttcgggatgacaaacagtttttcatcgaccatcctggtgctgtccctattaccactgctcagggagaggagctcaagaagctaattgaagcgcctgcttacatcgagtgctcttcaaaatcacaagagaacgtgaagggagtctttgatgcagcgatcagagtggtccttcaacctccaaagcagaagaaaaagaagagcaaagcacaaaaggcttgctccattttgtaatagcttatggagaggctaagaagctctttgatgacagtatttggttttttttctttctttttgtttctcttctcttcttttcattgtgattgctgtctctttagttccttaaaacactatctattggtttaattgtctgtttcaactgatagttccctcccaaaaaaaaaaaaaaaannnnngnnnnnnnnnnnnnnnnnnnnnnn

SEQ ID NO: 6609 - DNA, 1288 bp, Zea mays
  misc_feature (8)..(9): n is a, c, g, or t
  misc_feature (33)..(35): n is a, c, g, or t
  misc_feature (754)..(756): n is a, c, g, or t
  misc_feature (759)..(768): n is a, c, g, or t
  misc_feature (770)..(772): n is a, c, g, or t
  misc_feature (774)..(793): n is a, c, g, or t
  misc_feature (795)..(805): n is a, c, g, or t
  misc_feature (808)..(812): n is a, c, g, or t
  misc_feature (816)..(830): n is a, c, g, or t
  misc_feature (832)..(833): n is a, c, g, or t
  misc_feature (837)..(847): n is a, c, g, or t
  misc_feature (849)..(857): n is a, c, g, or t
  misc_feature (859)..(859): n is a, c, g, or t
  misc_feature (861)..(879): n is a, c, g, or t
  misc_feature (881)..(892): n is a, c, g, or t
  misc_feature (896)..(900): n is a, c, g, or t
  misc_feature (902)..(903): n is a, c, g, or t
  misc_feature (906)..(908): n is a, c, g, or t
  misc_feature (913)..(913): n is a, c, g, or t
  misc_feature (915)..(934): n is a, c, g, or t
  misc_feature (936)..(937): n is a, c, g, or t
  misc_feature (940)..(943): n is a, c, g, or t
  misc_feature (948)..(956): n is a, c, g, or t
  misc_feature (959)..(969): n is a, c, g, or t
  misc_feature (972)..(975): n is a, c, g, or t
  misc_feature (978)..(985): n is a, c, g, or t
  misc_feature (989)..(991): n is a, c, g, or t
  misc_feature (993)..(994): n is a, c, g, or t
  misc_feature (996)..(1002): n is a, c, g, or t
  misc_feature (1033)..(1033): n is a, c, g, or t
  misc_feature (1036)..(1037): n is a, c, g, or t
  misc_feature (1122)..(1122): n is a, c, g, or t
  misc_feature (1166)..(1167): n is a, c, g, or t
  misc_feature (1213)..(1215): n is a, c, g, or t
  misc_feature (1288)..(1288): n is a, c, g, or t
  Peptide Sequence Number=SeqID_11088
  Probeset Number=SeqID_21012
cattgggnncctcgaggccggccgggctgacgnnnccatctacacccggattcgcctttttttttcggcacgcggcacggctctccttccttcgccgccgcccgcccggccatggattccccgaggggtcccgcgagcttcgcaacgcaggccaacgccctcctccgcaagaacctctgcgttcagaaacggaacctcaagacaaacatcggcatcactttcttcccaatcctgatttgcgtgcttctcatcgtgctccagaacgtcatcaacagcgagcttgacaagcccaagtacaaatgcggttgcgtctgcctcgagaccagtgccaacggaaggtgcgtaaggaaagagtgtggcattcagtactcgacgctggatcaggtggggagctgtccgattcccagcccgccacagtggccagccctgattcagatcccccgtgctgatttccgggctgcaaggacgttctcccaaccgtttaatgatttgcctgatccattttgccgtgactcctggtcttgccctgcaactgtccttgtcactgggaaggacagagcggttgcagaagctatatcaagagggctgtttcctgtcctttctccgtctttgaatgcaacagatttactggatctcttctccatgatagtcgctggctcagatacacagccatggtacacacagttgctagagcctgcatttttctctggtcgtacattgtatgtgatccagcctgagtgcacacctgtctatnnntcnnnnnnnnnnannnannnnnnnnnnnnnnnnnnnntnnnnnnnnnnngcnnnnntgtnnnnnnnnnnnnnnntnngatnnnnnnnnnnntnnnnnnnnntngnnnnnnnnnnnnnnnnnnntnnnnnnnnnnnnatgnnnnnannatnnntgaanannnnnnnnnnnnnnnnnnnnannatnnnnagtgnnnnnnnnngtnnnnnnnnnnnttnnnncgnnnnnnnnattnnnanngnnnnnnncttattattgcatggttcttattggtttatntcnngttgaaatagtatacctgttggggcatttttgttattttgcttatttgtacttcattgcattctcgatacagtgctttatgcgangccagtactaaaattcacttcgttaattaagcaggaagaagcgnnctcgcagatcacgagatgggcctacgtcagtggcagctgtcatccnnnggtgggctgagcgcaacaagcatttggagtatgaggaatctgaggaggcaaagcgaccaagaaaagcacctgn

SEQ ID NO: 6610 - DNA, 444 bp, Zea mays
  Peptide Sequence Number=SeqID_11089
  Probeset Number=SeqID_21013
atagcaccgatattttgggagggaacaatcgaagcttgccaggagagagaaagtgatctgccgtgggtgtcgatccgagtttgggggacttatcaaccttggggattgactatgggagtgttctggggtgctcgagacttccccatcaccgaggcttgccgcacaacgctggattgctcgccggggcctaggagctaccgcggcgccgcgaaacaccgtcgtcggcccactgctcgacccgactgccagtcaagaacaggtaccacaggatggggcgcatggaggatgctgtgacgagttcgtgagaggtctaggccgtcgtctcccattcaactttgggttgctagaccgttgtgtccttataatgtaattatttatttattttgtacagaactcctattatatagtaaaaatgtgacattcgatccaaaaaaaaaaaaaaaa

SEQ ID NO: 6611 - DNA, 1167 bp, Zea mays
  misc_feature (249)..(249): n is a, c, g, or t
  misc_feature (256)..(256): n is a, c, g, or t
  misc_feature (279)..(279): n is a, c, g, or t
  misc_feature (285)..(285): n is a, c, g, or t
  misc_feature (353)..(353): n is a, c, g, or t
  misc_feature (358)..(358): n is a, c, g, or t
  misc_feature (381)..(381): n is a, c, g, or t
  misc_feature (420)..(420): n is a, c, g, or t
  misc_feature (430)..(430): n is a, c, g, or t
  misc_feature (432)..(432): n is a, c, g, or t
  misc_feature (449)..(450): n is a, c, g, or t
  misc_feature (483)..(483): n is a, c, g, or t
  misc_feature (491)..(491): n is a, c, g, or t
  misc_feature (493)..(493): n is a, c, g, or t
  misc_feature (496)..(497): n is a, c, g, or t
  misc_feature (501)..(501): n is a, c, g, or t
  misc_feature (515)..(515): n is a, c, g, or t
  misc_feature (519)..(519): n is a, c, g, or t
  misc_feature (521)..(521): n is a, c, g, or t
  misc_feature (528)..(528): n is a, c, g, or t
  misc_feature (530)..(531): n is a, c, g, or t
  misc_feature (546)..(546): n is a, c, g, or t
  misc_feature (556)..(557): n is a, c, g, or t
  misc_feature (559)..(559): n is a, c, g, or t
  misc_feature (567)..(567): n is a, c, g, or t
  misc_feature (572)..(573): n is a, c, g, or t
  misc_feature (576)..(576): n is a, c, g, or t
  misc_feature (579)..(579): n is a, c, g, or t
  misc_feature (588)..(589): n is a, c, g, or t
  misc_feature (601)..(601): n is a, c, g, or t
  misc_feature (605)..(605): n is a, c, g, or t
  misc_feature (624)..(624): n is a, c, g, or t
  misc_feature (626)..(626): n is a, c, g, or t
  misc_feature (643)..(644): n is a, c, g, or t
  misc_feature (646)..(648): n is a, c, g, or t
  misc_feature (654)..(654): n is a, c, g, or t
  misc_feature (667)..(667): n is a, c, g, or t
  misc_feature (669)..(670): n is a, c, g, or t
  misc_feature (673)..(674): n is a, c, g, or t
  misc_feature (678)..(678): n is a, c, g, or t
  misc_feature (699)..(699): n is a, c, g, or t
  misc_feature (738)..(738): n is a, c, g, or t
  misc_feature (799)..(799): n is a, c, g, or t
  misc_feature (818)..(818): n is a, c, g, or t
  Probeset Number=SeqID_21014
atccaacataagaggaaaggggcgcttgctttatattctttctaacctgcgatctccgtccatccagccgagaggtcgtgtgcgcgtggatctctgcgtggaagggatgaagattacggcgctcctggtgctgaagccgtcgacctccggagccgggagctcctcgtccggcggcgagtcgggcccggaggcggtggtgctcgcgaacgcgatagacgtcagccacttcggctatttccagcgcagcgncgcccgngagttcatcgtctttgttgcccncaccgncgtcagcgcacccagccaggccagcggaagtccgtccagcacgaagaatacaaggtccactcccacantaaanatgggctttgtgctggtgcattnatggatgatcattatcctgtcggagtgcattttctatantgaatcaagntnttgatgagtaccagaanngattatggggactctggaaatctgggattgcanatgaactnancanntggncttactgacaaaangccntnacaaaantnnaggatccatgtgtanacctgacaannanaagaaaanttcannggnacntgggtaaannaaaaattatacntacntaaaatattggatagatgncntgcgaatacaataaaannannntagatngattgaaaatacntnntannaagngctagcttctcagatgttcantacaagacaggcaatgaaagatcaaacctatgctgcacnaattcatgtaaacttatggttgcttcattcatagtttgcaagaaacacatatacgatcgantactcgtgctaatttcatnactgtaagttaaatcgcccatgaagcgtggacacgcggttgcaaggctcgagctcagtgctgttggtctcagtttgcaaggctatagttttctccaagacctgccgattggactgttttcttgtgagaattcctgctctccaaacagcacatggagtatcattctttagtggttatgaaactgcgtagtgcctgctaacaccatttattgtactatataaggcttgcctcaaactgcagaaattaccaaatattgttaaattctcaaagcttactggcagtggggcgaagacagcacaagctgatagtctcttaaaaaaaaaaaaaaaaaaactcgagggggggcccgg

SEQ ID NO: 6612 - DNA, 547 bp, Zea mays
  misc_feature (10)..(13): n is a, c, g, or t
  misc_feature (21)..(22): n is a, c, g, or t
  misc_feature (440)..(441): n is a, c, g, or t
  misc_feature (479)..(479): n is a, c, g, or t
  misc_feature (500)..(502): n is a, c, g, or t
  misc_feature (507)..(508): n is a, c, g, or t
  misc_feature (524)..(526): n is a, c, g, or t
  misc_feature (539)..(541): n is a, c, g, or t
  Peptide Sequence Number=SeqID_11090
  Probeset Number=SeqID_21015
cgggccgggnnnnaccagagnnagccagcgcccacctcgcagagccgtggcagcctcggcaaaccctgtagcttccatagctggctagcgagctcacacgaatcggtggtctgtctgcagaaccgtggtggctcggggttccattcacgaggtacgtgcgagccagcgtccttgtggaggtagagagaccggcggttcgatcgccatggacagggatctgttccggacggtgaagcaggggacgcggaaccaggccaggctcctgtaccaccgcctggtgtgccgcctgccgcacctcctcgccgtcacgctgctcctcgtcgtggccccgccgctggtgtccacgctgtcgctcgccgcgctctggagcgaggcgcgcgccaacgcggccgtgctggtggccgcgtgcgcgggctgcgccgccgcggcgtatgcctacnncacgtcgcggccgcggcccgtgtacctggtggacctgnccgggtacaagcccgggccgnnncacgnngcgacgcgcgcgcagnnnatccgccagttcnnnatcgcc

SEQ ID NO: 6613 - DNA, 550 bp, Zea mays
  misc_feature (2)..(3): n is a, c, g, or t
  misc_feature (5)..(5): n is a, c, g, or t
  misc_feature (9)..(10): n is a, c, g, or t
  misc_feature (13)..(13): n is a, c, g, or t
  misc_feature (23)..(23): n is a, c, g, or t
  misc_feature (40)..(40): n is a, c, g, or t
  misc_feature (64)..(64): n is a, c, g, or t
  misc_feature (86)..(86): n is a, c, g, or t
  misc_feature (110)..(110): n is a, c, g, or t
  misc_feature (132)..(132): n is a, c, g, or t
  misc_feature (142)..(142): n is a, c, g, or t
  misc_feature (171)..(171): n is a, c, g, or t
  misc_feature (228)..(228): n is a, c, g, or t
  misc_feature (232)..(232): n is a, c, g, or t
  misc_feature (285)..(285): n is a, c, g, or t
  misc_feature (310)..(310): n is a, c, g, or t
  misc_feature (347)..(347): n is a, c, g, or t
  misc_feature (516)..(516): n is a, c, g, or t
  Probeset Number=SeqID_21016
gnnantacnnaanacagcctttncgaaaaaattggagaangatgcagggaggttccgcgggggngaaaatataggtgggccgaagnggccaaaaacaaggggggaaaaanagcaatgggggcccttggaaangaaaaaagangacagttttccattttgcaagaagaattngggggcggagacccttgggggttaaccacggtcccaccaatggaaaatctcgttccngganaccaggttaaagcctaggttgattaccaggggggtcgcattattatattaganggaataaagtttctgcttaggtaanttcggtattcgaattgaaggaaaatttgtactgaaanacagttagccacccagtcccagctctatgctccacaaccatgggatagttgccttcaaatgctaaggaaagaactcttcttcagtccaattattttgtaaggatgattctgtcagtatccaattttaaaaaggaaacggaaaggaatttcatgagaatacatactgctntagaatgtagttttcacatctggttctagagccc

SEQ ID NO: 6614 - DNA, 498 bp, Zea mays
  misc_feature (484)..(487): n is a, c, g, or t
  misc_feature (490)..(498): n is a, c, g, or t
  Peptide Sequence Number=SeqID_11091
  Probeset Number=SeqID_21017
aagcaagcctcacttcttcgtctgaccaccactgatcattagcgtaggcagcaccgggaagcaacctctctgctcaggctagcatggggaaggtgtgctgcagcagcgagtcggaggaggaggcgggcttcagcttcctggggctcctcgtcgcggccgtcatcgccttggtgttcatgctcctctgtaccccgccgaagcggcgctgcgtcaccatctacccgtgctgttgaggctgaggagtctccaaggatctctggttgctgggaggaacgttctgttgttcatgggagggagcaggccaggcaatggtccctggttttcttcggttcagaaaataatttctactactgaattgtaggactcgtcgaaactgtaagccatgtttatcggtatattaggctgtccatctctatctgtaccatgaactgatacatctggggaaaatagatatcatcagacttgttaaaaaaaaaaaaaaaannnnttnnnnnnnnn

SEQ ID NO: 6615 - DNA, 610 bp, Zea mays
  misc_feature (1)..(1): n is a, c, g, or t
  misc_feature (576)..(580): n is a, c, g, or t
  misc_feature (597)..(600): n is a, c, g, or t
  misc_feature (602)..(610): n is a, c, g, or t
  Peptide Sequence Number=SeqID_11092
  Probeset Number=SeqID_21018
ntccatagctggctgcatgcagcggttcaggctcttccttctgagtaccttaaccatggagaagcagaggccatagtgccactttggtccaaggctctagctgatgcagcctctgattatcttgagagcaagaactctgatggattaaagagtgattttgggcatatgcaaggaaagggtggccgagttttaaaacggctggttcgggaatttgctgattctcaccgcaatattccaaatctaacttgagcactgaatggacatttttgtttattaattaaccaatgcgcttccacatgcaggttcaagagttcacgaggcacctttggtctttcctaacggtacctgtattatttgttgtaaattgatgagatatgtatagatgcgcgtattgtcaactgtggtgccctatttaaaatgcctcaccaatttccattactattatttttctgtatttttgccatctgtacagtatatgcccacaattttggccctcaaaaggttaggatagatgccccctttttatcaaattgtacaggatatccatgaaggatcatccgcatatggaatttagannnnngaaggaaagtaaattannnnannnnnnnnn

SEQ ID NO: 6616 - DNA, 575 bp, Zea mays
  misc_feature (1)..(23): n is a, c, g, or t
  misc_feature (25)..(102): n is a, c, g, or t
  misc_feature (106)..(108): n is a, c, g, or t
  misc_feature (114)..(114): n is a, c, g, or t
  misc_feature (116)..(119): n is a, c, g, or t
  misc_feature (132)..(135): n is a, c, g, or t
  misc_feature (142)..(146): n is a, c, g, or t
  misc_feature (150)..(160): n is a, c, g, or t
  Peptide Sequence Number=SeqID_11093
  Probeset Number=SeqID_21019
nnnnnnnnnnnnnnnnnnnnnnncnnnnnnnnnnnnnnnnnnnnnnnnnnnnnnnnnnnnnnnnnnnnnnnnnnnnnnnnnnnnnnnnnnnnnnnnnnnnnngatnnngcgggncnnnnagagggagaggtnnnnagtcggnnnnngtannnnnnnnnnnttatggtggccgtggaggcggtggtggtgatggggcttgttacaagtgcggagaacaaggtcacatggcgagagactgttcccaaggtggtggtggatacggaggaggtggcggcggtaggttcggcggtggaggaggcggaggcggagggagctgctacagctgtggagagtcgggtcatttcgcgagggactgcacaagcggcggtcgctaaataaaaagttaaaagcggcttgtagaagggtaaatcagtcatctcgccgcctgctatctatcctctatcgttatgtattaggactttgtcgttatgatggtacttgtgttgcttaaatatctggtttcatgtttgcatgttttatcattgttcttgctttttactccaagcgttccataaaaaagaaaaaaaaaaaaaaaa

SEQ ID NO: 6617 - DNA, 457 bp, Zea mays
  misc_feature (426)..(442): n is a, c, g, or t
  misc_feature (444)..(457): n is a, c, g, or t
  Peptide Sequence Number=SeqID_11094
  Probeset Number=SeqID_21020
cattcaccagcgagctcgagcttgcttgctcttctctgctgcaagccgctgatcggctctctccgggagggaagcgtcgggatttggctgctctgtcaggctggctcttgacatgttcagatcgaaggtccaggagatgatcctcaggaggaggtccaggtccatgaacggcgccgcgcagcacgccggcagctcgcccacggcttcgtgcgacgccggcggaggtggcaagggtgctgctcgcgcgccgtcgttcgccgcgccgaggctgctgcactcgtcgtcgctccccgccggcggccgcgccgcggtcgtcatcgggagccccgcgcgggacccagaggcgttgtccgcctacgccatgagcccgacctccgtgctggacgcgtcggcggccttcgggtcgcccggcccggccgtggacgnnnnnnnnnnnnnnnnncnnnnnnnnnnnnnn

SEQ ID NO: 6618 - DNA, 459 bp, Zea mays
  misc_feature (458)..(459): n is a, c, g, or t
  Peptide Sequence Number=SeqID_11095
  Probeset Number=SeqID_21021
agacaaaggtgttcttctggcttgacaacaaagaaatcctccccccccccccattctccttcgctcaaatcaaaagatgagtagcattggcactggatacgatctctcagtaacgaccttctcccccgatggccgtgttttccagatcgagtacgccgccaaagccgtcgacaacagtggaactgttgttggaatcaagtgcaaggacgggattgtcatgggtgtagagaaacttattgcttcgaagatgatgctaccaggatctaaccgcagaatccattctgttcatcgtcatgctggcatggccgttgctgggcttgcagctgacggcaggcaaattgttgcaagggccaaatccgaagccagaagttatgagagtgtttatggggacgctgtaccagtgaaggaactttcagagcgtgttgcaagctacgtgcatttgtgtaccctttattggnn

SEQ ID NO: 6619 - DNA, 1109 bp, Zea mays
  misc_feature (1109)..(1109): n is a, c, g, or t
  Peptide Sequence Number=SeqID_11096
  Probeset Number=SeqID_21022
cccgatcagatagctccatggatagcctcggaaacctccccacgtgcaattgagtctgtgagataccctctcccgatcaaataactctatggatagcctcggaatcctccccacgtgcaattgagtctacgacataccctctcccaatcagataactccatggatagccttcgaatcctccccacgtgcaattgattctgcgagataccctcacataggccgctcttcatagtattcactatcgagctttcaaccaaaatgatgtgggtctcgttcctttcgatacacggtggcagacgcaccaccctcatggccgatatagactcggaagactacaagtccctatgagtatacaatagtctttgagtttataatggtgcgtgcaagaaccaagtggttggagtcattcaagccttactaaacactaggcctaaacctagagcaagtgcaataaggaattggtctaactagccaaagtacttcataaagcacctaaactaattactgagttattctttgagcacttgaatgtctagagataatagagatgagcctcaactcacttgatatttcattagctctcatacaccttaaatgactagccaagggatatatatacagccccaattccaaaagtggtcgttggaggatgcacaagcattctacgcaggcacgattcatgttcggtgcattcacatcaactagacattgggattctagtcgttgccgatagatggagagttgttatccagcatgacatctcgtatgccatcgaacatgtctagtgcattatggccttctccaactcatgctagaactccctttgacttctttattcgatgtgagatccactatgtcaccagatgtactgtgcttgggattgggtgcacaccagcttgtctaatgccttggttgtaattccttgttcttacacaattcttatgttgtccgttgcatcactagacatgttcggtgcctagaatctgatgcacacttgactatcaagtggccctagttgcaaacttacacttccctattcttacatagtgtcgatgttgtccagtgctatcaagcaacatgcatttgtcttcataaaaaaaaaaaaaaan

SEQ ID NO: 6620 - DNA, 584 bp, Zea mays
  misc_feature (1)..(17): n is a, c, g, or t
  misc_feature (19)..(39): n is a, c, g, or t
  misc_feature (42)..(51): n is a, c, g, or t
  misc_feature (53)..(60): n is a, c, g, or t
  misc_feature (62)..(62): n is a, c, g, or t
  misc_feature (64)..(70): n is a, c, g, or t
  misc_feature (72)..(75): n is a, c, g, or t
  misc_feature (77)..(85): n is a, c, g, or t
  misc_feature (88)..(90): n is a, c, g, or t
  misc_feature (93)..(95): n is a, c, g, or t
  misc_feature (103)..(105): n is a, c, g, or t
  misc_feature (109)..(111): n is a, c, g, or t
  misc_feature (114)..(123): n is a, c, g, or t
  misc_feature (125)..(129): n is a, c, g, or t
  misc_feature (133)..(138): n is a, c, g, or t
  misc_feature (140)..(146): n is a, c, g, or t
  misc_feature (567)..(575): n is a, c, g, or t
  misc_feature (583)..(584): n is a, c, g, or t
  Probeset Number=SeqID_21023
nnnnnnnnnnnnnnnnncnnnnnnnnnnnnnnnnnnnnnggnnnnnnnnnnannnnnnnnantnnnnnnncnnnntnnnnnnnnngannnttnnnaaagttgnnntccnnnttnnnnnnnnnncnnnnnctcnnnnnnannnnnnntcaaatgggtctcctttcccttatgaagcagtggaaggacttgaggtttttcccccgcgacagcccgatgcggcccatagaccttcagtacaccagggaaaaccgataatcaaattgggcttcccgtctttaggcaaaaccaatggcaagtaataatggcttttccctacattgccaagaatttcagagccctttcggaaatttgagatgttaagttggggggttcttgttactttatgtcttatatttatatgctttttttagatgttgcatgatttcatgtaaaactcgtttggataagattaaagtaaagtgttcttgtttatggatcccaaaccctttttttgtcataaataaaagtttggggtgggttttaaaaaaaaaaaaaaaaaaaaaaaaaaaaaaaagagattatcgatannnnnnnnntcgagggnn

SEQ ID NO: 6621 - DNA, 644 bp, Zea mays
  misc_feature (1)..(1): n is a, c, g, or t
  misc_feature (629)..(634): n is a, c, g, or t
  Peptide Sequence Number=SeqID_11097
  Probeset Number=SeqID_21024
ncccaaacccaaagcactagtagctatcccactcaagcacacgctcacgatggcatccagagctgctaccttcgtcgccctgagcctcctcctctccgccgtcgccacgcacggctgcggaccctattgccagccgccagtcgtcgtgccgacaccgcccgttgtcgttccgccgccgtaccatggaggaggagcgcacggccacggcgggcagtgctctatcgacgccctaaagctgagggtgtgcgccaacgttctcggcggcctgctcggcctcaaggtcggcgttccggcgcacgacgagtgctgcccgctgctccaggggttggtcgaccttgacgccgccgtctgcctgtgcaccgccgtcagggccaacgtcctcggcatccacctcaacgtgcctgtggacatcagcctcctcctcaaccactgcggcaagacgtgcccgtccgagttcacttgcccagcccattaacggacgcctactgctcacgggcgccgaataaaatttgctttcgatccgtacgtcgttgttattttcgtgtccacatttgaatccttgtaaccagtactactctttttgtaacaatcatcagccatccaaaaaaaaaaaaaaaaaagcttatcgnnnnnntcgacctggg

SEQ ID NO: 6622 - DNA, 760 bp, Zea mays
  misc_feature (1)..(3): n is a, c, g, or t
  misc_feature (5)..(57): n is a, c, g, or t
  misc_feature (59)..(61): n is a, c, g, or t
  misc_feature (64)..(66): n is a, c, g, or t
  misc_feature (69)..(69): n is a, c, g, or t
  misc_feature (71)..(73): n is a, c, g, or t
  misc_feature (80)..(100): n is a, c, g, or t
  misc_feature (760)..(760): n is a, c, g, or t
  Peptide Sequence Number=SeqID_11098
  Probeset Number=SeqID_21025
nnncnnnnnnnnnnnnnnnnnnnnnnnnnnnnnnnnnnnnnnnnnnnnnnnnnnnnnannnggnnncgngnnncccctcnnnnnnnnnnnnnnnnnnnnnttttttttttttttttttaaagatattattacgaggattatatatttttgacagaattacgaggaagacaaagagcagataaataaaaataaagcctaaacacaaactttatctagtctaaacaggggcagacacaacaactcaaaaccgaaagccggaggctcatgtaaattagtaccaaccgcttgccgcaaaagaacgaaccaagttcagccgagagtcaaaacccggtaattttggcttccctgatgaatccgctcttaaagataatggtccatccgagaacagattgctgaggacttcaaaagcacctgcccccaagaacacaacaagggagaggccacgcacacccgcatcaaccagatggagcatttatttgcccagacgcgacatgtactgtgtcgctccaagcactgaactactaaaaacgggtttgcgacgaaagctgtcctgaaatccttgagattcgtaaaacctgcaccatctgaaaagaaatcgctaccaacacatcaaaagaccaatgttagtgctgggatgcgaaaatcctaacgaatggatccaccgagaagccgtgtaaccagagaacaacttgactacaccagctccacgacataagcatgtcttcgagaaccgaagaacatatcagaaacaataaccgtn

SEQ ID NO: 6623 - DNA, 1582 bp, Zea mays
  misc_feature (1)..(1): n is a, c, g, or t
  misc_feature (10)..(13): n is a, c, g, or t
  misc_feature (16)..(18): n is a, c, g, or t
  misc_feature (1571)..(1582): n is a, c, g, or t
  Probeset Number=SeqID_21026
ntcccccctnnnnttnnnactttattgtgtttaacacatcctaatcgaaaaaccgagtccgccgccgccgccgcccacctttcttcttctcccaaaccctagtctccggcggcgatggcccccaagcgcgccgcgaagaaggcggcacccccgcctccgcctccgcctccggctgcctcctctgaggagagcgaatcccgctcgcgctccgaggagtcggagggcgaagacgccgagtcccctccccccgcccccaccccggcccccaagagcacgccggcgcccccgcaggagggagaggaggaggaggaggagtctgaagaggaagacgaggaggagactgatgaggagcccgcccacgcggccccagccgccgccgccacccccaagaacaagcctccgccgccgcaacagggaggtgactccgattcttcttccgacgaggaggaggaggagcccaccaaggcggcccctccctccgccctgaagaaacaacccccgccgccgccgccgccgcggcagagcgaggaatcggacgcctccgacgaggaagaagaggagggtgagtccgaggaggaggcgccgccgccgccgccgccgaagcttgctccaaagcaggcgccagagggccggaagccccaggcagcggcggagaccaagaagccggccgctttcaaccgcatctggtccaccgacgacgaggtgcgtatcctcgaggcccttgctgctcaccaaaagcagcacggcacgctgccgcagccggacgccctcgtggacgcccttgcaggaaagctcgacaaccgtgcctacggcagcaaggagctccaggggaaggtcttggccctgaggcgtcgttacctccttctcagcaagaagggcgagcccccgagcaaggagcatgaccgccgggtgctggaactttccaagatggtctgggaaggcggtgacacggccgcagctgcccctgcgaaggcggcaaatggccaggagccaaaggggttcgaggagatgtgcgagctgtatccgtacctggcggagcaggtgagggagctggatgcggcgaacccgggcatcttcaagaggcagttcgggatgatggacgacgacaaggcgcgcgcgatggacgagaagatcaagaggcagagggtggcgcagatgaaggtggagctgcgccgccacgacctggccagggaggtgaccaaggcgatcatcgacctggtcgactgatcggagcgtcatgggcttacaagttagtacaaactgaaactgtatctgtgatcacctgaagttggtgcgatgaaatgcggcgttttggtggagcaagaatgtttctgaaactatgatctagagtctgcggattgggctggctcgatgcatcagacatgtggtggaactgcaaattgtgcctcctgtttgtaagaatgcttttctcgtgtggccagagcaaatgctagaaatagcaaattaggggtgtctttatagtgtaagcatgatgagacatgtgctggaactgcaaattgtgctggtggattaagaatattttccgaagtgcgcaaaaaaaaaaaaaaaannnnnnnnnnnn

SEQ ID NO: 6624 - DNA, 524 bp, Zea mays
  misc_feature (183)..(183): n is a, c, g, or t
  misc_feature (188)..(188): n is a, c, g, or t
  misc_feature (223)..(223): n is a, c, g, or t
  misc_feature (235)..(235): n is a, c, g, or t
  misc_feature (243)..(243): n is a, c, g, or t
  misc_feature (249)..(250): n is a, c, g, or t
  misc_feature (254)..(254): n is a, c, g, or t
  misc_feature (256)..(256): n is a, c, g, or t
  misc_feature (263)..(265): n is a, c, g, or t
  misc_feature (267)..(268): n is a, c, g, or t
  misc_feature (270)..(270): n is a, c, g, or t
  misc_feature (283)..(283): n is a, c, g, or t
  misc_feature (285)..(285): n is a, c, g, or t
  misc_feature (287)..(287): n is a, c, g, or t
  misc_feature (297)..(298): n is a, c, g, or t
  misc_feature (303)..(304): n is a, c, g, or t
  misc_feature (307)..(308): n is a, c, g, or t
  misc_feature (315)..(315): n is a, c, g, or t
  misc_feature (324)..(326): n is a, c, g, or t
  misc_feature (329)..(331): n is a, c, g, or t
  misc_feature (333)..(334): n is a, c, g, or t
  misc_feature (336)..(336): n is a, c, g, or t
  misc_feature (340)..(340): n is a, c, g, or t
  misc_feature (342)..(342): n is a, c, g, or t
  misc_feature (345)..(347): n is a, c, g, or t
  misc_feature (349)..(349): n is a, c, g, or t
  misc_feature (352)..(352): n is a, c, g, or t
  misc_feature (354)..(354): n is a, c, g, or t
  misc_feature (356)..(356): n is a, c, g, or t
  misc_feature (359)..(359): n is a, c, g, or t
  misc_feature (361)..(364): n is a, c, g, or t
  misc_feature (370)..(371): n is a, c, g, or t
  misc_feature (373)..(374): n is a, c, g, or t
  misc_feature (380)..(380): n is a, c, g, or t
  misc_feature (386)..(386): n is a, c, g, or t
  misc_feature (388)..(388): n is a, c, g, or t
  misc_feature (396)..(397): n is a, c, g, or t
  misc_feature (403)..(403): n is a, c, g, or t
  misc_feature (408)..(408): n is a, c, g, or t
  misc_feature (415)..(415): n is a, c, g, or t
  misc_feature (417)..(417): n is a, c, g, or t
  misc_feature (420)..(421): n is a, c, g, or t
  misc_feature (428)..(428): n is a, c, g, or t
  misc_feature (435)..(437): n is a, c, g, or t
  misc_feature (440)..(447): n is a, c, g, or t
  misc_feature (449)..(450): n is a, c, g, or t
  misc_feature (455)..(455): n is a, c, g, or t
  misc_feature (457)..(457): n is a, c, g, or t
  misc_feature (459)..(460): n is a, c, g, or t
  misc_feature (464)..(465): n is a, c, g, or t
  misc_feature (467)..(467): n is a, c, g, or t
  misc_feature (469)..(473): n is a, c, g, or t
  misc_feature (477)..(477): n is a, c, g, or t
  misc_feature (479)..(479): n is a, c, g, or t
  misc_feature (483)..(486): n is a, c, g, or t
  misc_feature (488)..(489): n is a, c, g, or t
  misc_feature (493)..(493): n is a, c, g, or t
  misc_feature (496)..(496): n is a, c, g, or t
  misc_feature (499)..(499): n is a, c, g, or t
  misc_feature (508)..(508): n is a, c, g, or t
  misc_feature (510)..(510): n is a, c, g, or t
  misc_feature (514)..(514): n is a, c, g, or t
  misc_feature (518)..(518): n is a, c, g, or t
  misc_feature (521)..(521): n is a, c, g, or t
  Peptide Sequence Number=SeqID_11099
  Probeset Number=SeqID_21027
atccccgccacaacggtcgccgccagcggacattagcaacctaaccctcgcccaaccgacacacttcaacacactgtacacccgaccggaccctcccaccacccatgggcctgtgcgtgtcgctcggcgggacggccggcgccgtaggccgcgcggccggcggcgcccagctgcacgtgccgnacggngctggggctcctgccccgggatgacacgtcgaagnagacctttaggngcaacaanaaagannagcngncgaatannncnncncaccttttcattncncnccccacaccnncttcnngcnnttatttntaataagannnaannncnntnggancnaannnanacncngnaangnnnntcggtnngnngactcngcgtgnanagaattgnnctcagncaccnacaattngncgnncaccatnacccctnnngannnnnnnntnncctcntngnncccnncncnnnnnccancncgannnnanncccngcnagncggtccttngnaatnaatntcnccc

SEQ ID NO: 6625 - DNA, 511 bp, Zea mays
  Probeset Number=SeqID_21028
aataaatactccgtactgtcaaatctccagtccgtataagcttggcgtggcgctcatagatacgcacaacgttagcgcggcgccgctccacagtcgctcacacggcatgaggttgccggaaaccatgttcagagccgtcgcacggagctgccggagccgcagaagccgctggtggacgacgacgggcggccgctccgcacgggcacgctgtggacggccagcgcgcacatcatcacggcggtgatcggctccggcgtgctgtcgctcgcgtggggcgtggcccagcttgggtgggcgggcggcccagccgcgatggtgctcttcgccgccgtcatctactacacgtccacgctgctcgccgagtgctaccgctgcggcgaccccacgttcggcccgcgcaaccgcacctacatcgacgccgtccgcgccaccctcggcgactccaaggagaggctctgcggcgccatccagctctccaacctcttcggcattggcatcggcgtctccattg

SEQ ID NO: 6626 - DNA, 580 bp, Zea mays
  misc_feature (1)..(2): n is a, c, g, or t
  misc_feature (4)..(7): n is a, c, g, or t
  misc_feature (9)..(12): n is a, c, g, or t
  misc_feature (15)..(20): n is a, c, g, or t
  misc_feature (22)..(40): n is a, c, g, or t
  misc_feature (45)..(48): n is a, c, g, or t
  misc_feature (54)..(56): n is a, c, g, or t
  misc_feature (60)..(62): n is a, c, g, or t
  misc_feature (65)..(67): n is a, c, g, or t
  misc_feature (70)..(70): n is a, c, g, or t
  misc_feature (72)..(77): n is a, c, g, or t
  misc_feature (81)..(85): n is a, c, g, or t
  Peptide Sequence Number=SeqID_11100
  Probeset Number=SeqID_21029
nnannnntnnnnggnnnnnncnnnnnnnnnnnnnnnnnnnagttnnnncccagnnnggannnccnnnggngnnnnnnttcnnnnnggcaatcctttttggaggaattgcccggtcagttcctccagtacatgcgccctggggggatcaagccacagcgggctccggggcttgtttcagcgcccgttttcccccctcagcagtgcccagaagaaaacgtgcccgagctgatccatttccctcaactggggattccgcaagcgtcccgtcccggggtagccttacttttgttcatacggttttgggttagctttttttttgccccagttggtaaatatccatgctgtagaatttagttccagcccaaatagatagtaaacccctgctttcctttgggttaagctagaggatgtaaattcgtgctgcagattgccaagtattcaggttgtcgggaaacgtcattattatcccctgctttcatattaagtactatcttggtaatagtggatttggagcttgttctccgcaaaaaaaaaaaaaaaaaaaaaaaaaaaaaaaaaaaaaagaaaaaaaaaaaaaaaa

SEQ ID NO: 6627 - DNA, 846 bp, Zea mays
  misc_feature (1)..(1): n is a, c, g, or t
  misc_feature (650)..(846): n is a, c, g, or t
  Probeset Number=SeqID_21030
ntctcatcttaaatctcatctttgtttatttctctctttgtttctgtttggagttgagataaacaagaatggccacatcagtaatccagcactcctctttcgccggacaaacggctttgaagccctccaacgatctcctccgcaaagtcggagcttccaacggaggtggtcgcgtcgtcatgcgccgtaccgtcaagtctactcctcagagcatctggtacggaccagaccgtcccaagtacttaggaccattctcagagaacacaccatcgtaccttaccggtgaataccccggagactacggttgggacaccgccggtctctcagccgacccagaaaccttcgcgaagaaccgtgagctggaggtaatccacagcagatgggcaatgctcggcgctttaggctgcacattcccagagattctctccaaaaacggagtcaaattcggtgaagccgtgtggttcaaggcagggtctcagatcttctcagaaggagggcttgattacctcggaaaccctaacttgatccacgcgcaaagcatattagctatctgggcttctcaagttgtgctgatgggtttgatcgaagggtacagaattggaggtggacctctgggagaaggcttgacccgctttaccctggaggggggnnnnnnnnnnnnnnnnnnnnnnnnnnnnnnnnnnnnnnnnnnnnnnnnnnnnnnnnnnnnnnnnnnnnnnnnnnnnnnnnnnnnnnnnnnnnnnnnnnnnnnnnnnnnnnnnnnnnnnnnnnnnnnnnnnnnnnnnnnnnnnnnnnnnnnnnnnnnnnnnnnnnnnnnnnnnnnnnnnnnnnnnnnnnnnnnnnnnn

SEQ ID NO: 6628 - DNA, 545 bp, Zea mays
  Peptide Sequence Number=SeqID_11101
  Probeset Number=SeqID_21031
atctcatcttaactttgcctgtttctctctttcatttgagatcttgcttggagataaagatataaaagaatggctacttcagctatcccacactcctcttttgctggccaaacggccctcaaggcctccaacgatctcctccgcaaaggcggagcttccaacggtggccgcgaggccatgcgtcgtaccgccaagtctactcctcagagcatctggcacggaccagaccggcccaagaacttagggccattctcagagaacacaccgtcgtacctaaccggggaataccccggagactacggctgggacaccgccggtctctccggcgaccctgaaacctttgccaagaaccgagagctcgaagttatccacagcagatgggcaatgctaggcgctttgggctgcaccttcccagagattctctccaaaaacggagtcaaattcggcgaaagccgtgtggctcaaggcaggatctcagatcttctcagaaggaggacttgactacctcggaaaccctaacttgatccacgcgcaaagcattttag

SEQ ID NO: 6629 - DNA, 898 bp, Zea mays
  misc_feature (775)..(775): n is a, c, g, or t
  misc_feature (840)..(844): n is a, c, g, or t
  misc_feature (847)..(856): n is a, c, g, or t
  misc_feature (859)..(898): n is a, c, g, or t
  Peptide Sequence Number=SeqID_11102
  Probeset Number=SeqID_21032
ttttttttttttttttaccggcgtacactccggtaagccgaagttgcctcggcaaagcagtcggattacagtgcaactcagggcaaagcgtacctgccacgtggcccgcacgctgcccgctaacggctcgttggatggctgggaaaatcgacttaagccaaaagaaaattcagatgccctgttaaataggcggcccttacaaactccttttattcattttgggtccggacgtgcactttattcgtccatgcaccatatataggtcatgcatccgcccaagtgacgttgtactcgccgacctcctccccggtgatgcccagcgcgtcccagaccgcctgggaggcgtcgacgacgttgttgcggcacggcggctggaaggcgtgctcgcggtcgcacccgctcacggtgtcgcactcgtcgacgaccttggcgagcacggacctgccgttggcccggatccgtatgctcttgccgcagcgggagcccccgctgtaccaccccgtggacagcgccgccacgcgctccgagctgcggtggaacgcgccgtcgcactcggacgggtccccgccgtcgccgcccgcgtcgaagtcgttcagagtcatgaccgcccgggtggacgaggagaccggcggcgagcacctgtacgtcgggtacgcctgcccggccttgcagcagtcctggcacgcgtggctctgggtcggccggagcgtgccgctcggctcgcagccagcgccggcggcggtgagcagcaggtggctcgccgctagcgcgagcnagaaggcggccggtggacctcagcatctttgtgaagttacggctgagcggcgggtgtgagagtcnnnnnccnnnnnnnnnnccnnnnnnnnnnnnnnnnnnnnnnnnnnnnnnnnnnnnnnnn

SEQ ID NO: 6630 - DNA, 618 bp, Zea mays
  misc_feature (1)..(4): n is a, c, g, or t
  misc_feature (8)..(10): n is a, c, g, or t
  misc_feature (16)..(18): n is a, c, g, or t
  misc_feature (25)..(43): n is a, c, g, or t
  misc_feature (545)..(548): n is a, c, g, or t
  misc_feature (550)..(555): n is a, c, g, or t
  misc_feature (559)..(561): n is a, c, g, or t
  misc_feature (563)..(573): n is a, c, g, or t
  misc_feature (582)..(584): n is a, c, g, or t
  misc_feature (586)..(595): n is a, c, g, or t
  misc_feature (597)..(601): n is a, c, g, or t
  misc_feature (603)..(618): n is a, c, g, or t
  Peptide Sequence Number=SeqID_11103
  Probeset Number=SeqID_21033
nnnnttgnnnaccggnnnccccctnnnnnnnnnnnnnnnnnnncccccctccccggtttattgttcaatttgatcacagctggccatggatgtgaagcagcatttgcagctgcagttctgggtgataatgccctcatggagaaagcatggcaagacacaggaatgctggctgaggccgttttacatgctcaagcccatggtcgtccatcgttaaggagctcagtcataacatggaacaagatgctgcaaaaggagctggatcacatgccaaccgtaaaaaccgatgctgcagcagcattcttggcttctcttgaggacccgaagctcactagtttgggagaaactgagaaaaagccaccaattgaaatacttcctcctggaatgccgcctctatctgcacctcccattattattaaaaaggctgctgcaaaacctgggcttcctaatgccgcacagaccccaggtgctcccatgaatcaaggcaccccaatggctcaaggtactcccatgaatcaaagcaccccaatggcccaaggtactcctgnnnntnnnnnngccnnnannnnnnnnnnncctcctgcnnngnnnnnnnnnncnnnnnannnnnnnnnnnnnnnn

SEQ ID NO: 6631 - DNA, 517 bp, Zea mays
  Peptide Sequence Number=SeqID_11104
  Probeset Number=SeqID_21034
tttttttttttttttttttttttttttttttttttttttttttttttttataataacagatgtgtatagagataaatgtcacaataacatcagagtacttattatatagcagaagtcttacaaaatgaaagataaatataaaacaaactaaaatccatccttggcaccaataagtcaactgggagacgccacctagattaagtcaaactcctcgttgtgtggctcttcttgaaccacctattcttctcctaggaatcgcatgtcgtagaggcccaataccgacatcatgcggcacggcggcggtttcccagctccgtcgagaaattgtggttgatttgggcctccccacggttaggaatccccacacacacctcccccgctccttgtgcttcaccatcggtctgattcgctaggccaaatcaaaggatggacatggtttcactcacggcgacatactgcttttctttgtccatggtggcgcgccgattggcggattggatctcgcacgactggcaac

SEQ ID NO: 6632 - DNA, 903 bp, Zea mays
  misc_feature (1)..(37): n is a, c, g, or t
  misc_feature (41)..(46): n is a, c, g, or t
  misc_feature (53)..(53): n is a, c, g, or t
  misc_feature (63)..(63): n is a, c, g, or t
  misc_feature (68)..(73): n is a, c, g, or t
  misc_feature (83)..(84): n is a, c, g, or t
  misc_feature (90)..(94): n is a, c, g, or t
  misc_feature (96)..(97): n is a, c, g, or t
  misc_feature (99)..(101): n is a, c, g, or t
  misc_feature (117)..(118): n is a, c, g, or t
  misc_feature (157)..(160): n is a, c, g, or t
  misc_feature (170)..(172): n is a, c, g, or t
  misc_feature (174)..(174): n is a, c, g, or t
  misc_feature (177)..(181): n is a, c, g, or t
  misc_feature (183)..(184): n is a, c, g, or t
  misc_feature (203)..(203): n is a, c, g, or t
  misc_feature (205)..(205): n is a, c, g, or t
  misc_feature (231)..(233): n is a, c, g, or t
  misc_feature (235)..(235): n is a, c, g, or t
  misc_feature (255)..(256): n is a, c, g, or t
  Probeset Number=SeqID_21035
nnnnnnnnnnnnnnnnnnnnnnnnnnnnnnnnnnnnnttcnnnnnnaaaaaanaaaaaaaaanaattnnnnnngggggcgtcnngctctnnnnnanntnnnagcaggaacaaacgannctgatctagggctcgcggccatggggaggttgaaggttnnnnaagggggcgnnncnggnnnnngnncggaaaacggtttcctcgncnggaaggggtgggagttcaacgccgannncngcacgccggaggagcgcgcnnagggggaagtcatgtggaggcttgaaggtcagtgaaggtggcgggccgtcgcttcggaaggagtaccacttcctcggttgaaagccttgtgacaaaaaccctcaacaaggcacagagggagagcattatggagctgagaaaccaaggcaaggggacacaaggcaccaggtccaggggcagcaaggtgtggaccctcaaagcccccagcatctaggctgttcctggaatatgagctgcgcgacgtgttcggttgtcagaggtattagtttttttttatgtatcccaagttagttctaccttgctcgtgtcagggggcagagcaagatgtcctgaaggttcttttgccagactgttggtcgttgcatggtatttggtggtctggaggtggttttcgaatcaatggatccttgttcctctgtatcttactaatttcagtttggaacttttgtgtgtgtcgtgggccatgtgtatcttactgttggtgaacaaggttgccagtctgcatcaaatgttaactatgttatattctttatgtggcaatgtctgttcaagtagaggagggttcatcttttaatgaatacaaactgttgtattttatcttggaatgtgaggggtttgaatgcccgtgctaagcgctcgagccgaat

SEQ ID NO: 6633 - DNA, 733 bp, Zea mays
  misc_feature (6)..(7): n is a, c, g, or t
  misc_feature (17)..(26): n is a, c, g, or t
  misc_feature (678)..(678): n is a, c, g, or t
  misc_feature (690)..(692): n is a, c, g, or t
  misc_feature (695)..(695): n is a, c, g, or t
  misc_feature (700)..(706): n is a, c, g, or t
  misc_feature (708)..(710): n is a, c, g, or t
  misc_feature (733)..(733): n is a, c, g, or t
  Peptide Sequence Number=SeqID_11105
  Probeset Number=SeqID_21036
ctcgannccggccgggnnnnnnnnnntctcctccccaacccgttttccactgccaccaggcaaaccagccgcgccgccgccggcgatgaccaccgcgcggctcgtctcaacctcccccacccgcctaccctccacgtcggcctccccgattcccagaacctcgctgtgtgttgtcggtcgtgcccctgctttctccgctagggcgctcggcttctcgcttcgtctcaagccgtcgcctgccatggccgccgccggcgtcggcggcaacggcccccctaccgcgcatggagactcaataggatcttctaggattggagaggttaagagggtgaccaaagagacaaatgtgcacgtgaagatcaaccttgatggcactggtgtcgccgagtgtagcacagggataccgttcttggatcacatgctcgatgccttatttgtgcaaaagggtaggctcgtagttaacgtgaaggcatcttgatcaaatccataaattggactgatggaggcatcttcttctgaaaggaaaaaaaaatctttttgtataatgcagttaagaagatgtctactgctcttaggtcaaggagatgtttaagagagccagtagtaccatcacttttttttttttgagaaagtgatgtactgtacatggatggaaaactctaccacttttctagttcnacgtgttgcttnnngtnactannnnnnntnnnctatcaagcaattacttggcaan

SEQ ID NO: 6634 - DNA, 1164 bp, Zea mays
  misc_feature (587)..(587): n is a, c, g, or t
  misc_feature (601)..(1164): n is a, c, g, or t
  Peptide Sequence Number=SeqID_11106
  Probeset Number=SeqID_21037
tttttttttctcaatgaatcggcagttttttccatcccaagcaagcacgaggtgaagggctgcagcagtataatgatagtgtgtgtacataccagctgaccaggaacacctacagctcaagataatcgaatgtattgcgctggccacaagtgaagtaatatttccagtacacggatagatcaccgcactctcctttagttgaggtgtaggcacgaggggggtgtatcaatgtggacgagcctcgaccgacacaaggttaagcagatctcttgtaggggtccttgccatggctgccaccattgtggcgatggaattcgccagcagtcatgccaggggaccacggctccaagggcgacatctccttcgccggacgcttcacggccagcgccatcgcagcatgcttcgcagagatatgtaccatcccgctcgacacggccaaggtcacgctccagctgcagaacaacgtcgtcgccgccgcccgcctccggggaccccgccccagcgcttcccaagtaccgcggcctgctcggaactgccgccaccatcgctagggaggaaggggcgtcgcaccgctctgcaagggcatngtcccgggcctccnnnnnnnnnnnnnnnnnnnnnnnnnnnnnnnnnnnnnnnnnnnnnnnnnnnnnnnnnnnnnnnnnnnnnnnnnnnnnnnnnnnnnnnnnnnnnnnnnnnnnnnnnnnnnnnnnnnnnnnnnnnnnnnnnnnnnnnnnnnnnnnnnnnnnnnnnnnnnnnnnnnnnnnnnnnnnnnnnnnnnnnnnnnnnnnnnnnnnnnnnnnnnnnnnnnnnnnnnnnnnnnnnnnnnnnnnnnnnnnnnnnnnnnnnnnnnnnnnnnnnnnnnnnnnnnnnnnnnnnnnnnnnnnnnnnnnnnnnnnnnnnnnnnnnnnnnnnnnnnnnnnnnnnnnnnnnnnnnnnnnnnnnnnnnnnnnnnnnnnnnnnnnnnnnnnnnnnnnnnnnnnnnnnnnnnnnnnnnnnnnnnnnnnnnnnnnnnnnnnnnnnnnnnnnnnnnnnnnnnnnnnnnnnnnnnnnnnnnnnnnnnnnnnnnnnnnnnnnnnnnnnnnnnnnnnnnnnnnnnnnnnnnnnnnnnnnnnnnnnnnnnnnnnnnnnnnnnnnnnnnnnnnnnnnnnnnnnnnnnnnnnn

SEQ ID NO: 6635 - DNA, 829 bp, Zea mays
  misc_feature (1)..(33): n is a, c, g, or t
  misc_feature (760)..(760): n is a, c, g, or t
  misc_feature (762)..(773): n is a, c, g, or t
  misc_feature (775)..(786): n is a, c, g, or t
  misc_feature (788)..(790): n is a, c, g, or t
  misc_feature (793)..(820): n is a, c, g, or t
  misc_feature (824)..(829): n is a, c, g, or t
  Peptide Sequence Number=SeqID_11107
  Probeset Number=SeqID_21038
nnnnnnnnnnnnnnnnnnnnnnnnnnnnnnnnnttttttttttttttttgcattgtgaacctagcacatatatgtatgtaaactgataagagtttcatacattttcagctattgtttcactgtcaacagaaacaatcattacctgctaccgtcgtctcaatggatttcgtagctacaaacctaccgtcgtctcaatggagaagccaagccggaggagagttgtaagatggaacccgctccgggaagtagagttcgacgtgggaaggcagcggcccttccggcggcgaccacctgccgatgtcgctacaggggtactgcctctcattgactctgccgaacatcatttcgtcgtcgtagaagctccgatcatccaagaagaagatgccgtccttcaacccagggtactcacgtacctcgtaggacctggagcatcctcgccccacgaacagcatccggcccccccatgcattttccccgaaccagttccaggtcctaaggtactcatcagcctcctcgtcgtcatcgcctggctcgatgatatcgatagggtccatgtagaacaccttgaacgacgacgtcggcgcgtgatcatgggcagcgagcctgacgaccatatccagtgacgcgcgggattccacaaggtagcaagcgcggacgaccgcactaccaggatattcccacatgcaatcacggaagaagctccattccgggaagggcattaacttccacggcactagcaggatattcccactatcatcantnnnnnnnnnnnngnnnnnnnnnnnngnnngcnnnnnnnnnnnnnnnnnnnnnnnnnnnncggnnnnnn

SEQ ID NO: 6636 - DNA, 621 bp, Zea mays
  misc_feature (4)..(4): n is a, c, g, or t
  misc_feature (9)..(9): n is a, c, g, or t
  misc_feature (41)..(41): n is a, c, g, or t
  misc_feature (557)..(557): n is a, c, g, or t
  misc_feature (572)..(572): n is a, c, g, or t
  misc_feature (577)..(578): n is a, c, g, or t
  misc_feature (581)..(581): n is a, c, g, or t
  misc_feature (583)..(583): n is a, c, g, or t
  misc_feature (586)..(586): n is a, c, g, or t
  misc_feature (597)..(598): n is a, c, g, or t
  misc_feature (601)..(621): n is a, c, g, or t
  Peptide Sequence Number=SeqID_11108
  Probeset Number=SeqID_21039
tgcngggantagagagagagagagagagaagagagaggtcnctttttttcccccccccccccttatagggctccacccgcaggccgccgtgtgggcatagcgggtcgggccacgtctgtaataaagcatgatgtaatgacacgctataacccccgtgaggaaatattctggggataaactagggtaactgagggtctaattggtccttggcagggcccggggcggtcccttagttacctataaatacccctgtattgtggccattggtcgggggacagaaaaaaaacactggtgccccaacgctttggtggttagagggcatcaaactggtttccattctctcaccatcgggaattgggtggtcccccgggattaaacaaggttcccaacatttgggcgccccaccatttcgtgcgtacgaacaaaagcttcccccgcggatggccccccaagaagagcggatttttgaagggcccccgcctttcccgtcgacaaaaacaaggggaaagggaggcgcctccctaagcccaagaaaaaaaagggcaaggggtcccccnttggctggaacaaanttccnnttntnggngggcctttccnnaannnnnnnnnnnnnnnnnnnnn

SEQ ID NO: 6637 - DNA, 636 bp, Zea mays
  misc_feature (601)..(636): n is a, c, g, or t
  Probeset Number=SeqID_21040
agagacacaaacagaacaagttcccggaagaaaggaagagagtgagaatggcagcgacgaccctctccatcacgagctcaaaccgctcctcttcttcttctcccactctcgcttcagttcatcacttcccttctcgatccacctccatcgaatttcccttacgcttcggtgcttcttctcccacgctcacccaccgtgcaacccacccccgtcccatcgccgccgtcgaagctccggagaaaatcgagaagatcggatccgaaatctcatccctcactctcgaagaagcacgcatcctcgtcgactacctccaggacaagttcggcgtctctcccctctccttagctcccgccgcagcggctgtagctgctccgggagacggtggcggtgcggcggctgcggtggaggagcagacagagttcgatgtggtgatcaacgaagtacccagcagctcgcgtattgcggtgattaaagcggtgagggcgttgactagcttggcgttgaaggaagcgaaggagctcatcgaaggattgccgaagaagttcagggcaggtgcgactaaggacgaagctgaagaaccaagaagcagcttgaagagctnnnnnnnnnnnnnnnnnnnnnnnnnnnnnnnnnnnn

SEQ ID NO: 6638 - DNA, 516 bp, Zea mays
  misc_feature (7)..(7): n is a, c, g, or t
  misc_feature (15)..(15): n is a, c, g, or t
  misc_feature (17)..(17): n is a, c, g, or t
  misc_feature (20)..(20): n is a, c, g, or t
  misc_feature (28)..(28): n is a, c, g, or t
  misc_feature (35)..(36): n is a, c, g, or t
  misc_feature (68)..(68): n is a, c, g, or t
  misc_feature (138)..(138): n is a, c, g, or t
  misc_feature (218)..(218): n is a, c, g, or t
  misc_feature (225)..(225): n is a, c, g, or t
  misc_feature (262)..(262): n is a, c, g, or t
  misc_feature (300)..(300): n is a, c, g, or t
  misc_feature (303)..(303): n is a, c, g, or t
  misc_feature (356)..(356): n is a, c, g, or t
  misc_feature (359)..(359): n is a, c, g, or t
  misc_feature (368)..(368): n is a, c, g, or t
  misc_feature (386)..(386): n is a, c, g, or t
  misc_feature (457)..(457): n is a, c, g, or t
  misc_feature (464)..(465): n is a, c, g, or t
  misc_feature (478)..(479): n is a, c, g, or t
  misc_feature (493)..(494): n is a, c, g, or t
  misc_feature (503)..(503): n is a, c, g, or t
  misc_feature (510)..(510): n is a, c, g, or t
  Peptide Sequence Number=SeqID_11109
  Probeset Number=SeqID_21041
ctggtgncgaattcngnacnaggagagntcaaagnnccccccccccccccccccctcgtcgctgcgtntctctcccgcaaccttcgattttcgtttattcgcatccatcggagagagaaaacaatcaataagcgaccntgttgggggaccaagatcttctcaccggtgatgagcttctgtctgactctttcccttaccaggagattggagaatggaancctctgngaagtaaaagggaaagggggttactgtgggagcctgnagatggttaacattgggggccaatccatctggctgaanaanggggtgaggggatgaagggggtggatgactctggctccaaaagggtggttggncantggtccganaccctttccgaactttcnggagcaacccaacttattgacaaagaaagggatttccttcgcctacatttaaagaaaaaacatttaaagcnttttgannccccccagctccnnccgaaaaaaaaatnnaaggttggntttcaanaaaggg

SEQ ID NO: 6639 - DNA, 618 bp, Zea mays
  misc_feature (618)..(618): n is a, c, g, or t
  Probeset Number=SeqID_21042
aggagcttcagccttattcagagtggggagaaggagaaacaaggttagcaaaaaatggattatatgaatggaccagggagacaccatctgtttgtaccaggaccagtgaacataccggaacaggtaatccgggcgatgaaccgaaacaacgaggattaccgctcaccagcaatcccggcacttacgaaaacactgttggaggacgtgaagaagatattcaagacaacatctgggacaccatttatgtttcccacgaccgggactggtgcttgggagagtgccttgaccaacacgctatctcctggagacaggatcgtctcgtttctgatcggacagtttagcctgctttggattgaccagcagaagaggctaaatttcaatgttgatgtggttgagaatgaatggggacaaggtgctaatctccaagtctggcctcaaagctctcacaagatcaaaatcataccatcaaagccatttgcattgtccacaatgagaccgccactggagtcaccaacgacatctctgctgtccgaaccatcctcgatcactacaagcacccggctttgcttcttgtgggacgtgtctcgtccatatgtgcgcttgatttccgatggacgn

SEQ ID NO: 6640 - DNA, 762 bp, Zea mays
  misc_feature (1)..(12): n is a, c, g, or t
  misc_feature (53)..(53): n is a, c, g, or t
  misc_feature (304)..(304): n is a, c, g, or t
  misc_feature (336)..(336): n is a, c, g, or t
  misc_feature (370)..(370): n is a, c, g, or t
  misc_feature (385)..(385): n is a, c, g, or t
  misc_feature (399)..(399): n is a, c, g, or t
  misc_feature (437)..(437): n is a, c, g, or t
  misc_feature (478)..(481): n is a, c, g, or t
  misc_feature (487)..(487): n is a, c, g, or t
  misc_feature (497)..(497): n is a, c, g, or t
  misc_feature (499)..(499): n is a, c, g, or t
  misc_feature (503)..(503): n is a, c, g, or t
  misc_feature (505)..(520): n is a, c, g, or t
  misc_feature (522)..(532): n is a, c, g, or t
  misc_feature (534)..(534): n is a, c, g, or t
  misc_feature (537)..(561): n is a, c, g, or t
  misc_feature (563)..(574): n is a, c, g, or t
  misc_feature (577)..(579): n is a, c, g, or t
  misc_feature (585)..(596): n is a, c, g, or t
  misc_feature (600)..(607): n is a, c, g, or t
  misc_feature (609)..(637): n is a, c, g, or t
  misc_feature (643)..(645): n is a, c, g, or t
  misc_feature (647)..(649): n is a, c, g, or t
  misc_feature (652)..(653): n is a, c, g, or t
  misc_feature (655)..(657): n is a, c, g, or t
  misc_feature (666)..(674): n is a, c, g, or t
  misc_feature (677)..(683): n is a, c, g, or t
  misc_feature (687)..(695): n is a, c, g, or t
  misc_feature (697)..(702): n is a, c, g, or t
  misc_feature (705)..(705): n is a, c, g, or t
  misc_feature (708)..(708): n is a, c, g, or t
  misc_feature (710)..(719): n is a, c, g, or t
  misc_feature (721)..(734): n is a, c, g, or t
  misc_feature (736)..(751): n is a, c, g, or t
  misc_feature (753)..(762): n is a, c, g, or t
  Peptide Sequence Number=SeqID_11110
  Probeset Number=SeqID_21043
nnnnnnnnnnnngagctcactagtccccccccccccccccccacccgcggcgncgcgaggtgggaaaactggtggagggactgggtgattgctagtgccgaggccaacgaccgcctcgtcctgccgagcgatgggccgacactcgaccgcaagctatgggaagaccaagtcgtccttgggcgccagtgttcctgcccatattggataggatcaagggcttgggccatgggcggcctgacgttgatgcacgtgggtcaacgacctcctgaagcgccggaccgcaccgcctgcagaggaaacaacncctggtgttcttggttcaccggcccgaacganttcgaccggattcagcgcgggccggggatcgacnggtcctaaagatganctggcggcctgggnggggagggattactggggaaactttttgtccccgagtncctgatcctcccccagggcatccatggggctctgcgacgannnnccaaanctgagggacngngatntnnnnnnnnnnnnnnnncnnnnnnnnnnnanaannnnnnnnnnnnnnnnnnnnnnnnngnnnnnnnnnnnnccnnncccccnnnnnnnnnnnntttnnnnnnnnannnnnnnnnnnnnnnnnnnnnnnnnnnnnccccgnnngnnnccnncnnnccccccccnnnnnnnnnccnnnnnnncccnnnnnnnnngnnnnnnaanggngnnnnnnnnnncnnnnnnnnnnnnnncnnnnnnnnnnnnnnnngnnnnnnnnnn

SEQ ID NO: 6641 - DNA, 547 bp, Zea mays
  misc_feature (88)..(88): n is a, c, g, or t
  misc_feature (156)..(156): n is a, c, g, or t
  misc_feature (167)..(167): n is a, c, g, or t
  misc_feature (174)..(174): n is a, c, g, or t
  misc_feature (323)..(323): n is a, c, g, or t
  misc_feature (375)..(375): n is a, c, g, or t
  misc_feature (443)..(443): n is a, c, g, or t
  misc_feature (539)..(539): n is a, c, g, or t
  Probeset Number=SeqID_21044
gagagagagaggagctcactaagtcccccccccccccccccccaggatcccccaggttatcggaacctcggaaagcagtttatcaggncccgttccccgttccccgtcctccatcctcagtcccagggtctccttctagttctgtcgttctctggncaagggatttnccgtgcnaggacgtacggtccccgaggatgcagactcgcaaccctgaccagccttccccgggacccacgcgagcggggacaccgaggcagacgacgtctacaaggggggaagcggacggcaaggtatactggttggagcctttgggtacgttcagnatttcaattttgggtttggtcctggtttccaaggggagtttggcattcaagnccgaatattggctggcaaacggatgatgggctggggcctggcaatgcctgccggtgggactggtaacntaggggctaaaatgggtcgagtggttcccaagctaactcccagggaatggccccagtttggaatggcagaaaaccggaaaccccatgtggtccccnagacttca

SEQ ID NO: 6642 - DNA, 655 bp, Zea mays
  Peptide Sequence Number=SeqID_11111
  Probeset Number=SeqID_21045
aaaatcaaatcagaaacagattgctctggaaattaaaagtttatctttcacgtaagactcgaagaaaatggcaagcactgtaatgactacactgcctcagttcaatggtcttcgagccagcaagatctctgcagctccagttcaaggcctggcaactgttgtgcccatgagacgcaagggaaatggagctttgggtgcaaaatgtgacttcattggttcatcaacaaatctgataatggtaacgtcgacgactctgatgctggtcgctgggagattcggactagcaccatcagccaataggaaggcgacagctggacttaagctagaggcacgtgactcgggtctacaaacgggtgacccagccggggtcactctcgccgaccctttgccttgtggtaccggtggtcccatccatcggcgtcggagttggccttggccccaaaaacattggggctatttaaacatgttctttggtatccgtcgacttggagatttttaaaacaaaattcccaagaacctggggggagatctagcccatggttataatggttggatccccatatggatcccctttttaaaccattaaaaagaccccctttttccggtaaaaaaaaaaaaaaaaagttttttctttccccccccacccccagggggg

SEQ ID NO: 6643 - DNA, 637 bp, Zea mays
  Peptide Sequence Number=SeqID_11112
  Probeset Number=SeqID_21046
atttacagagataaccctaacttggtcactctctctctcacacactccagttcaaacaatggctcctccacagaagctctttctcgccgccattgtctccgccgtcattgtagctgccaccaccggacacggacctaatagtactgctgaagatattgtacattcctcctgcgtgcacgcgagctatccatctctatgcgtccgtacgctctctacctactccggtccaaccatcacgaaccaacgcgagctagctcaagccgccgtcaagataagcctctcccacgctcaagcagctgcgaagaaactcgcggctgtgagagaaaccgtggggaagaaacgggtgaaagcggcggttgtggactgcgtggagatgattggagactccgtggctgatctgagccgtacgttaggcgttttaaagcatctccacgtctcgggcggttcggcgaacgagtttcaggtggcagatgagcaatgcgcagacgtgggctagtgccgcattgacggatgatgacacgtgtctagatgcgttttaaggggtcgaggccaaggttaacccggacgtgaagcagtggatgacaaaagtggcgagggttacgagcaacgcgctttacatgatcaaccagctagatga

SEQ ID NO: 6644 - DNA, 700 bp, Zea mays
  misc_feature (638)..(638): n is a, c, g, or t
  Peptide Sequence Number=SeqID_11113
  Probeset Number=SeqID_21047
tacagagataactgtgtctcgtctctttccagtttaaaccgagagaaacaatggctcctccacagaagctctttctcgccgccattttcgccgctgtcattgtagccaccaccaccggagatggatctaatagtgctggagaagatattgtacattcctcttgcatgcacgctagctatccatcgctatgcatccgtacgctgtctacttactccggtccgaccatcacaaaccgtcgtgagctagctcaagccgccgttaaaataagtctctcccacgctaaagccgctgcgaaaaaactcgcggcggtgcgagaaaccgtggggaagaaacggcagaaaagcggcggttgtggactgcgtggagatgattggagactcggttgatgagctgagccgcacgctaggcgctttgaagcctctccgcgatctcgggggtggtccggtgaaacgagtttcaggttggcagatgagcaacgcgcagaacgtgggcgagagtgcggcgttggactgaggaccacacgttgtcctcgatggggttttcaagggcaatcgaccggtgaaaccccgggccggggggggggggagtgcatgacaaaaggtggcagagggttacgagcaacgcgtctttacatgatncaccagctagcatgataaacgtggcaagccccacgtcgaacggtccttggaaggttataata

SEQ ID NO: 6645 - DNA, 560 bp, Zea mays
  misc_feature (339)..(339): n is a, c, g, or t
  misc_feature (362)..(362): n is a, c, g, or t
  misc_feature (379)..(380): n is a, c, g, or t
  misc_feature (385)..(386): n is a, c, g, or t
  misc_feature (405)..(405): n is a, c, g, or t
  misc_feature (408)..(409): n is a, c, g, or t
  misc_feature (422)..(423): n is a, c, g, or t
  misc_feature (426)..(426): n is a, c, g, or t
  misc_feature (434)..(434): n is a, c, g, or t
  misc_feature (439)..(439): n is a, c, g, or t
  misc_feature (443)..(443): n is a, c, g, or t
  misc_feature (445)..(445): n is a, c, g, or t
  misc_feature (450)..(450): n is a, c, g, or t
  misc_feature (452)..(453): n is a, c, g, or t
  misc_feature (457)..(458): n is a, c, g, or t
  misc_feature (462)..(463): n is a, c, g, or t
  misc_feature (466)..(466): n is a, c, g, or t
  misc_feature (473)..(474): n is a, c, g, or t
  misc_feature (476)..(476): n is a, c, g, or t
  misc_feature (479)..(479): n is a, c, g, or t
  misc_feature (481)..(481): n is a, c, g, or t
  misc_feature (494)..(494): n is a, c, g, or t
  misc_feature (500)..(500): n is a, c, g, or t
  misc_feature (502)..(502): n is a, c, g, or t
  misc_feature (507)..(507): n is a, c, g, or t
  misc_feature (513)..(513): n is a, c, g, or t
  misc_feature (516)..(516): n is a, c, g, or t
  misc_feature (523)..(523): n is a, c, g, or t
  misc_feature (526)..(526): n is a, c, g, or t
  misc_feature (529)..(529): n is a, c, g, or t
  misc_feature (534)..(534): n is a, c, g, or t
  misc_feature (540)..(540): n is a, c, g, or t
  misc_feature (547)..(547): n is a, c, g, or t
  misc_feature (560)..(560): n is a, c, g, or t
  Peptide Sequence Number=SeqID_11114
  Probeset Number=SeqID_21048
tcccccccccccccccgacgccgaccgcactccgctccgcatccatcatcccagcgcgatggctgggaggaccgtgcccgcctccctcccctccttctccctcacgcccgactccctcgctgcccctttatcctggatctcgtcatggacgctaccacgaccaacggttcgacggagcaggcgtcgcacgctgcgccccgggacggagcccgtccccacccgacaccggccacctccaccccgagcccctccgagaactggttattatgtgatcagaactaataatggttatatgttgagagagagatacaaactatgtcaatgtttcctgttgtctgnatttgcaaccttgtgcgctatgntcagcatttctcatgtnnttggnntagttattgcagcttgcanctnnaaaaaattaaccnnttntggcccangaaanaatncnccctnanncatnncgtnntcngcgagcnncnttncntccctcctttttncccccntncgttnccactnaanatatttnttnttnttaanccactnactcttntttcccactcccn

SEQ ID NO: 6646 - DNA, 877 bp, Zea mays
  misc_feature (1)..(22): n is a, c, g, or t
  misc_feature (24)..(34): n is a, c, g, or t
  misc_feature (36)..(41): n is a, c, g, or t
  misc_feature (43)..(71): n is a, c, g, or t
  misc_feature (73)..(73): n is a, c, g, or t
  misc_feature (75)..(77): n is a, c, g, or t
  misc_feature (79)..(84): n is a, c, g, or t
  misc_feature (88)..(90): n is a, c, g, or t
  misc_feature (96)..(104): n is a, c, g, or t
  misc_feature (113)..(120): n is a, c, g, or t
  misc_feature (126)..(126): n is a, c, g, or t
  misc_feature (130)..(140): n is a, c, g, or t
  misc_feature (142)..(151): n is a, c, g, or t
  misc_feature (153)..(174): n is a, c, g, or t
  misc_feature (183)..(197): n is a, c, g, or t
  misc_feature (200)..(216): n is a, c, g, or t
  misc_feature (218)..(229): n is a, c, g, or t
  misc_feature (232)..(267): n is a, c, g, or t
  misc_feature (270)..(291): n is a, c, g, or t
  misc_feature (293)..(298): n is a, c, g, or t
  misc_feature (300)..(300): n is a, c, g, or t
  Probeset Number=SeqID_21049
nnnnnnnnnnnnnnnnnnnnnntnnnnnnnnnnncnnnnnntnnnnnnnnnnnnnnnnnnnnnnnnnnnnngntnnnannnnnnttannngggggnnnnnnnnnaaaaagggnnnnnnnnccccgngggnnnnnnnnnnntnnnnnnnnnntnnnnnnnnnnnnnnnnnnnnnnatttttttnnnnnnnnnnnnnnnaannnnnnnnnnnnnnnnncnnnnnnnnnnnnccnnnnnnnnnnnnnnnnnnnnnnnnnnnnnnnnnnnngannnnnnnnnnnnnnnnnnnnnngnnnnnntnccccccctaaaagggaaacccccagatgaagttgttaaatccaagcaatcaactgtttccccaaaaacaaaaaagtgggtggaaaacatggggccccctaaaagtagttttcccgctgaacttaagcgggagctgtcaaagctaaatacggtgttaaagctcccagataatgtattttttttggccacccagtcccccgaatattttttaaataaccatttagttgggggggagccccggagcatactccatgcgttcaacataaccttgggtgggggggctgttttttttttgaaatccccggagttggatcatggagaatcccttccccttgtttcagagggattgaattatgaatccaatggggctccctcataggcaggcttataggtttgtagtatcgttagggcgggcatttttctttaccaatataagcccccttttgtttatataccccatgggcatatataagttttggggattttatatgtttttgttgcaaaaaaaaaaaaaaaaaaaaaaaaaaaaaaaaaaaaaaaaaaaaaaaaaaaaaaaaaaaaactcgagggggggcccg

SEQ ID NO: 6647 - DNA, 618 bp, Zea mays
  misc_feature (601)..(618): n is a, c, g, or t
  Peptide Sequence Number=SeqID_11115
  Probeset Number=SeqID_21050
ataaaactagggtttagtatataaaggcttctctcttcaggagcagaagctccgatctcatcgagacagtgaagaaactcttagttgttcaagatggggcgtatgcattcgagaggaaagggtatctccgcatctgctttgccgtacaagcgttcacctccgacatggctcaagaccaccgccctcgatgttgatgagtcgatttgcaagtttgcaaagaagggtttgacaccatctcagattggtgtcattctccgtgactctcacggtatccctcaggtcaagagcgttaccggaaacaagatcttgcgtattctcaaagcacacggtcttgctcctgagattcctgaggatctgtaccatttgatcaagaaagcagttgctatccgcaagcacttggagaggaacaggaaagacaaggattccaagttcaggttgattcttgtcgagagcaggatccaccgccttgctcgctattacaagaagaccaagaagcttcctccagtctggaagtacgagtctactactgcctccacgcttggtgcctagaagagcatggagtgcatggatggacgggggaggttggtgcccgtttctattnnnnnnnnnnnnnnnnnn

SEQ ID NO: 6648 - DNA, 461 bp, Zea mays
  misc_feature (447)..(447): n is a, c, g, or t
  Peptide Sequence Number=SeqID_11116
  Probeset Number=SeqID_21051
ctttagcgcagtcgcagcccgaccaaaccgaagaagaaccttctcagagtaaagcaatctccgttaacttacgtcagcatggggaggctccactctaaaggtaagggaatctcagcatctgctttgccgtacaagcgctcacccccgagctggctcaagacaacctcccaggatgttgatgagtccatttgcaagtttgcgaagaagggtttgacaccatctcagattggtgtcattcttcgtgactctcacggtatccctcaggtgaagagtgttaccggaaacaagattttgagaatcttgaaagctcatggtcttgctcctgagatccctgaggatctctaccacctgattaagaaagcagtggctatccgcaagcaccttgagaggaacaggaaagacaaggactccaagttcaggttgattcttgtcgagagcagaatccancgtcttgctcgtta

SEQ ID NO: 6649 - DNA, 670 bp, Zea mays
  Peptide Sequence Number=SeqID_11117
  Probeset Number=SeqID_21052
aagtaagttaagagaaaagaagaagaagaagtagtaatggcttcctctatgctctcctccgctgctgtggttacctcaccggctcaagccaccatggtcgctccattcaccggcttgaagtcttcctctgcattcccagtcacccgcaaggccaacaatgacattacctccatcgttagcaacggaggaagagttagctgcatgaaggtgtggccaccagttggaaagaagaagtttgagaccctctcttaccttcctgaccttaccgaagttgaattgggtaaggaagtcgactaccttctccgcaacaagtggattccttgtgttgaattcgagttggagcacgggtttgtgtaccgtgagcacggaaccacccccggatactacgatgggacgttacgggacaatgtggaagcttccccttgttcggaggcactgactctgcttcaagggtttgaagggaagcccaagagtgcaaaaacggagtacccctaccgcctttcttcaaggatcctccggattccaaaaacaaccggtcaagcccaggggcatcatgtttcttcgccctaacaaacaacccaggcgtcacccggtggtttaatttccccgttgggaagaaaactttcataataatatctactcttaccccattctccaatttcacctttgg

SEQ ID NO: 6650 - DNA, 670 bp, Zea mays
  misc_feature (99)..(99): n is a, c, g, or t
  misc_feature (103)..(104): n is a, c, g, or t
  misc_feature (260)..(260): n is a, c, g, or t
  misc_feature (270)..(270): n is a, c, g, or t
  misc_feature (277)..(277): n is a, c, g, or t
  misc_feature (348)..(348): n is a, c, g, or t
  misc_feature (390)..(390): n is a, c, g, or t
  misc_feature (460)..(460): n is a, c, g, or t
  misc_feature (480)..(480): n is a, c, g, or t
  Peptide Sequence Number=SeqID_11118
  Probeset Number=SeqID_21053
aagtaagttaagagaaaagaagaagaagaagtagtaatggcttcctctatgctctcctccgcagctgtggttacgtcaccggctcaagccaccatggtncgcnntccattcaccggcttgaagtcttcctctgcattcccagtcacccgcaaggccaacaatgacattacctccatcgttagcaacggaggaagagttagctgcatgaaggtgtggccaccagttggaaagaagaagtttgagaccctctcttacccttncctgactttnaccgagngtgaattgggtaaggaagtcgactaccttctccggcacacagtggattcctttgtgtggaattcgagttgnagcacgggttgtgtttaccgtgagcacggaagcaccccccgnatactacgatggacgttactggaacaatgggggaagcttccccttggtccgaatggccctgcccctgctnccagggttgaagggaagccnaagagggcaaaacggggtaccctaaaccggctttcctcgggattcatcggatccgacaacaaccccgcaaagcccggtggatcaagttctttcccctacaacccacaaggtttcccgggtgtttaattcgcgttgaagaactttcaaaaaaaaatctacccctttccatttccattggccggttcctttg

SEQ ID NO: 6651 - DNA, 659 bp, Zea mays
  misc_feature (512)..(512): n is a, c, g, or t
  misc_feature (597)..(597): n is a, c, g, or t
  misc_feature (601)..(659): n is a, c, g, or t
  Peptide Sequence Number=SeqID_11119
  Probeset Number=SeqID_21054
aaaccaatcacttcactctctctaatcaaaaagctatctcactcttctaacattcacaacatttaatctcagccgttcgatctttctccgaccatgccgatcagaaacatcgccgttggacgtcccgatgaggccacccgtcccgacgccttaaaggcggcgttggctgagtttatttcaactatgatctttgtcttcgccggctcaggctcaggaatggctttcaacaagctcactgaaaatggagccaccactcccgccggtctcgtagctgcctcactggcacacgctttcggactctttgtcgctgtctcagttggcgccaacatctccggtggacacgttaaccctgccgtcaccttcggcgctttcgtcggtggtaacatcactctcctccgtggtatactctactggattgctcagctacttggctcagtcgttgcttgtctcctcctcaagttcgccaccggcggcttggttgtgccggcttttggcctctccgcccggggtgnagtgtcgaacgctttggttttcgagatcgtgatgacctttcggctagtttacacagtctacgccacccgccgtgatcccaagaancgannnnnnnnnnnnnnnnnnnnnnnnnnnnnnnnnnnnnnnnnnnnnnnnnnnnnnnnnnn

SEQ ID NO: 6652 - DNA, 871 bp, Zea mays
  misc_feature (1)..(17): n is a, c, g, or t
  misc_feature (19)..(65): n is a, c, g, or t
  misc_feature (67)..(192): n is a, c, g, or t
  misc_feature (194)..(204): n is a, c, g, or t
  misc_feature (206)..(225): n is a, c, g, or t
  misc_feature (231)..(235): n is a, c, g, or t
  misc_feature (237)..(242): n is a, c, g, or t
  misc_feature (253)..(259): n is a, c, g, or t
  misc_feature (263)..(265): n is a, c, g, or t
  misc_feature (269)..(284): n is a, c, g, or t
  misc_feature (288)..(293): n is a, c, g, or t
  misc_feature (295)..(314): n is a, c, g, or t
  misc_feature (318)..(322): n is a, c, g, or t
  misc_feature (324)..(326): n is a, c, g, or t
  misc_feature (329)..(332): n is a, c, g, or t
  misc_feature (334)..(338): n is a, c, g, or t
  misc_feature (342)..(351): n is a, c, g, or t
  misc_feature (354)..(363): n is a, c, g, or t
  misc_feature (367)..(376): n is a, c, g, or t
  misc_feature (380)..(380): n is a, c, g, or t
  misc_feature (382)..(384): n is a, c, g, or t
  misc_feature (387)..(388): n is a, c, g, or t
  misc_feature (390)..(396): n is a, c, g, or t
  Peptide Sequence Number=SeqID_11120
  Probeset Number=SeqID_21055
nnnnnnnnnnnnnnnnntnnnnnnnnnnnnnnnnnnnnnnnnnnnnnnnnnnnnnnnnnnnnnnncnnnnnnnnnnnnnnnnnnnnnnnnnnnnnnnnnnnnnnnnnnnnnnnnnnnnnnnnnnnnnnnnnnnnnnnnnnnnnnnnnnnnnnnnnnnnnnnnnnnnnnnnnnnnnnnnnnnnnnnnnnnnnncnnnnnnnnnnntnnnnnnnnnnnnnnnnnnnntggggnnnnncnnnnnnccggggggggnnnnnnngggnnncaannnnnnnnnnnnnnnnggcnnnnnncnnnnnnnnnnnnnnnnnnnnctgnnnnngnnnccnnnncnnnnnctgnnnnnnnnnnggnnnnnnnnnntccnnnnnnnnnngccncnnnttnncnnnnnnngggaaatttttttttgccctcccaggtttccgggataattaaagaaccggggggggggggggtgttttttttttccctccaccccgggggtagttgggggctttcaggtttttgctgcccaacccaaaaaccgtcgtttgggagggcccctttttcccccccttttgtttttggccgtttttttttggggccccttcaggccagggttttccaacggtttacccctttggaatcgtttttgttacaacctcgttcatccgggggggccctttttttttccatccccagggaggtacttgtttttttccccggtaccaaatgttattttgggggtgggaaaaaaaaggaactcccttgccctttttttgtcaaaaaaaaaaaaaaaaaaaaaaaaaaaaaaaaaaaaaaaaaaaaaaaaaaaaaaaaaaaaaaaaaaaagaaaaaaaaaaaaaaaaaaaactcgagggggggcccg

SEQ ID NO: 6653 - DNA, 710 bp, Zea mays
  misc_feature (414)..(424): n is a, c, g, or t
  misc_feature (426)..(432): n is a, c, g, or t
  misc_feature (438)..(447): n is a, c, g, or t
  misc_feature (451)..(451): n is a, c, g, or t
  misc_feature (461)..(474): n is a, c, g, or t
  misc_feature (476)..(482): n is a, c, g, or t
  misc_feature (492)..(501): n is a, c, g, or t
  misc_feature (503)..(539): n is a, c, g, or t
  misc_feature (543)..(559): n is a, c, g, or t
  misc_feature (564)..(588): n is a, c, g, or t
  misc_feature (590)..(596): n is a, c, g, or t
  misc_feature (598)..(598): n is a, c, g, or t
  misc_feature (601)..(603): n is a, c, g, or t
  misc_feature (606)..(614): n is a, c, g, or t
  misc_feature (621)..(627): n is a, c, g, or t
  misc_feature (629)..(656): n is a, c, g, or t
  misc_feature (658)..(669): n is a, c, g, or t
  misc_feature (672)..(693): n is a, c, g, or t
  misc_feature (696)..(710): n is a, c, g, or t
  Probeset Number=SeqID_21056
agttcagttagaccccaccgagccaatggtggctccggcgacgctgtccctccgcccctgcgcgaccctcgcgccgtccagggctgcgctcccccgcgcccgcgcccacgcccacgccgggtccgcccccgctagtcgtccagccctctccgtctcctgcccgccgacgcgcttcgagagcctccgccgcgccgccaccgccgtatccgaccggcaaggctccgcggagccttccgagaaagaggggaagtcgcggacctactacttcctggtggcgaacgccaagttcatgctggacgacgaagaacacttccaggagcagctccaggagaagctgcggctctacgaggagcgcagcaaggagcaggacttctggcttgtgatccgagcccaaatttctagacaggttccccnnnnnnnnnnngnnnnnnnagcgcnnnnnnnnnncgcncgtctccacnnnnnnnnnnnnnntnnnnnnnatgaaactannnnnnnnnncnnnnnnnnnnnnnnnnnnnnnnnnnnnnnnnnnnnnnaaannnnnnnnnnnnnnnnnacccnnnnnnnnnnnnnnnnnnnnnnnnncnnnnnnnanagnnncannnnnnnnnccccaannnnnnnannnnnnnnnnnnnnnnnnnnnnnnnnnncnnnnnnnnnnnnccnnnnnnnnnnnnnnnnnnnnnnaannnnnnnnnnnnnnn

SEQ ID NO: 6654 - DNA, 856 bp, Zea mays
  misc_feature (1)..(3): n is a, c, g, or t
  misc_feature (5)..(12): n is a, c, g, or t
  misc_feature (14)..(18): n is a, c, g, or t
  misc_feature (20)..(24): n is a, c, g, or t
  misc_feature (29)..(42): n is a, c, g, or t
  misc_feature (48)..(50): n is a, c, g, or t
  misc_feature (56)..(61): n is a, c, g, or t
  misc_feature (64)..(78): n is a, c, g, or t
  misc_feature (91)..(91): n is a, c, g, or t
  misc_feature (93)..(98): n is a, c, g, or t
  misc_feature (162)..(165): n is a, c, g, or t
  misc_feature (167)..(174): n is a, c, g, or t
  misc_feature (846)..(856): n is a, c, g, or t
  Peptide Sequence Number=SeqID_11121
  Probeset Number=SeqID_21057
nnntnnnnnnnntnnnnntnnnnnctgcnnnnnnnnnnnnnnatgcgnnntgagannnnnncgnnnnnnnnnnnnnnnccgagtttgaganannnnnnggttttgaccggcgatatgcggccatcgccttccgctggcgccgagatcgcgacaaggccgatnnnntnnnnnnnngtgggacgtttgcgctcctcgaccggagctccgcgagcaattggacggacacagcatagctgaagcagcagaccgatgcggtatctcagaattggctgtaaaggtgaacattcaccgtgggcttaaggcactggctgccttgattgcccgggaagccggaacatgaaaacagacgatctggttgccatgctgagtgcgagcgtcgagccggtcggtcgtcgattggtcgtacggacgatttgcattgccgtagtggccgcgtcagtgttcgcgctcggcatcatcctaatcgggccgggcatccggccggatctgacgacagctcgcgccttcacgttcctgttgctgaagcttgtgttcacagttgtgattgtcggcgtggcgttgatctatctcacaaggttggcgcgcccaggcggagagcaaaaaaccccttcgattatggctgcaatgccgttcatcgtgattgtgttgcttgccgcaatcagcctcggattcgcgccgcgctcgcattgggatgcaatgattgtcggggatcaatggcttgaatgccttttttctattccgatcaccgctatcagtggctggtgcgattggcatcggcgagtggtttgaggcggcgacggtttcattcttcttcgcactggctttggcgctcgagggggggcccgnnnnnnnnnnn

SEQ ID NO: 6655 - DNA, 869 bp, Zea mays
  misc_feature (1)..(64): n is a, c, g, or t
  misc_feature (67)..(112): n is a, c, g, or t
  misc_feature (117)..(145): n is a, c, g, or t
  misc_feature (147)..(147): n is a, c, g, or t
  misc_feature (152)..(195): n is a, c, g, or t
  misc_feature (197)..(205): n is a, c, g, or t
  misc_feature (207)..(215): n is a, c, g, or t
  misc_feature (217)..(229): n is a, c, g, or t
  misc_feature (232)..(236): n is a, c, g, or t
  misc_feature (238)..(238): n is a, c, g, or t
  misc_feature (240)..(241): n is a, c, g, or t
  misc_feature (245)..(251): n is a, c, g, or t
  misc_feature (253)..(265): n is a, c, g, or t
  misc_feature (269)..(286): n is a, c, g, or t
  misc_feature (301)..(311): n is a, c, g, or t
  misc_feature (313)..(340): n is a, c, g, or t
  misc_feature (342)..(351): n is a, c, g, or t
  misc_feature (353)..(356): n is a, c, g, or t
  misc_feature (360)..(360): n is a, c, g, or t
  misc_feature (644)..(647): n is a, c, g, or t
  misc_feature (720)..(724): n is a, c, g, or t
  misc_feature (727)..(732): n is a, c, g, or t
  misc_feature (820)..(823): n is a, c, g, or t
  misc_feature (825)..(825): n is a, c, g, or t
  misc_feature (865)..(866): n is a, c, g, or t
  misc_feature (868)..(869): n is a, c, g, or t
  Peptide Sequence Number=SeqID_11122
  Probeset Number=SeqID_21058
nnnnnnnnnnnnnnnnnnnnnnnnnnnnnnnnnnnnnnnnnnnnnnnnnnnnnnnnnnnnnnnncannnnnnnnnnnnnnnnnnnnnnnnnnnnnnnnnnnnnnnnnnnnnnttttnnnnnnnnnnnnnnnnnnnnnnnnnnnnnanatacnnnnnnnnnnnnnnnnnnnnnnnnnnnnnnnnnnnnnnnnnnnncnnnnnnnnnannnnnnnnntnnnnnnnnnnnnnctnnnnnantnnctgnnnnnnntnnnnnnnnnnnnnaagnnnnnnnnnnnnnnnnnncgaagattcaggtgnnnnnnnnnnngnnnnnnnnnnnnnnnnnnnnnnnnnnnnannnnnnnnnnannnncccnagcatggcccagcacgtgtgttttcaagtcaaagagaaaacggagtttttcggcaccgagttctccgagacggattcggagtatttcgcggccctcaaggagggcattctgggcgtccaggttggggggagcagcatcaacgagcgcatggaggaggtgcgcttcgagattttcggacttgaggcagagacgatttgtagcaagtggagcgaagtcgaggaagcgtttcctggtaacctgtttataaaatagatagatgtgacgcgacttgagcgtttttttcnnnngaagaatcacgatcagagagcttctatgtgtatttttgggtacagttcacttcagggtttttttgttaataannnnnttnnnnnncaaaaaatagttctttggggtcttttttccctgcgcgaaaaaaaaaaaaaaaaaacaaaaaatacatataaaatataataatagtttnnnnangaaaaaaaaaaaaaaaaaaaactcgagggggggcccggtnncnn

SEQ ID NO: 6656 - DNA, 350 bp, Zea mays
  misc_feature (4)..(5): n is a, c, g, or t
  misc_feature (20)..(105): n is a, c, g, or t
  misc_feature (345)..(350): n is a, c, g, or t
  Peptide Sequence Number=SeqID_11123
  Probeset Number=SeqID_21059
gtanngggccccccctcgannnnnnnnnnnnnnnnnnnnnnnnnnnnnnnnnnnnnnnnnnnnnnnnnnnnnnnnnnnnnnnnnnnnnnnnnnnnnnnnnnnnnnggaaacaggggggttcccttttaagcctcccctacaaaccccttggttggtcccccttcaacgggttggcataccagtttttaaaaaaacgtttaggggaggtggtcacagttcatacaacccccttgaaaaagcgggggaaacaatggaaggggggttaccattcccccttcgcccggtatatttaaaaaaacgttttccctggggggcacttggggccttgttgaaaccaaccacccnnnnnn

SEQ ID NO: 6657 - DNA, 444 bp, Zea mays
  Probeset Number=SeqID_21060
taaagtctagttgaaataaggatacgatcttcggtcgtgaaggatttttgggtgtacaaaggtagagtagtaagcagtataagctcgttctgcaattgtcctatagcatgcaccacttcttggaagcatctctatccaataggaatgctccatccttctgtgtctaaaccaaaggaagcatcacacagcaacaactacaactagggatgctgctcgacgacgactgccaaaatcattctccatggtctatcagaaggtagcaaaatagttgtgttaataacatggtcttgctcttcaattaggtgcattttatgttattagtaccacatgttgttgcatcgtgagatgatcctccagtggcaaattatgcctgttatgtaatcattgaccaagatatgttgctcagaatatgttccaaccaaacatgcaaaaaaaaaaaaaaaa

SEQ ID NO: 6658 - DNA, 713 bp, Zea mays
  misc_feature (601)..(713): n is a, c, g, or t
  Peptide Sequence Number=SeqID_11124
  Probeset Number=SeqID_21061
ctctctcgtggcgacacgacgagccgacgactgtgcggccgtcgctgccactctactcgccagttgcccggatcttcttcgtccccttggaaatcgacggccacaaccagggcaaacaggaagtttcgcaaggatgccctggtgcacgattgatgagtctgaccctggtgttttcaccgagctgattcagcaaatgcaagtggaaggtgtacaggttagcttccagggttctgttcgtcccctgtctgaactgtttgttttctcatccttcgaactattgttgtacctgcaatagcagtatgcactcagcctgctcattcggtagtgtatttttcttcttctgaggatttgtttcttccccatgctgtgaaactgatagcaacctggaactctcgttttagaaactaccttactgtcgtactatctgactgtaggacaaacataattaatataaagcatgcttagctgattgtaaacttgtatggcaacaagattgtgaagacgtgcactttagtgtagagaagaataactgataatttgctgtcaatagtttttttacctttatgcaaccgccaactcaatttcaggaggggcatcctcnnnnnnnnnnnnnnnnnnnnnnnnnnnnnnnnnnnnnnnnnnnnnnnnnnnnnnnnnnnnnnnnnnnnnnnnnnnnnnnnnnnnnnnnnnnnnnnnnnnnnnnnnnnnnnnnn

SEQ ID NO: 6659 - DNA, 741 bp, Zea mays
  misc_feature (1)..(51): n is a, c, g, or t
  misc_feature (731)..(741): n is a, c, g, or t
  Probeset Number=SeqID_21062
nnnnnnnnnnnnnnnnnnnnnnnnnnnnnnnnnnnnnnnnnnnnnnnnnnnaagctggagctccccgcggtggcggccgctgcgtccggcggcggcgcggcggagctcgctacgtcctcgtcatcggccgccgcggcggcgcaggcgcggaagcagcagcagcagcagcgccataagctcgaggtgtacacagaggttctccggcgcctccacgacgccggcctgcccgacgcgcgggcgcccgggttcgacgacgagctctggaaccacttcaaccgcctccccgcccgatacgccatggatgtgaacgtggagagggcggaggacgtgctcacgcacaagcggcttctggagcaggccaaggatccggctcagcgcccggctttcgcggtgcgggccgtgcaggtatctccaattcttgatgggaatcagactgatgctgattcgaatactgcaggggaggaagtcccttcaagactgttgaacaggcagcagagcatacatcctcctcctgcctttggttcttctacaaatcttgaggcccttgctcttgaagctagcaagcctcatcaagatcacgatagcacctctgataattggcgatccctgtacaggcccatgcatggaaatccccttttcaaccattgacaagccaaaacttctcagtgagctgacatcctcctgctgggggaggcttgggtctccacattcaagaaagcacatggcatttnnnnnnnnnnn

SEQ ID NO: 6660 - DNA, 313 bp, Zea mays
  Peptide Sequence Number=SeqID_11125
  Probeset Number=SeqID_21063
gccttccctctgaaaactcttcattctcctctcctccgccgcgccgccaacttcccctcccgtcaactccggctcccgcgcgagatcgagctagcgtttggggaagtgggcggcggcggcggcgtccgcgtcctgctggggctgccgcccgcggccatggccgagttccagcggctggtggacgaggtgaccgcggcctgaagtgaaggacccgaatgattgcttgcttgtatacggcagtgctacctgttatctgtgtttcttcttttctgatttgaaaatttgtttgtgttgagtaaaaaaaaaaaaaaaa

SEQ ID NO: 6661 - DNA, 227 bp, Zea mays
  Probeset Number=SeqID_21064
caataggttgaaacagtatgttgtttcactttactgcatgaaaagaggcactaatatcttatgcatgctaccttatacaacaattaaactaagaactggtgctgaacaataatattagcgaaatgcatgcttactctgtcaccaggtctgcaacacctttacagtggatattgtaagttaacaacaacttccattacaacctgaaatcgatacgaaacgatgaaata

SEQ ID NO: 6662 - DNA, 856 bp, Zea mays
  misc_feature (1)..(255): n is a, c, g, or t
  misc_feature (647)..(648): n is a, c, g, or t
  misc_feature (757)..(757): n is a, c, g, or t
  misc_feature (824)..(826): n is a, c, g, or t
  misc_feature (856)..(856): n is a, c, g, or t
  Peptide Sequence Number=SeqID_11126
  Probeset Number=SeqID_21065
nnnnnnnnnnnnnnnnnnnnnnnnnnnnnnnnnnnnnnnnnnnnnnnnnnnnnnnnnnnnnnnnnnnnnnnnnnnnnnnnnnnnnnnnnnnnnnnnnnnnnnnnnnnnnnnnnnnnnnnnnnnnnnnnnnnnnnnnnnnnnnnnnnnnnnnnnnnnnnnnnnnnnnnnnnnnnnnnnnnnnnnnnnnnnnnnnnnnnnnnnnnnnnnnnnnnnnnnnnnnnnnnnnnnnnnnnnnnnnnnnnnnnnnnnnnnnnncgagttcgtcaaggaccaagagttagtggatgactgtcgtaaatgttgcacggaggattcagatgattctatcagcaagcttgtatactccggggcaattatcgaagtatgcatgagaaagctggtgttttatccagaagttgttggcttccttgaagaggataaagatgccttcccttatgtagaatctcggtatgcttatggctctccaccaaagctcataatgcttgacgacaagggtgaacagaaggagactataaggattgacaactggaagcgtgagcatattcggcaatttctcacagagaaggtgaagccggcgaaatcagagacctgaatactcgtgacgagttcctctccctgtagaaccatatatcgatatatggtatttnngttcttttgcacgcaaaaaactggtcacccgtgatcttaacctaaaccgggcagcatgtgtacacctcaactgttttaacaagacaacctgtcatgtatgaagtgcctngcactatgatccgtgaagagtagttaatgtgcgagttgttttgagttagtctctttttatgtgaccnnntttatataaaaagtagcatggatacttctn

SEQ ID NO: 6663 - DNA, 833 bp, Zea mays
  misc_feature (1)..(53): n is a, c, g, or t
  misc_feature (57)..(67): n is a, c, g, or t
  misc_feature (69)..(87): n is a, c, g, or t
  misc_feature (89)..(93): n is a, c, g, or t
  misc_feature (95)..(108): n is a, c, g, or t
  misc_feature (112)..(114): n is a, c, g, or t
  misc_feature (119)..(121): n is a, c, g, or t
  misc_feature (123)..(138): n is a, c, g, or t
  misc_feature (140)..(142): n is a, c, g, or t
  misc_feature (148)..(158): n is a, c, g, or t
  misc_feature (160)..(162): n is a, c, g, or t
  misc_feature (164)..(171): n is a, c, g, or t
  misc_feature (174)..(180): n is a, c, g, or t
  misc_feature (183)..(187): n is a, c, g, or t
  misc_feature (744)..(746): n is a, c, g, or t
  misc_feature (760)..(763): n is a, c, g, or t
  misc_feature (767)..(833): n is a, c, g, or t
  Peptide Sequence Number=SeqID_11127
  Probeset Number=SeqID_21066
nnnnnnnnnnnnnnnnnnnnnnnnnnnnnnnnnnnnnnnnnnnnnnnnnnnnngttnnnnnnnnnnnannnnnnnnnnnnnnnnnnncnnnnngnnnnnnnnnnnnnntttnnntaaannncnnnnnnnnnnnnnnnncnnncccccnnnnnnnnnnngnnngnnnnnnnncannnnnnnagnnnnncccccccccaagagaaagggggttgtttttgtccattttgaagatgagaccaccattttttttgaccaaggtgaccccttcccggggggggaaccgtttcaagggatcaatggcaaggggcccttccctcaaaccccccaccctccattgggggttcccccaacagcctttgcccaagttacaccaatttttaggggggaagaagcgaccagggttcccccgtcggtttggcttttcccaaatcccattggaaccttgggtgtcgtcccttttgtttttggccttttcccagtccaggttgaaaagggggtttcccccaatggggtttatccggggtcttttttcctttttatcccctaccaggcctttttgggttttgtaaaaggtaaatttattttgaaatatttcccccagtttcccggggattttcggtctttttagggggttaggtagcccggggtacctttcttttcccaaaaaaaaaaaaaaaaaaaaaaaaaaaaaaaaaaaaaaaaaaaaaaaaaaaaaaaaaaaaagaaaaaaaaaaaaaaaaaaannncgagggggggcccnnnncccnnnnnnnnnnnnnnnnnnnnnnnnnnnnnnnnnnnnnnnnnnnnnnnnnnnnnnnnnnnnnnnnnnn

SEQ ID NO: 6664 - DNA, 616 bp, Zea mays
  misc_feature (601)..(616): n is a, c, g, or t
  Peptide Sequence Number=SeqID_11128
  Probeset Number=SeqID_21067
atactaagagcttctctctcattttatcatctccgcttatcgttgactctccttcttcttcttcttcttcttcttcttcttcttcttcttcttcctctctcgccgtcccttgcttcttctctccgactagtcttaaaccatcaagcgccagtctccccgcgacgtatttccacaggtactctcatcctcggagtctaacgtcttcgctcgccgccctaatgtctccggaaaactcggttctatcagatgtctgcgctacaggaatctccggcgtcgtcgcgttctcgtgcctcggtttctggggagagattggcaagcgtggcatcttcgaccagaaacttatccggaagcttgtgcacataaacattggccttgtttttatactttgctggccactcttcagttctggactccaaggagccctcttcgcttctcttatacctggactcaatattataaggatgcttctcctggggcttggagtctaccaagacgaaggaactatcaagtctatgagcagacacggagatcgcagggaactacttaagggaccgctttattatgcactctcgatccatcgggatgattcttcattggaaannnnnnnnnnnnnnnn

SEQ ID NO: 6665 - DNA, 685 bp, Zea mays
  misc_feature (636)..(636): n is a, c, g, or t
  misc_feature (638)..(638): n is a, c, g, or t
  misc_feature (646)..(685): n is a, c, g, or t
  Peptide Sequence Number=SeqID_11129
  Probeset Number=SeqID_21068
acacacaaaaaaaaatggcgtctcttctgggaacgtcttcaatacgtgcgtctccttctctctcgtcttcttcttcctcaacaccttcgatctctcccatttgcttcaggccagggagaatctgtggaagagcgtcaaatgcaggaatccaaataaggccaaagaagaacaggtctcgtcaccatgtctctgtcatgaatgtagccacagaaatcaactccactgaacaacaagtagggaagtttgattcaaagaagagtgcgaggccagtttatccatttgcagctatagtaggccaagatgagatgaagctatgtctcttgttgaatgtgattgatcccaagatcggtggtgtgatgataatgggagacagaggaaccgagaagtccacaaccgtcaggtccttagtcgatctcttacccgagattacggtagttgcaggcgacccttacaactctgacccgttagaccctgagttcatgggcgttgaggtaagagagagagtcgaaagaggagagcaggttcccgtcatcgccaccaagatcaacatggttgaccttcccctaggtgcactgaagatagagtttgtggaactatcgatatcgaaaaggcgttaacagaaggggcaagctttgnancccggttnnnnnnnnnnnnnnnnnnnnnnnnnnnnnnnnnnnnnnnn

SEQ ID NO: 6666 - DNA, 877 bp, Zea mays
  misc_feature (1)..(20): n is a, c, g, or t
  misc_feature (25)..(25): n is a, c, g, or t
  misc_feature (27)..(31): n is a, c, g, or t
  misc_feature (38)..(38): n is a, c, g, or t
  misc_feature (40)..(41): n is a, c, g, or t
  misc_feature (43)..(45): n is a, c, g, or t
  misc_feature (47)..(53): n is a, c, g, or t
  misc_feature (55)..(63): n is a, c, g, or t
  misc_feature (68)..(69): n is a, c, g, or t
  misc_feature (72)..(74): n is a, c, g, or t
  misc_feature (82)..(85): n is a, c, g, or t
  misc_feature (89)..(96): n is a, c, g, or t
  misc_feature (102)..(104): n is a, c, g, or t
  misc_feature (111)..(116): n is a, c, g, or t
  misc_feature (148)..(151): n is a, c, g, or t
  misc_feature (189)..(189): n is a, c, g, or t
  misc_feature (191)..(193): n is a, c, g, or t
  misc_feature (797)..(799): n is a, c, g, or t
  misc_feature (802)..(802): n is a, c, g, or t
  misc_feature (810)..(810): n is a, c, g, or t
  misc_feature (812)..(818): n is a, c, g, or t
  misc_feature (820)..(877): n is a, c, g, or t
  Peptide Sequence Number=SeqID_11140
  Probeset Number=SeqID_21069
nnnnnnnnnnnnnnnnnnnnaagtnannnnngagggtngnntnnncnnnnnnnannnnnnnnncatanntannnccaagttnnnncatnnnnnnnnttttcnnnacgcctnnnnnnttgtacatggtaattcgaggtatggtgagtgnnnnacttcatcgtcatctaccttcacgaattctctttctcngnnncatgtgccatgacaagcgtaagttagagctgctatccatgatgcaaagttgcttggctttctgaccggtgacaccaaggcgtcgctggccaaaatattctagaaagacggtgatggaaaagagatcgaggtggacaatataaagtatgaagattgagaaggcagagatcagcaagtcctgagctaactcctctcgctgctataaaatgacatgttggttctagttacttcgatcaagatcgtagtgaagccaacagagatccaaggcgtcttgctttgcctaaaaaacaagagcaagaaccatcaatgtatggttgtttctaacaaataccaaaaagagtaatctatcagtttctgaatactttgaacaaatgaagtccttgggcgatgagatgtcaatagttggtcgatctctagaagataaaaaaaatcggtgaagtatattctcatagacctcaatgacgactaactcccactagtctatgttattacaccaggaagaagccaatcatagttagcgagttgtttgatcagcttctgaattccgagactggacttatctctaatagtagatttgtcaacgccacgagccgataatgtgtgcnnntcnaggggggncnnnnnnncnnnnnnnnnnnnnnnnnnnnnnnnnnnnnnnnnnnnnnnnnnnnnnnnnnnnnnnnnn

SEQ ID NO: 6667 - DNA, 754 bp, Zea mays
  misc_feature (1)..(12): n is a, c, g, or t
  misc_feature (14)..(26): n is a, c, g, or t
  misc_feature (28)..(47): n is a, c, g, or t
  misc_feature (50)..(58): n is a, c, g, or t
  Peptide Sequence Number=SeqID_11141
  Probeset Number=SeqID_21070
nnnnnnnnnnnntnnnnnnnnnnnnnannnnnnnnnnnnnnnnnnnngannnnnnnnnaaaaaagaggaaactggggattcttgagaagcaattcctcgatgaactgaagaaggaaattgagggcgttgcttttttttgtttgtcaaaccagggagccggtaaatccccgaatgcaaaagatgattctccgtccgatcgtggggggggtgcccgttacccaggggggggggaggaggatgattttggtactgctttcaagtctcgcaagcaggggggcctttttaaggctttgaagatgggccaagaaaagaaaaagggggaagttgggcttctccagaagggaaaaaagaacgcgggttttggggctttttcccagaagcggccctgatgggtcccaaattttcctccccctgggggggcctctttagtagaaaagtttccctgatcagctttgggggcccatccccccagagggggggggggccctttgatatttgctatgtatgcttaagaggggttccagggtatgttccccggaacctgaatagaaaagttttggtttgtttttcgaagccctttggctcgttttttttggggaacttgaatagaaaagttttggcccgtttttcgaagccttttttgttttttttggggagcccgggttaaaaaaaaaaaaaaaaaaaaaaaaaaaaaaaaaaaaaaaaaaaaaaaaaaaaagaaaaaaaaaaaaaaaaaaactcgagggggggcccg

SEQ ID NO: 6668 - DNA, 492 bp, Zea mays
  misc_feature (67)..(67): n is a, c, g, or t
  misc_feature (114)..(114): n is a, c, g, or t
  misc_feature (438)..(438): n is a, c, g, or t
  Peptide Sequence Number=SeqID_11142
  Probeset Number=SeqID_21071
gattcacgtgcaatgggctatccgttctccacagccgtgattgctgaggtcggctctagcctgtggncgccgattctgaacatcctagaaccttcgtctatcattccgcgaganaaaacgccacgagcggacggtcggcggccgcatatttcttccgcattgacggtgggtcccgacgccggccacaccgccacagagagaagcgttaggacaggctgactggttgagaattgagaaccaaaagaagagataggaagacaggaagagagagggacagcgcgcgctgtcaaccagccagacagcccccaacggctggctcattttctgcacgcgcttccaggtttttagctgcaggggaggccgatagcccgatagttctgttctactggaggaggagcagagagcaagatggggtccggatctttcctcaaggtgctngccaagaacttcgatgtccttgccggataatagtaatcaacccggggatcttcg

SEQ ID NO: 6669 - DNA, 491 bp, Zea mays
  Probeset Number=SeqID_21072
tggtggcaggctccttgtttgctgtgcggatggaccactcgtctatccaggtggcatcattgaatctcttgaactgctgaagctctgtctcgttgtccctgttgtttggccaacttgacgtgccaatctttgtattggaaggattcgcatagcgaaagtcatagtagcggtagaattggaagtattcctgccacgtgccgttgaccttgaactggacgcagccctcgatggtagagtcttggtcggcatacaccgacgaggccagaagacctgtgacggtgagaagtgaggaaactcgaaccatttcgctgagatgtgcttgagaaaaaaagattataccgagaaaggggaagaggaagaaggggaagactgtagtctacctgtggtgtgagctagggacgtgcctcaaagcagaacgctgagtcgttcttataacgagcgtctaaggtggatgaagaaaaacacacacccctgctgccccgtagctgtct

SEQ ID NO: 6670 - DNA, 620 bp, Zea mays
  misc_feature (1)..(20): n is a, c, g, or t
  misc_feature (26)..(26): n is a, c, g, or t
  misc_feature (28)..(28): n is a, c, g, or t
  misc_feature (33)..(34): n is a, c, g, or t
  misc_feature (37)..(37): n is a, c, g, or t
  misc_feature (46)..(46): n is a, c, g, or t
  misc_feature (50)..(51): n is a, c, g, or t
  misc_feature (54)..(55): n is a, c, g, or t
  misc_feature (58)..(58): n is a, c, g, or t
  misc_feature (61)..(61): n is a, c, g, or t
  misc_feature (66)..(66): n is a, c, g, or t
  misc_feature (70)..(72): n is a, c, g, or t
  misc_feature (74)..(74): n is a, c, g, or t
  misc_feature (78)..(79): n is a, c, g, or t
  misc_feature (81)..(81): n is a, c, g, or t
  misc_feature (89)..(90): n is a, c, g, or t
  misc_feature (93)..(93): n is a, c, g, or t
  misc_feature (100)..(103): n is a, c, g, or t
  misc_feature (106)..(107): n is a, c, g, or t
  misc_feature (110)..(114): n is a, c, g, or t
  misc_feature (117)..(117): n is a, c, g, or t
  misc_feature (119)..(119): n is a, c, g, or t
  misc_feature (130)..(132): n is a, c, g, or t
  misc_feature (138)..(138): n is a, c, g, or t
  misc_feature (147)..(147): n is a, c, g, or t
  misc_feature (151)..(151): n is a, c, g, or t
  misc_feature (153)..(153): n is a, c, g, or t
  misc_feature (159)..(159): n is a, c, g, or t
  misc_feature (161)..(161): n is a, c, g, or t
  misc_feature (163)..(163): n is a, c, g, or t
  misc_feature (168)..(168): n is a, c, g, or t
  misc_feature (172)..(172): n is a, c, g, or t
  misc_feature (174)..(175): n is a, c, g, or t
  misc_feature (180)..(180): n is a, c, g, or t
  misc_feature (185)..(185): n is a, c, g, or t
  misc_feature (189)..(189): n is a, c, g, or t
  misc_feature (195)..(195): n is a, c, g, or t
  misc_feature (200)..(200): n is a, c, g, or t
  misc_feature (202)..(202): n is a, c, g, or t
  misc_feature (205)..(205): n is a, c, g, or t
  misc_feature (214)..(214): n is a, c, g, or t
  misc_feature (216)..(216): n is a, c, g, or t
  misc_feature (221)..(221): n is a, c, g, or t
  misc_feature (224)..(225): n is a, c, g, or t
  misc_feature (229)..(230): n is a, c, g, or t
  misc_feature (235)..(235): n is a, c, g, or t
  misc_feature (238)..(239): n is a, c, g, or t
  misc_feature (241)..(241): n is a, c, g, or t
  misc_feature (243)..(243): n is a, c, g, or t
  misc_feature (250)..(250): n is a, c, g, or t
  misc_feature (253)..(253): n is a, c, g, or t
  misc_feature (261)..(261): n is a, c, g, or t
  misc_feature (266)..(268): n is a, c, g, or t
  misc_feature (273)..(273): n is a, c, g, or t
  misc_feature (279)..(279): n is a, c, g, or t
  misc_feature (282)..(282): n is a, c, g, or t
  misc_feature (284)..(284): n is a, c, g, or t
  misc_feature (287)..(287): n is a, c, g, or t
  misc_feature (290)..(290): n is a, c, g, or t
  misc_feature (292)..(292): n is a, c, g, or t
  misc_feature (294)..(294): n is a, c, g, or t
  misc_feature (297)..(297): n is a, c, g, or t
  misc_feature (299)..(299): n is a, c, g, or t
  misc_feature (309)..(310): n is a, c, g, or t
  misc_feature (322)..(322): n is a, c, g, or t
  misc_feature (324)..(324): n is a, c, g, or t
  misc_feature (333)..(333): n is a, c, g, or t
  misc_feature (340)..(340): n is a, c, g, or t
  misc_feature (342)..(342): n is a, c, g, or t
  misc_feature (355)..(357): n is a, c, g, or t
  misc_feature (360)..(360): n is a, c, g, or t
  misc_feature (362)..(362): n is a, c, g, or t
  misc_feature (364)..(364): n is a, c, g, or t
  misc_feature (371)..(371): n is a, c, g, or t
  misc_feature (385)..(386): n is a, c, g, or t
  misc_feature (390)..(390): n is a, c, g, or t
  misc_feature (403)..(403): n is a, c, g, or t
  misc_feature (409)..(410): n is a, c, g, or t
  misc_feature (423)..(423): n is a, c, g, or t
  misc_feature (437)..(437): n is a, c, g, or t
  misc_feature (440)..(440): n is a, c, g, or t
  misc_feature (448)..(448): n is a, c, g, or t
  misc_feature (516)..(516): n is a, c, g, or t
  Peptide Sequence Number=SeqID_11143
  Probeset Number=SeqID_21073
nnnnnnnnnnnnnnnnnnnngagtgntngcagnnganggggggcgngcannagnnatnaangtacngggnnncngtgnngnataggggnnggnagggtannnntgnnggnnnnnggngnccgggtgttgnnnaattcngcagagatnggangngtgagngnanttggngatngnngaagngagcngcanacgtgnggggncnccntgccacctngnttgcnganntagnnaaggncanngncnaagtgtnacnagagaganggggnnnaaaangggggngancncgntgngnancanangtttatggcnncccccccccccngngaggggggngaggcantnaaaaattgcggannnctntntnaattttntttcgtcaggtttnntganaaaaaaaggaagntgaatnnatgggagagctcntgtccataggaagnatnacaagttngttcatcagcgtcgtcggtttgtgaaaactcctcggaaaactcggggtgagctaactcagttaactcncctggatcgggggagtggccccatcgccggaatcggaaaagaaactcaaactccgttgatttgattgatacagcagagaagaataaactcaagagagagagtga

SEQ ID NO: 6671 - DNA, 621 bp, Zea mays
  misc_feature (568)..(569): n is a, c, g, or t
  misc_feature (601)..(621): n is a, c, g, or t
  Probeset Number=SeqID_21074
acaacttcactagtcgtctgaatcggagctacgcttgcaaactccaatcatggcgagaggtttgaagaagcatttgaagaggctcaatgcccctaagcattggatgcttgacaaactcggtggtgcttttgcccccaagccatcttctggaccccacaagtcgagggagtgccttcccctcgttcttatcatcaggaacaggttgaagtacgctctcacctaccgtgaagtcatctccatcttgatgcaaaggcacatccaggttgatggcaaagtcaggactgacaagacctaccctgctggtttcatggatgtcgtctccatccccaagactaacgagaacttccgtcttctctatgacaccaagggacgtttccgtctccactccatcagagatgaggaagccaagtttaagctttgcaaggttcgaactatccaggtgggacagaagggcattccttacctcaacacatacgatggtcgcaccatccgttaccctgacccactcatcaagcctaatgacaccatcaagctcgacctggaggagaacaagattgtggactccatnncagttgatgtcggcaatgttgtgatggtgacnnnnnnnnnnnnnnnnnnnnn

SEQ ID NO: 6672 - DNA, 552 bp, Zea mays
  misc_feature (208)..(208): n is a, c, g, or t
  misc_feature (233)..(233): n is a, c, g, or t
  misc_feature (328)..(328): n is a, c, g, or t
  misc_feature (349)..(349): n is a, c, g, or t
  misc_feature (362)..(362): n is a, c, g, or t
  misc_feature (366)..(367): n is a, c, g, or t
  misc_feature (375)..(375): n is a, c, g, or t
  misc_feature (386)..(386): n is a, c, g, or t
  misc_feature (408)..(408): n is a, c, g, or t
  misc_feature (442)..(442): n is a, c, g, or t
  misc_feature (449)..(449): n is a, c, g, or t
  misc_feature (459)..(459): n is a, c, g, or t
  misc_feature (472)..(472): n is a, c, g, or t
  misc_feature (474)..(474): n is a, c, g, or t
  misc_feature (480)..(480): n is a, c, g, or t
  misc_feature (485)..(487): n is a, c, g, or t
  misc_feature (503)..(504): n is a, c, g, or t
  misc_feature (511)..(512): n is a, c, g, or t
  misc_feature (514)..(514): n is a, c, g, or t
  misc_feature (517)..(517): n is a, c, g, or t
  misc_feature (520)..(520): n is a, c, g, or t
  misc_feature (534)..(534): n is a, c, g, or t
  misc_feature (545)..(545): n is a, c, g, or t
  Peptide Sequence Number=SeqID_11144
  Probeset Number=SeqID_21075
tcccccccccccccccccccagaaggttggctgccggccagctgactacctgcccagcgaaccacgttgcctccgccaccgctgtccgctacctctcgtcctcaaccccgtcgctgcttcgttttcctctgcggcctcgggcctctgccttctctaaaagggggattgccctacatttaagttcaaacttccaaaaacagcctcctanaccggatccctttcctctattttcnatcctgactaggaagggggagggggccaatttcttgctcttttcctttcccttagggaaaaacgattccaaggggccaaattttccccaaaaatngggaatttggaaaaggccctntttaaaaatttgngggnnttggaaanaacaaaggggncctgggttttttaaaaggggtncaaaaagggaaaaaaaaaattttttttttggganccccccncttttttttnagccccccggggnanaacccncttgnnncccaaaaaattttggnnaaaaaanntntcnccntttggggggccccnccccccccaanaattttt

SEQ ID NO: 6673 - DNA, 626 bp, Zea mays
  misc_feature (601)..(626): n is a, c, g, or t
  Probeset Number=SeqID_21076
ctctctcgtgtaattgcagaagaagaagaagagagaaaacgaaaatggcggctaacggatctactcagctttcacagaaggaagctgacatcaagatgatgtgcgctgctgaggttcacctcggaaccaagaactgcaactaccaaatggagcgttacgtcttcaagagacgcaacgacggtatttacatctttaaccttggaaagacatgggagaagctgatgatggctgcacgagtcatcgttgctatcgagaacccacaagacatcattgtgcagtcagctaggccctatggtcagagagctgttttgaagttcgctcagtacactggagctaatgccattgctggaaggcacactcctggtactttcaccaatcagatgcagacttcgttcagcgagccaaggcttttgattcttactgatccacgtacggaccaccagcccatcaaggaaggtgctttgggaaacattccaatcattgctttctgtgacactgactctcccatgagggttgctgacattggtatccccgctaaaaacaaggggaagcacagcattggttgtctcttctgccgggttttgggccgagaggggccttnnnnnnnnnnnnnnnnnnnnnnnnnn

SEQ ID NO: 6674 - DNA, 492 bp, Zea mays
  misc_feature (182)..(182): n is a, c, g, or t
  misc_feature (184)..(184): n is a, c, g, or t
  misc_feature (284)..(287): n is a, c, g, or t
  misc_feature (289)..(289): n is a, c, g, or t
  misc_feature (351)..(352): n is a, c, g, or t
  misc_feature (362)..(362): n is a, c, g, or t
  misc_feature (365)..(365): n is a, c, g, or t
  misc_feature (370)..(370): n is a, c, g, or t
  misc_feature (374)..(374): n is a, c, g, or t
  misc_feature (378)..(378): n is a, c, g, or t
  misc_feature (380)..(384): n is a, c, g, or t
  misc_feature (386)..(386): n is a, c, g, or t
  misc_feature (391)..(391): n is a, c, g, or t
  misc_feature (393)..(393): n is a, c, g, or t
  misc_feature (397)..(400): n is a, c, g, or t
  misc_feature (407)..(411): n is a, c, g, or t
  misc_feature (415)..(415): n is a, c, g, or t
  misc_feature (423)..(424): n is a, c, g, or t
  misc_feature (427)..(431): n is a, c, g, or t
  misc_feature (435)..(436): n is a, c, g, or t
  misc_feature (439)..(439): n is a, c, g, or t
  misc_feature (442)..(446): n is a, c, g, or t
  misc_feature (448)..(450): n is a, c, g, or t
  misc_feature (453)..(454): n is a, c, g, or t
  misc_feature (456)..(459): n is a, c, g, or t
  misc_feature (461)..(462): n is a, c, g, or t
  misc_feature (466)..(467): n is a, c, g, or t
  misc_feature (469)..(476): n is a, c, g, or t
  misc_feature (479)..(480): n is a, c, g, or t
  misc_feature (482)..(483): n is a, c, g, or t
  misc_feature (485)..(489): n is a, c, g, or t
  misc_feature (491)..(492): n is a, c, g, or t
  Peptide Sequence Number=SeqID_11145
  Probeset Number=SeqID_21077
ctcccgcagagccgccgacaacgctctctaccgtccgagaccccaagcaccagcgcggcggcggggggcggcggcgaccatggctgtcggaaagaacaagaggatctccaagggaaagaagggtggcaagaaaaagaccgtcgacccttttctcctaagaaggattggtatgacatcagggnanccgtccgggtggttcagtgtgcgcaaacatcgggaagactctcgtatccagggacacagggttaccaggattggccttcctgagggtctgaagcacgaannnncnttttggagggtttggcctagcttgatcttcaggggcgacgaggatcaagcttacagggaaanncaggctccgnggntgaanatgngcangnnnnngnaatgngntccnnnnttttggnnnnntganttttaccnntgnnnnnctcnnatnccnnnnngnnnaanngnnnnannttanncnnnnnnnntgnngnngnnnnnann

SEQ ID NO: 6675 - DNA, 619 bp, Zea mays
  misc_feature (614)..(614): n is a, c, g, or t
  misc_feature (619)..(619): n is a, c, g, or t
  Probeset Number=SeqID_21078
catccaattcattacaagttatctaaaaactttaacttgcaccacactctaacagcaatggccgcctctacaatggctctatcctctcccgctttggccggaaaggccgtgaagcttgctcccgcagcctctgaagtctttggaaccggccgagtcaccatgcgcaaaaccaccaaaccagccggcccatctggcagcccatggtacggatccgacagggttaagtacttgggtccattctccggagagcccccgagctacctcaccggagagttcccaggcgactacggatgggacaccgctggtctatccgctgaccccgagaccttcgcaagaaaccgtgagctagaagttatccactgcagatgggccatgctcggagccctaggctgcgtttttcctgaactcttggcccgtaacggagtgaagttcggagaagcggtttggttcaaggccggttcacagatcttcagcgaaggtgggctcgactatttgggcaacccgagcttggtccacgctcagagcatcttagccatttgggccactcaagtgatcctcatgggggctgttgaggggtacagagtcgctggagacggaccattgggagaagccgnagacn

SEQ ID NO: 6676 - DNA, 662 bp, Zea mays
  Peptide Sequence Number=SeqID_11146
  Probeset Number=SeqID_21079
tcagaaccaaaccacccatttcttggcacacaacaacaacttataaacgtttttactttacgccgcactgatcaaccgcaatggctgcctcaacaatggctctctcctccgctgctttcgccggaaaggccgtgaagacttctccagcggcttcagatgtcctcggaaagcggcgtgtgacaatgagggaaaaccgtcgccaagccgaagggtccatcaggaagccccatggtacggagcggagaagagccaaggactttggggcccatttcctccggggggggccccccgagtctaccttagcggggaaggtcccaggagactacggggggggaaccccgccgggtctctcagcgcgattcccgaagactttcccaagggagaaccgggggctaaaagaattttccccccggggggggggcgccatgtgtccggaagccccccggttgcgtcttcccccgagttgctggccaggaaaagggagtccaggttccgaaaaggcgggtttggtttaaagggttgcttcaaaaaatctttaggggaacggaagatctttaactactttgggaaaaccccaaggtttggttccatggcccaaaaccattttttgggtaattttggggctaactcccaaggggaactcttggatgggaaaggccgtt

SEQ ID NO: 6677 - DNA, 662 bp, Zea mays
  Peptide Sequence Number=SeqID_11147
  Probeset Number=SeqID_21080
aacggcctttcccatccaagagttccccttgggagttagccccaaaattacccaaaaaatggttttgggccatggaaccaaaccttggggttttcccaaagtagttaaagatcttccgttcccctaaagattttttgaagcaaccctttaaaccaaacccgccttttcggaacctggactcccttttcctggccagcaactcgggggaagacgcaaccggggggcttccggacacatggcgccccccccccggggggaaaattcttttagcccccggttctcccttgggaaagtcttcgggaatcgcgctgagagacccggcggggttccccccccgtagtctcctgggaccttccccgctaaggtagactcggggggccccccccggaggaaatgggccccaaagtccttggctcttctccgctccgtaccatggggcttcctgatggacccttcggcttggcgacggttttccctcattgtcacacgccgctttccgaggacatctgaagccgctggagaagtcttcacggcctttccggcgaaagcagcggaggagagagccattgttgaggcagccattgcggttgatcagtgcggcgtaaagtaaaaacgtttataagttgttgttgtgtgccaagaaatgggtggtttggttctga

SEQ ID NO: 6678 - DNA, 691 bp, Zea mays
  misc_feature (85)..(85): n is a, c, g, or t
  misc_feature (276)..(276): n is a, c, g, or t
  misc_feature (283)..(283): n is a, c, g, or t
  misc_feature (362)..(362): n is a, c, g, or t
  misc_feature (389)..(389): n is a, c, g, or t
  Peptide Sequence Number=SeqID_11148
  Probeset Number=SeqID_21081
acccatttcttggcacatagcaacaactaataaacgtttttactttactccgcactcaaccgcaatggctgcctcgacaatggcntctctcctcctctgccttcgccggaaaggccgtgaacctttctccagcggcatcagaagtcctcggaagtggccgtgtgacaatgaggaagaccgtggccaagccaaagggaccatcaggcagcccatggtacggagccgagagagtcaagtacttgggtccattctccggcgagccaccgagctaccttnaaccggnagaagtcccaaggagacttacggggggggacacaagccgggtctcctcccccgatctccgagaacattcgcaagggaancccgggagctaaaagtttatcccctgncaggggggccatgcctccggagccccagggtgcgggctttcccggaattgctgggcccaggaagggggttcaaagtttcggaaacgcgggtttgggttcaaagggggggtttccacatatttttcggggggcgggggggcccccctacaatttgggaaccccccgttggcccagccccaaaattttggcaatttggccacccaaggatttttgggggccccctgaaaggaaacaattgtggggaaccgccccctgttgaagaagagaagtttttcccccccagggggttttcccccccgggg

SEQ ID NO: 6679 - DNA, 691 bp, Zea mays
  misc_feature (303)..(303): n is a, c, g, or t
  misc_feature (330)..(330): n is a, c, g, or t
  misc_feature (409)..(409): n is a, c, g, or t
  misc_feature (416)..(416): n is a, c, g, or t
  misc_feature (607)..(607): n is a, c, g, or t
  Peptide Sequence Number=SeqID_11149
  Probeset Number=SeqID_21082
ccccgggggggaaaaccccctgggggggaaaaacttctcttcttcaacagggggcggttccccacaattgtttcctttcagggggcccccaaaaatccttgggtggccaaattgccaaaattttggggctgggccaacggggggttcccaaattgtaggggggcccccccgccccccgaaaaatatgtggaaaccccccctttgaacccaaacccgcgtttccgaaactttgaacccccttcctgggcccagcaattccgggaaagcccgcaccctggggctccggaggcatggcccccctgncaggggataaacttttagctcccgggnttcccttgcgaatgttctcggagatcgggggaggagacccggcttgtgtccccccccgtaagtctccttgggacttctnccggttnaaggtagctcggtggctcgccggagaatggacccaagtacttgactctctcggctccgtaccatgggctgcctgatggtccctttggcttggccacggtcttcctcattgtcacacggccacttccgaggacttctgatgccgctggagaaaggttcacggcctttccggcgaaggcagaggaggagagangccattgtcgaggcagccattgcggttgagtgcggagtaaagtaaaaacgtttattagttgttgctatgtgccaagaaatgggt

SEQ ID NO: 6680 - DNA, 566 bp, Zea mays
  misc_feature (350)..(350): n is a, c, g, or t
  Peptide Sequence Number=SeqID_11150
  Probeset Number=SeqID_21083
actcacaagttagtcacaaaaaaaaaaagaaaaagaagaaacttcaatggcctcttcaacaatggctctctcctcccctgccttcgctggaaaggccgtgaagctttctcctgcagcatcagaagtccttggaagcggccgtgtgacaatgaggaagaccgtcgccaagccaaagggacaatcaggcagcccatggtacggtttcgaaagagtcaagtacttgggtccattctctggcgagccaccgagctaccttaccggagagttcccaggagactacggatgggacaccgcaggcctctcagccgatcccgagacattcgcaaggaaaccgtgagctagaagttatnccactgcaggtgggccatgcttggagccctaggctgtgtcttcccgggagttgttggctaggaacggagtcaagttcggaaggggccggtttgggttcaaaggccggctcacagatccttcaggcgaaggaggactttgactactttgggcaaccccggggcttagtcccccctccgagcgtctctgccacctgggccactcaggtgatcctcatg

SEQ ID NO: 6681 - DNA, 643 bp, Zea mays
  misc_feature (643)..(643): n is a, c, g, or t
  Peptide Sequence Number=SeqID_11151
  Probeset Number=SeqID_21084
acccatttcttggcacatagcaacaactaataaacgtttttactttactccgcactcaaccgcaatggctgcctcgacaatggctctctcctcctctgccttcgccggaaaggccgtgaacctttctccagcggcatcagaagtcctcggaagtggccgtgtgacaatgaggaagaccgtggccaagccaaagggaccatcaggcagcccatggtacggagccgagagagtcaagtacttgggtccattctccggcgagccaccgagctaccttaccggagagttcccaggagactacgggtgggacacagccggtctctcagccgatcccgagacattcgcaaggaaccgtgagctagaagttatccactgcaggtgggccatgctcggagccctaggctgcgtcttcccggagttgctggccaggaatggagtcaagttcggagaggcggtttggttcaaggctggctcacagatcttcagcgacggaggactcgactacttgggaaacccaagcttggttcacgctcagagcattttggctatttgggctactcaagtgatcttgatgggagccgttgaaggttacagagttgcaggaaacggccccttgggaagggccacgacctgcgctacccagaan

SEQ ID NO: 6682 - DNA, 193 bp, Zea mays
  Peptide Sequence Number=SeqID_11152
  Probeset Number=SeqID_21085
gtaccgggccccccctcgagcttgtgctgtttatagcagtgctgaagtccagatcaacctgatggtgaactggagggggttgttgagtggggagattgctgtttatttgttgagaagtaatggttgcggttggcgggcgaaggctccgaaggaggggaagttaaaacatggtgctgggcaggggggggggggg

SEQ ID NO: 6683 - DNA, 833 bp, Zea mays
  misc_feature (624)..(624): n is a, c, g, or t
  misc_feature (628)..(628): n is a, c, g, or t
  misc_feature (778)..(833): n is a, c, g, or t
  Probeset Number=SeqID_21086
gaatcaagaaccactctttcgtgtcgcaataacaataagaaagaaagaaaaagaaaaccagagatggcgatgacgacagcatctacggtatttgttctaccggccaatgtcacctcggtcgccggcgcttcgtcgtccaggagctccgtgtctttcttgccgatgagaaacgccggttctaggctcgtagtcagggcagccgaagatcctgctccggcttcctcttcttcaaaagattctccggcagctgccgctgctccggatggagctactgccaccaaacccaagccaccaccgattggtcctaagagagggtctaaggtcaagattctaaggagagaatcctattggttcaagaacgttggatcagttgttgccgttgatcaggaccctaagactcgatacccggttgtggtccggttcgcaaaagtcaattacgccaacatatcgaccaacaactatgcattggatgaggccgaagaagttgcagcttaaatgggagaattcaaaaactctgtgtatcctatacccggtaatccgtttggtacttgacccaaaccggatgtaccgcaaaagtttacaaattatttctcctcaaaaaaaaaaaaaaggaggggaaaatanaaanaaaaaactcgggggggggcccgggaacccaattccccaaaaggggagccgaataacaattcctgggccggcgtttaacacggtcgtgacggagaaaacacggggggtacccaatttaatcgctttggaaaaatcccccttttccccggtnnnnnnnnnnnnnnnnnnnnnnnnnnnnnnnnnnnnnnnnnnnnnnnnnnnnnnnn

SEQ ID NO: 6684 - DNA, 306 bp, Zea mays
  misc_feature (4)..(4): n is a, c, g, or t
  misc_feature (7)..(10): n is a, c, g, or t
  misc_feature (16)..(24): n is a, c, g, or t
  misc_feature (97)..(101): n is a, c, g, or t
  misc_feature (145)..(147): n is a, c, g, or t
  misc_feature (305)..(306): n is a, c, g, or t
  Peptide Sequence Number=SeqID_11153
  Probeset Number=SeqID_21087
gtcncgnnnncccccnnnnnnnnnttttttttttttttttgatccaaagcggtacattggtcgataaacaatgcagaggtaatcgcaacgtaaagtnnnnncaaggtggcgtcatggtgtaatagaggtgatcttgtttagagannngatagtaatatgcctgtctatgggatggaagcgacagctagcagggacgactgctgcggaagtgcggaggcatcaaacagaggccacacccagcagtgttgaaaaactagtggcctagacgaactgctcggtgtccgcggcgccgatggggggggggnn

SEQ ID NO: 6685 - DNA, 581 bp, Zea mays
  misc_feature (1)..(4): n is a, c, g, or t
  misc_feature (19)..(25): n is a, c, g, or t
  misc_feature (89)..(93): n is a, c, g, or t
  misc_feature (226)..(226): n is a, c, g, or t
  misc_feature (237)..(237): n is a, c, g, or t
  misc_feature (269)..(272): n is a, c, g, or t
  misc_feature (277)..(280): n is a, c, g, or t
  misc_feature (294)..(297): n is a, c, g, or t
  Probeset Number=SeqID_21088
nnnngtggatcccccggannnnnnncccccccccccccgacttctcccacgtcgccgtccgcgcgttcgttgccggagcctctgtctgnnnnnaccgaggaccgagtattccgtcttgcctcatctcacgctcctgtctggttttcacatctgctgtgctgccccttggcgcgcccaccaccacagttgaccacgctgaatagtactatgcctactcgactgagangaatcctgctnattgatctccaagtctgcactgtctagccaannnncttgnnnnccatcaactcagannnnttgaagctgctgtagcagtcttatgattgttttgctgatgcaattaatgcttaaccaaatccatgacaacttgctcatcgctgatgcttgaactacggcaatgacactcaaaatacctcctagatttgctttcttgcgatccgtgatccctttccctaatcaagttttttggggtcgaggtgccgtaaagcactaaatcggaaccctaaagggagcccccgatttagagcttgacggggaactccggggaacgccccgagcccggttcgccctaaagcgaaagg

SEQ ID NO: 6686 - DNA, 823 bp, Zea mays
  misc_feature (1)..(1): n is a, c, g, or t
  misc_feature (7)..(9): n is a, c, g, or t
  misc_feature (18)..(21): n is a, c, g, or t
  misc_feature (23)..(26): n is a, c, g, or t
  misc_feature (33)..(36): n is a, c, g, or t
  misc_feature (281)..(284): n is a, c, g, or t
  misc_feature (288)..(292): n is a, c, g, or t
  misc_feature (295)..(297): n is a, c, g, or t
  misc_feature (299)..(300): n is a, c, g, or t
  misc_feature (303)..(307): n is a, c, g, or t
  misc_feature (311)..(312): n is a, c, g, or t
  misc_feature (314)..(316): n is a, c, g, or t
  misc_feature (318)..(323): n is a, c, g, or t
  misc_feature (331)..(337): n is a, c, g, or t
  misc_feature (344)..(344): n is a, c, g, or t
  misc_feature (350)..(357): n is a, c, g, or t
  misc_feature (366)..(366): n is a, c, g, or t
  misc_feature (368)..(380): n is a, c, g, or t
  misc_feature (382)..(384): n is a, c, g, or t
  misc_feature (390)..(398): n is a, c, g, or t
  misc_feature (400)..(407): n is a, c, g, or t
  misc_feature (410)..(414): n is a, c, g, or t
  misc_feature (416)..(418): n is a, c, g, or t
  misc_feature (422)..(426): n is a, c, g, or t
  misc_feature (428)..(437): n is a, c, g, or t
  misc_feature (444)..(446): n is a, c, g, or t
  misc_feature (454)..(455): n is a, c, g, or t
  misc_feature (459)..(468): n is a, c, g, or t
  misc_feature (474)..(474): n is a, c, g, or t
  misc_feature (476)..(479): n is a, c, g, or t
  misc_feature (481)..(492): n is a, c, g, or t
  misc_feature (501)..(504): n is a, c, g, or t
  misc_feature (507)..(509): n is a, c, g, or t
  misc_feature (514)..(516): n is a, c, g, or t
  misc_feature (519)..(522): n is a, c, g, or t
  misc_feature (525)..(530): n is a, c, g, or t
  misc_feature (532)..(532): n is a, c, g, or t
  misc_feature (536)..(537): n is a, c, g, or t
  misc_feature (539)..(553): n is a, c, g, or t
  misc_feature (556)..(562): n is a, c, g, or t
  misc_feature (564)..(568): n is a, c, g, or t
  misc_feature (575)..(592): n is a, c, g, or t
  misc_feature (598)..(607): n is a, c, g, or t
  misc_feature (610)..(616): n is a, c, g, or t
  misc_feature (618)..(620): n is a, c, g, or t
  misc_feature (623)..(642): n is a, c, g, or t
  misc_feature (644)..(669): n is a, c, g, or t
  misc_feature (672)..(698): n is a, c, g, or t
  misc_feature (700)..(716): n is a, c, g, or t
  misc_feature (718)..(733): n is a, c, g, or t
  misc_feature (735)..(757): n is a, c, g, or t
  misc_feature (763)..(785): n is a, c, g, or t
  misc_feature (792)..(792): n is a, c, g, or t
  misc_feature (794)..(823): n is a, c, g, or t
  Peptide Sequence Number=SeqID_11154
  Probeset Number=SeqID_21089
nacgacnnncagagagannnngnnnnctcactnnnnccccccccccctcaaggccgccaataaccggctgaaggtgcagtagttcgcgtcctccgacggtgaggacaacagccagatctacgcgatcatggtgaagatcaaccgttcctgtgacgacgtggatttcctgctgttcctgcccgaccacaattcggatgccaccaaagagctgttccgccgggagggcagtcacgaacttgcctcacttcatcttctactagggcctcgacaatgtgcacgannnngagnnnnncgnnncnnagnnnnncgcnnannncnnnnnntactatcnnnnnnngtcactnagcggnnnnnnnnctgcactcncnnnnnnnnnnnnngnnnctcatnnnnnnnnncnnnnnnnncannnnnannntcgnnnnncnnnnnnnnnncctctannnctgcgggnnctgnnnnnnnnnntacccnannnngnnnnnnnnnnnncgctccatnnnngannncaccnnnttnnnncgnnnnnncngagnngnnnnnnnnnnnnnnngtnnnnnnncnnnnngccatgnnnnnnnnnnnnnnnnnnactttnnnnnnnnnnacnnnnnnncnnntcnnnnnnnnnnnnnnnnnnnncnnnnnnnnnnnnnnnnnnnnnnnnnnctnnnnnnnnnnnnnnnnnnnnnnnnnnngnnnnnnnnnnnnnnnnnannnnnnnnnnnnnnnnannnnnnnnnnnnnnnnnnnnnnntttaannnnnnnnnnnnnnnnnnnnnnntgcgacncnnnnnnnnnnnnnnnnnnnnnnnnnnnnnn

SEQ ID NO: 6687 - DNA, 200 bp, Zea mays
  misc_feature (36)..(39): n is a, c, g, or t
  misc_feature (82)..(85): n is a, c, g, or t
  misc_feature (158)..(200): n is a, c, g, or t
  Peptide Sequence Number=SeqID_11155
  Probeset Number=SeqID_21090
tgatgagagtaggcctttccgcgttctcttggatgnnnnccttattatgactacaactgggaaccgtgtctttgcagccctnnnngatagctttgcatgttgccctgcatattcctcccagcgacaacaggttggctggtttcaacatggatgacacnnnnnnnnnnnnnnnnnnnnnnnnnnnnnnnnnnnnnnnnnnn

SEQ ID NO: 6688 - DNA, 666 bp, Zea mays
  misc_feature (1)..(64): n is a, c, g, or t
  misc_feature (92)..(94): n is a, c, g, or t
  misc_feature (108)..(108): n is a, c, g, or t
  misc_feature (134)..(138): n is a, c, g, or t
  misc_feature (147)..(149): n is a, c, g, or t
  misc_feature (159)..(163): n is a, c, g, or t
  misc_feature (172)..(174): n is a, c, g, or t
  misc_feature (182)..(184): n is a, c, g, or t
  misc_feature (205)..(207): n is a, c, g, or t
  misc_feature (232)..(234): n is a, c, g, or t
  misc_feature (262)..(264): n is a, c, g, or t
  misc_feature (286)..(288): n is a, c, g, or t
  misc_feature (291)..(291): n is a, c, g, or t
  misc_feature (315)..(317): n is a, c, g, or t
  misc_feature (325)..(326): n is a, c, g, or t
  misc_feature (367)..(367): n is a, c, g, or t
  misc_feature (369)..(369): n is a, c, g, or t
  misc_feature (393)..(396): n is a, c, g, or t
  misc_feature (407)..(407): n is a, c, g, or t
  misc_feature (411)..(411): n is a, c, g, or t
  misc_feature (440)..(441): n is a, c, g, or t
  misc_feature (443)..(445): n is a, c, g, or t
  misc_feature (449)..(450): n is a, c, g, or t
  misc_feature (459)..(459): n is a, c, g, or t
  misc_feature (467)..(473): n is a, c, g, or t
  misc_feature (479)..(481): n is a, c, g, or t
  misc_feature (483)..(487): n is a, c, g, or t
  misc_feature (493)..(493): n is a, c, g, or t
  misc_feature (504)..(505): n is a, c, g, or t
  misc_feature (523)..(524): n is a, c, g, or t
  misc_feature (530)..(533): n is a, c, g, or t
  misc_feature (538)..(541): n is a, c, g, or t
  misc_feature (546)..(548): n is a, c, g, or t
  misc_feature (555)..(559): n is a, c, g, or t
  misc_feature (561)..(569): n is a, c, g, or t
  misc_feature (577)..(579): n is a, c, g, or t
  misc_feature (589)..(591): n is a, c, g, or t
  misc_feature (598)..(666): n is a, c, g, or t
  Probeset Number=SeqID_21091
nnnnnnnnnnnnnnnnnnnnnnnnnnnnnnnnnnnnnnnnnnnnnnnnnnnnnnnnnnnnnnnnaaaaaaaaaaaaaaaaaaaaaaaaaatnnnctccgcctcgggcncccggttccgggggcctttccccacnnnnnctcggggtnnncgccagccannnnngggtttcgnnnccgggggnnntatccgcccccgccggccatnnnaaagaaaggagggaaggccaagccnnngaaggggcccaaggccgacaaaaaggannncgacgagacggtttttgcatannngcnaaaaaaaaaagatgaggaaaaagnnntgaagggnnttaaggccaaggcccaaaagggcgcgattgggggctcgggntngaaaaaaaggggaaaaaaatgaannnngtcccccgttnccantccctaaaggatgataaggcagctgtctnntnnngttnngcttccctnagggggannnnnnnaggggnnncnnnnntgtttngtgttccccgnngttgcagttggttgtttnntcgaannnngtttnnnnctccnnnttgctannnnngnnnnnnnnngtcccctnnnaataatgatnnnatatttnnnnnnnnnnnnnnnnnnnnnnnnnnnnnnnnnnnnnnnnnnnnnnnnnnnnnnnnnnnnnnnnnnnnn

SEQ ID NO: 6689 - DNA, 463 bp, Zea mays
  misc_feature (426)..(426): n is a, c, g, or t
  misc_feature (443)..(449): n is a, c, g, or t
  misc_feature (456)..(458): n is a, c, g, or t
  misc_feature (460)..(463): n is a, c, g, or t
  Peptide Sequence Number=SeqID_11156
  Probeset Number=SeqID_21092
gagagctcactagtcccccccccccccccggttggcggggagggcgccaaggtcgcgcgggacaacaagaaagccaccatcacctcccgcgagattcagaactccgtggggctcgtcctcccaggagaggtcgccaaaaacgccgtctccgagggaaacaagggcggcaccaagttcaccagcaattgggcagcctggagcggccacggatttgttaagtctccccttcttaaaaggggtcttcggcgtgggctctaaccctccccctccccgcctatgtatgtggtgtggaatcgttgatggtctcgtcgggtgaacaaagggcaagagctaacttggctggttcataaatcgtggcggattggaatgggcctcctaaattttacgcccccattttggaatatagttggatcggtggcttccctnaaaaaaaaaaaaaaaannnnnnnggggggnnngnnnn

SEQ ID NO: 6690 - DNA, 733 bp, Zea mays
  misc_feature (1)..(34): n is a, c, g, or t
  misc_feature (627)..(627): n is a, c, g, or t
  misc_feature (684)..(733): n is a, c, g, or t
  Peptide Sequence Number=SeqID_11157
  Probeset Number=SeqID_21093
nnnnnnnnnnnnnnnnnnnnnnnnnnnnnnnnnnctacccagcactgccttgcagaccataactgaaccatcatcatcatctcttggtgacacaagcgaagagttcaaggactagagttaaaatggctgcacaagcccttgtgtcttcttcacttacctcctctgttcagaccgctagacaaatattcggcacaaaaccagctgtgtccgtgaggaagacttcctttgttgttaaggctgcctcaactccacctgtcaagcaaggagcaaacagaccattgtggtttgcatcttcacaatctctgtcttacttggatggcagcttacctggcgactatggattcgaccctcttggtctttcagacccagagggtactggaggattcatcgaaccgagatggttagcctacggagagatcatcaacggacggttcgctatgttgggtgcagctggagctattgcccctgagattcttggcaaagctggtttgattccagcagacactgcccttccttggttccaaaccggtgtgattccacctgcagggacgtacagctactgggcagacccttacacactctttgttctcgagatggctttgatgggattgctgagcaccggaggtntgcaggactggtacaaccccagaatcaatgggcaaacagtaactccttggccttaannnnnnnnnnnnnnnnnnnnnnnnnnnnnnnnnnnnnnnnnnnnnnnnnn

SEQ ID NO: 6691 - DNA, 315 bp, Zea mays
  misc_feature (2)..(2): n is a, c, g, or t
  misc_feature (284)..(286): n is a, c, g, or t
  Peptide Sequence Number=SeqID_11158
  Probeset Number=SeqID_21094
cnccccccccccccccccgaaccctcctacggctccgtcagctcagccacggatgcaggcaggaatcaggttgatcagttcgcgacggagaaggctgaggacctgttcggttttcacggattgaagcttaggaatgatttctagccgaattatctctctaatttatggaaattttgatgagccgaaacgaatcccggttcattcgtcgacaagcgaatgggctctaaaagatctgcaaacacaggagtgcaagttccaatccaaaaaaaaaaaaaagaaaaaannnaaaaaaaaactcgagggggggcccggtac

SEQ ID NO: 6692 - DNA, 460 bp, Zea mays
  misc_feature (424)..(424): n is a, c, g, or t
  misc_feature (427)..(427): n is a, c, g, or t
  misc_feature (432)..(434): n is a, c, g, or t
  Probeset Number=SeqID_21095
aaaagcgataaatcgtaaggaaataaatatcatcaatgaccaagggtacccaatcatttggtaagagacaaaccaagactcacaccctctgcagaagatgcggacgtgttactttccacaaacaaaacaaggtttgcggttcatgtggatatcccgctgccagactcagaagatacgacggttggggtagaaagactgccagaagaagaggtcaaggaactggtagaatgagctatcttaagaacgttcctagaagagctaagaatggattcagaactggggttactcccagacccaaagtcagaaagaccatcacaaaataaatatagtaaacgatcctaatacgatttgagacttattccttattgtattctgtgttcatacaaggagcgaacgagaacctttgaacagcattgcttaaganaanaaaannnaaaaaactcgagggggggcccggtac

SEQ ID NO: 6693 - DNA, 535 bp, Zea mays
  Peptide Sequence Number=SeqID_11159
  Probeset Number=SeqID_21096
gtaccgggccccccctcgagttttttttttttttttttttagtggcacaggatcgaatgtcacatctttactatataacggagttctgtacaaaaataattaaataattacatcatatgaggaaacgatccagcaacccaaagttgactgggagacgacggcctagacctctcacgaacacaccatagcatcctccatgcgcctcatcttgcggtacctgctcttgacctgggacttgagattccaggtaccaggatgatcttcaggtggctcgtaacctcgcgcggagatgaaagcactcatgattatgtccacgcatcccagcggcaagcggcgcgaggtgaagtacggcgacgaattattcggccctcaattgcttccgcgctcaactggtcgtcagtacgggtttgttgcacttagttccatacccacgaccaccctaggagacgaagtacggccatccgtggctattggctatggctgcaccacatctccccgctttggctagctagcttctaattgagatcacgaccag

SEQ ID NO: 6694 - DNA, 942 bp, Zea mays
  misc_feature (1)..(45): n is a, c, g, or t
  misc_feature (932)..(942): n is a, c, g, or t
  Probeset Number=SeqID_21097
nnnnnnnnnnnnnnnnnnnnnnnnnnnnnnnnnnnnnnnnnnnnntgagggtatccctccttaccaggctacttgtcaggttctgagggataggctgctcatggcttggcttgcgagatgatcttgagatgctcactgataggatgcgacggagcacatcctgcacaatacaagatttggcatgtatcatgtgcagtaagagggcagaggaaactagaaatctgtattgcgaccatgaattctcttgccttgatcttgctgagagccagtggatggagaaatggaaaataggagacacctcctcgtagggggaggtttaatgggtataagaatctctgtgatcccattgatgatggcactcataacttggctagttggctctgcaatttcttactgggctatcatggattcagatccatcatcacagaacccaacagatatgactgcatttgtccagaacctccttggacagatgcaaacaaggttcgagtccatgtcgcagaacattgtgtcaaagatagatgaaatgggaaccaagattgatgagctcgagcagagcatcaacgatctcaaagctgagatgggcactgagacgccggtcaagaagcctgatgagccaaagcctgctgactctgcctaacttgggtgtaacccagagattgttgagtgaagatttgatgatggtgtgacaaatttcagcagtacgtgtatcttccgatgatcgtatctgttttcatgagtcctggcagttatgtagacacgaacccatcgtatgaaagatgaatccatagtttgggctctccagacatcaacgcatgttcttagcttttctgtcatctttcggcaactatttgtttgactgttataagatgttatgcaacatctactccattagaaaaaaaaaaaaaaaaaaaaaaaaaaaaaaaaaaaannnnnnnnnnn

SEQ ID NO: 6695 - DNA, 572 bp, Zea mays
  misc_feature (572)..(572): n is a, c, g, or t
  Peptide Sequence Number=SeqID_11160
  Probeset Number=SeqID_21098
aaggatcgactctctctctctctctctctctctctctctctctctctctctctctcgtctcatctgcaaatattccccgagactccaaatcgccgccatgttgagacaagcttcccgcctcatctcccgatccgccaccgcggcatcctccaaatcggtgacggctcgtgccttttcaacggagcttccgtcgacgatcgattcgactttcgtggagtcatggaagaaagtagcgccgaacatggacccgccgcagactccttcttccttcatgaagccacgtccttcgactgcttcttcgattccgacgaagctcaccgtcaatttcgtcctcccttacgcatctgagctttcctggaaagaggtcgacatggacatcattcccgcgacaacaggacaaatgggtgttttgcctggacacgttccaacaatcgctgagctgaaacccggtatcatgtccgttcacgaaggcactgacataaagaaatacttcgtcagcagtggtttcgcctttctccacgcaaactccgtcgctgacatcatagcgggtgaggccgtgccgcttgagatan

SEQ ID NO: 6696 - DNA, 657 bp, Zea mays
  misc_feature (450)..(450): n is a, c, g, or t
  misc_feature (601)..(657): n is a, c, g, or t
  Peptide Sequence Number=SeqID_11161
  Probeset Number=SeqID_21099
gcaagtgttcgctggagtcagagaaagctttgatttatacggaaagaaagtgaaatagcaaatcagagcagagctatggcggaggaagagaacgggatcgtagcgaaaccaagagccaagaaagagattgctccagggaggttgatcgatacctatgcagcacaatgcgaaaactgtcaccagtggagagtcattgatggccaggaggagtacgaggacatcagaagtcgaatgatcgacgacccattcacctgcgacaagaaacaaatctcttgcgaagaccctgcggatctcgactacgactcctctcgaacctgggtcatcgacaagcctggtctcccccaaaaccccccaaggtttcaagaggaggcctggccctccgcaaagactacctccaagagggatacttactactcccctcctaccggcaaaaagcttagggacccgcancgaagtagcctccctaccgtggagcccatccctggattccgggggggcgccccttggaagacttccctttcacgtggcccccgggggagtggagggaccttgccccccccggacccaagggggggggccctctcccggtgtaaaggggggnnnnnnnnnnnnnnnnnnnnnnnnnnnnnnnnnnnnnnnnnnnnnnnnnnnnnnnnn

SEQ ID NO: 6697 - DNA, 667 bp, Zea mays
  misc_feature (1)..(7): n is a, c, g, or t
  misc_feature (517)..(517): n is a, c, g, or t
  misc_feature (654)..(667): n is a, c, g, or t
  Peptide Sequence Number=SeqID_11162
  Probeset Number=SeqID_21100
nnnnnnncaagcaaattagcacaccgccgcaaagatgcagatcttcgtgaaaaccctaacggggaaaacaatcaccctcgaggtcgagtcctccgacaccatcgacaatgtcaaggccaagatccaggacaaggaagggatccctcccgaccagcagcgactgattttcgccgggaagcagctcgaagacggacgcacgctcgccgactacaacatccagaaggagtcgacgcttcatctcgtcctccgtctccgtggtggcgcgaagaagaggaagaagaagacgtacaccaagcccaagaagatcaagcacaagcacaagaaggtgaagctcgctgtgctccagttctacaaggtggacggatccggcaaggtgcagaggctcaggaaggagtgtcctaacgcgacttgcggtgccgggactttcatggcgagtcacttcgatcgtcactactggtggtaagtgtgggcttacctatgtttaccagaaaggagggtgccgaggcatgatctattngaaccggtagattgatctctctctccctccgattttcggtttgggattttataaaggggaggtttttggtttatcatgtaaggggattcgaggtgcccccggtttttggcccggggatttcggtttttttagtaggnnnnnnnnnnnnnn

SEQ ID NO: 6698 - DNA, 440 bp, Zea mays
  Peptide Sequence Number=SeqID_11163
  Probeset Number=SeqID_21101
acaaagcagcttctccccccagattattcacttccaaggcatttcatctttattcacttccaaaggggtaccctgagatcacaaaggatcacaaaactatggccaagggagttgcagttctgaacagcagtgagggtgttaaggggaccatcttcttcacccatgaaggaaacggtgccactactgtgacaggaactgtttctggccttaaacctggtctccatggtttccatgtccatgctcttggtgacaccactaacggttgcatgtctaccggtccacatttcaaccctgatggtaaaactcacggtgcaccggaggatgctaatcgtcatgctggcgatctaggaaacatcattgttggggatgatggaactgccaccttcacaatcactgacagccagattccccttagtggtccaaactctattgtcggaagg

SEQ ID NO: 6699 - DNA, 1760 bp, Zea mays
  misc_feature (1)..(60): n is a, c, g, or t
  misc_feature (63)..(105): n is a, c, g, or t
  misc_feature (107)..(335): n is a, c, g, or t
  misc_feature (337)..(340): n is a, c, g, or t
  misc_feature (344)..(346): n is a, c, g, or t
  misc_feature (376)..(379): n is a, c, g, or t
  misc_feature (1730)..(1736): n is a, c, g, or t
  misc_feature (1742)..(1760): n is a, c, g, or t
  Peptide Sequence Number=SeqID_11164
  Probeset Number=SeqID_21102
nnnnnnnnnnnnnnnnnnnnnnnnnnnnnnnnnnnnnnnnnnnnnnnnnnnnnnnnnnnnggnnnnnnnnnnnnnnnnnnnnnnnnnnnnnnnnnnnnnnnnnnngnnnnnnnnnnnnnnnnnnnnnnnnnnnnnnnnnnnnnnnnnnnnnnnnnnnnnnnnnnnnnnnnnnnnnnnnnnnnnnnnnnnnnnnnnnnnnnnnnnnnnnnnnnnnnnnnnnnnnnnnnnnnnnnnnnnnnnnnnnnnnnnnnnnnnnnnnnnnnnnnnnnnnnnnnnnnnnnnnnnnnnnnnnnnnnnnnnnnnnnnnnnnnnnnnnnnnnnnnnnnnnnnnnnnncnnnnttcnnnctttattgtgtttaaacaacatcctaatcnnnnaacaacctttcacctcgagatattttcttgaaaggaaacaaaaaaaaaatgggtctgcatccaatcgccgacgctgacgagagcaaccccttcggctctctctccgccgatgagttctacgcgaagcattccgtcacccattcctccgccttcaccaccaaccctcgcggcctcaagatcttcacacaatggtggtctccactccctccaactactcccgtcggtatcgtcgccgtcgttcacggcttcaccggcgaatccagctggttcctccagctcacgtccatcctcttcgctaaatccggttacatcacctgcgcgatcgatcaccaagggcatggattctccgatggcctcgtggctcatatccctgacatcaatcccgtcgtggatgactgtatctccttcttcgacgacttccgtaaccgtaaccgccaggagacgccggatttgccgtgttttctctactccgagtccttaggcggagccatcgcgctctacatctcgctccggcagagaggtgtatgggacggactcatcctcaacggagccatgtgtggaatcagcgcgaagttcaaaccgccgtggccgttggagcatttgctcttcgtcgtggcgaaccttatccccacctggcgcgtcatccccactcgcggatcgattcccgatgtttccttcaaggagccgtggaagaggaagctcgcgattgctagtcctaggaggacggtggcgaggccgcgcgccgcgacggcgtacgagctgatccgtgtatgtaacgagcttcaggggaggttcgaggaggtggaggtgccgcttctgatagtgcatggaggaggagacgttgtttgcgaccaagcgtgcgtagaggagcttcatcggagagcaagcagtggggataagacgatcaagatctatccggggatgtggcatcagatggttggtgaatcggaggaggacgttgatttggtgtacggtgacatcctgacatggctcaagacccgatcggaaagggccgctgagaggaaacgggagttgcgcgttggcggcggagctttagagtctttttgactctttgggtattgagttgtagcccaataggccagtgccatctggaagcaactatttatgggttatgcttaattgtttcgtagcacatggtttacagttaaaccgtcgacaaaaaaagagtttacagttaaaccaatgaatattccaatatactttttgggcaataaattattaaaaactatttttgtaaaattaaattttaagattctgtatcaatttgagaaaacaagaaaaactaaccattaatgatggatccaaaaaaaaaaaaaaaaaacttatcgannnnnnncacctnnnnnnnnnnnnnnnnnnn

SEQ ID NO: 6700 - DNA, 1217 bp, Zea mays
  misc_feature (1)..(77): n is a, c, g, or t
  misc_feature (79)..(86): n is a, c, g, or t
  misc_feature (88)..(92): n is a, c, g, or t
  misc_feature (95)..(95): n is a, c, g, or t
  misc_feature (108)..(110): n is a, c, g, or t
  misc_feature (130)..(131): n is a, c, g, or t
  misc_feature (139)..(146): n is a, c, g, or t
  misc_feature (148)..(162): n is a, c, g, or t
  misc_feature (165)..(167): n is a, c, g, or t
  misc_feature (172)..(172): n is a, c, g, or t
  misc_feature (187)..(190): n is a, c, g, or t
  misc_feature (194)..(196): n is a, c, g, or t
  misc_feature (199)..(201): n is a, c, g, or t
  misc_feature (204)..(204): n is a, c, g, or t
  misc_feature (206)..(209): n is a, c, g, or t
  misc_feature (217)..(217): n is a, c, g, or t
  misc_feature (219)..(219): n is a, c, g, or t
  misc_feature (1217)..(1217): n is a, c, g, or t
  Peptide Sequence Number=SeqID_11165
  Probeset Number=SeqID_21103
nnnnnnnnnnnnnnnnnnnnnnnnnnnnnnnnnnnnnnnnnnnnnnnnnnnnnnnnnnnnnnnnnnnnnnnnnnnnnannnnnnnnannnnnctnctttcccccctcnnnttccaactttattgtgtttnncccccccnnnnnnnngnnnnnnnnnnnnnnnctnnnactancccccggcccgggannnngttnnncgnnnganannnntacctagnanatcctaatcgaaaagaatcagcttctctccgataccttcttaaaaaaaaatcaaaaaaaatttcaatatgcaaagaaaaacaatggtgacgacgtcgtctcgtacaaagtctaacggccctgtgctccgttcccaatcgccgtcgggccgtttctgcggcgcttactctaatccaatcccgtcgtcgtcgtcttcctcagcgttcgcttcttctacgagctctagcttctcatctccttcctcagctttcttcagcaaccgtcacgataatcatcaccacagccaccaccgctccgcgtcaccgactcgcgtgaatctatacaaacaaccgcaaccgattgcgttttcgctagacaccagatccatctccccgacgacgacgaacagatccatctccgtcgcgaagaagcctcagcctagcaagatctcttccccgaggaggtgtatgtgctctccgacgacgcatcccggatccttccgatgcagtttgcataaaaacgtggcgaatccgcacgggcaaggaacggcgtcgtatccgacgaacagtttgaacatgcggagatccgcgatgacgaattcgctggtgaggatcggtggagttgagggagagtgggtgaggagagcgttgacgactttgataaggccttcgtcgcatcatctgagaaggagagctgcttatcagcctcgtcccagtaggctatcgatcatgtcgaaggccgccaccgagtgtaattgatatgatattttaggtttctggtttgttcttctctttaataaattaatagggctgcagatctgggaaggaaggatctgaatcgggcgagatctgcggcgattgtgggagagaatttcaaattcgaaatcgagttttgtaaaacgaagatcgaaagaagcactcaccatcatatattttttttttgttgttgggtgtagaaagatgcgaaatgcatttgtacatacttaattttactgttcttgcgtcaaaaaaaaaaaaaaan

SEQ ID NO: 6701 - DNA, 629 bp, Zea mays
  Peptide Sequence Number=SeqID_11166
  Probeset Number=SeqID_21104
gcacaccgaagaaagactactcccatcatctcctccagcttcttcttcttcgtctctgaaactagtttgattcagccatggctaatgcggcgtcaggtatggcagtccatgatgactgcaagctcaagtttctcgaactcaaggctaaaaggactttccgtttcatcgtttacaagatcgaggagcagcacaaacaagtggttgttgagaagctcggcgagcctggtcaatcccatgatgactttgcagcttctcttcctgctgatgaatgccgttacgccggtttcgatttcgatttcgtcactgctgagagttgccagaagagcaagatcttcttcgtcgcatggtctccggacacagcaagagtgagaagcaagatgatctacgcgagctctaaggacaggttcaagagagagcttgacggaattcaagtagagcttcaagctaccgatccaactgagatggatctcgatgttttcaaaagccgagccaactgaggaatacatcctccataaatgcatgggttgaatccacatttctccctactattactgaattgatatatgcttggtctttaacgttgctgggaacggcaccaccaaaaccaaaacagtttcatttcattggtc

SEQ ID NO: 6702 - DNA, 1219 bp, Zea mays
  misc_feature (1)..(4): n is a, c, g, or t
  misc_feature (8)..(10): n is a, c, g, or t
  misc_feature (40)..(42): n is a, c, g, or t
  misc_feature (130)..(132): n is a, c, g, or t
  misc_feature (141)..(142): n is a, c, g, or t
  misc_feature (159)..(161): n is a, c, g, or t
  misc_feature (173)..(177): n is a, c, g, or t
  misc_feature (199)..(201): n is a, c, g, or t
  misc_feature (206)..(208): n is a, c, g, or t
  misc_feature (228)..(245): n is a, c, g, or t
  misc_feature (251)..(256): n is a, c, g, or t
  misc_feature (263)..(265): n is a, c, g, or t
  misc_feature (271)..(275): n is a, c, g, or t
  misc_feature (278)..(283): n is a, c, g, or t
  misc_feature (285)..(287): n is a, c, g, or t
  misc_feature (294)..(307): n is a, c, g, or t
  misc_feature (310)..(314): n is a, c, g, or t
  misc_feature (322)..(330): n is a, c, g, or t
  misc_feature (334)..(336): n is a, c, g, or t
  misc_feature (341)..(363): n is a, c, g, or t
  misc_feature (371)..(371): n is a, c, g, or t
  misc_feature (374)..(394): n is a, c, g, or t
  misc_feature (397)..(401): n is a, c, g, or t
  misc_feature (403)..(440): n is a, c, g, or t
  misc_feature (442)..(446): n is a, c, g, or t
  misc_feature (458)..(462): n is a, c, g, or t
  misc_feature (472)..(476): n is a, c, g, or t
  misc_feature (478)..(480): n is a, c, g, or t
  misc_feature (482)..(489): n is a, c, g, or t
  misc_feature (497)..(504): n is a, c, g, or t
  misc_feature (506)..(507): n is a, c, g, or t
  misc_feature (510)..(518): n is a, c, g, or t
  misc_feature (525)..(525): n is a, c, g, or t
  misc_feature (543)..(546): n is a, c, g, or t
  misc_feature (552)..(554): n is a, c, g, or t
  misc_feature (562)..(562): n is a, c, g, or t
  misc_feature (566)..(568): n is a, c, g, or t
  misc_feature (590)..(590): n is a, c, g, or t
  misc_feature (592)..(592): n is a, c, g, or t
  misc_feature (598)..(599): n is a, c, g, or t
  misc_feature (632)..(632): n is a, c, g, or t
  misc_feature (647)..(649): n is a, c, g, or t
  misc_feature (1190)..(1219): n is a, c, g, or t
  Peptide Sequence Number=SeqID_11167
  Probeset Number=SeqID_21105
nnnntcgnnntcccaacaccttcgtccccttctccagtgnnncccatctcccccgagcacccgccgccgccgccgccgccgttgagcacccgccgtcgcagggatccgcgctgcgtccctatccaatcgnnntctgcggcnnagaggcgatggattcgnnnggcgcctcgaannnnnaggaggtggccgccgcttaccnnngcagnnnggccaatcaggcgaggctgnnnnnnnnnnnnnnnnnnctcctnnnnnnccccatnnncgccgnnnnnccnnnnnnannncttcgcnnnnnnnnnnnnnnacnnnnntgaacctnnnnnnnnnaagnnncatgnnnnnnnnnnnnnnnnnnnnnnnaaaacacntcnnnnnnnnnnnnnnnnnnnnncannnnngnnnnnnnnnnnnnnnnnnnnnnnnnnnnnnnnnnnnnngnnnnnagatagagcagnnnnngatgggccannnnncnnnannnnnnnngcggaatnnnnnnnntnnccnnnnnnnnnatcagantgagaagttgatagatgnnnnttctgnnntttcttcntacnnnattcgtaataattccaaggttngnttctcnncgcacgtcatgtcgagagtacaccagaagcatnttaggagaagaaaannncgtttcttccacgggcttagcaggaagatgtgatcccactcccccctcatgatttctgatcaggagaaacccttagagccattggagagtgattacttgcgaaacgaagaatgttccaagactcggctatggcgaataaatggggtgtaatttcaaggaagcaattcactgatcgagaaagctaacttccagccgactgtaagttagcgacatatccacacgactcgcgagccgcttgatccccgctcgttcagttagcgacatatccacatgaaattaaaaatagggccaattcgaacccacgaccagtcatttgaagcccatgacgcgcaaccaactggaatatgtacctattgtgtttcctagacggattaacaggattttataccttactaactgagaatgggaaagaaaaacaacatcgcctttgacgagggaacaaattcatctagtccaggttttgtaaaggactgatgcatcatgttgtacttgtctctattttatagtgatgcacattttctagcaaaaaaaaaaaaaaaannnnnnnnnnnnnnnnnnnnnnnnnnnnnn

SEQ ID NO: 6703 - DNA, 599 bp, Zea mays
  Probeset Number=SeqID_21106
acgaatcttaggtaaatttcctccgattttcttcgtttttttcctctcgatttctcaaattcatctcgatagtggatctctctctctctctttcgaaccaaagcatgaagggaggtaaatcaaaggctgataccaagagctccaagctcgcggtgaacaagaagcctgcaaaggcaagcaaagcggctgcggctgctaaggatcctaacaaacctaagaggccttccagtgccttcttcgttttcatggaggatttccgtcagacttacaagaaggatcatcccaataacaaatctgttgctgctgttgggaaagctggtggacacaagtggaaatccttgtctgacactgagaaggctccctacgttgctaaggctgacacgcgcaaggttgactacgagaagaacatgaaagcctacaacaagaagctggaggaaggtccaaaggaggatgaggaggaatctgacaagtccgtgtctgaggttaatgatgaggatgatgccgatgatgggagtgatgaggaggaagacgatgactaagaggagtatgtgtcgggaggcataatataggacgctgcaatgatctcttggatgttcttt

SEQ ID NO: 6704 - DNA, 436 bp, Zea mays
  Peptide Sequence Number=SeqID_11168
  Probeset Number=SeqID_21107
atcactctacaacatttgtggaataattaactatcagctttacgatcttgaaactattagggttgataccatggggttactagatcatctttgggatgataccgtcgctggtcctctgccagagaacggccttggcaagcttcggaaacaccatactttcagtttccggccaagctcagccaatgatcaatcggacgtgaggtcgtacggcggagattcaccggaagaggcagtgaaagtaacacgcagcatcatgataataaaaccaccaggttaccaaggcggttcagctccggtgtcgccggccggttcaactacacccgtatcccccagtcctttctctggaggaaaggaaccctttcggtttaggagaaggtcggcatcggacgcgttcgataaggcagcaggatcagagaatggaccaaggaactctcct

SEQ ID NO: 6705 - DNA, 422 bp, Zea mays
  misc_feature (400)..(400): n is a, c, g, or t
  Peptide Sequence Number=SeqID_11169
  Probeset Number=SeqID_21108
ctctgatctcttatcactcactctctctctcccctaacctcgccaagcagctacaatgggccgttaccttctcagatctacacacagagcagggtgtcaagtccgtggaggagcacctcgccggaaaaacctacatctccggagatcagttgactgtggatgatgtgaaggtatacgctgccatcgtggagaaaccgagcgatgccttccctaatgctagcaagtggtacgattccgtcgcgtcccaccttgctaaaagtttccctggtaaggccgtaggagtttcaatcggtggctctgctgcttctgctcctgctcaagctgaggcacctgcagctgtagctgatgatgatgatgacatggatctgtttggtgacgagaccgaggaggaaaagaaagncgcagaggagagggaggcttct

SEQ ID NO: 6706 - DNA, 865 bp, Zea mays
  misc_feature (1)..(22): n is a, c, g, or t
  misc_feature (24)..(31): n is a, c, g, or t
  misc_feature (33)..(33): n is a, c, g, or t
  misc_feature (35)..(47): n is a, c, g, or t
  misc_feature (54)..(67): n is a, c, g, or t
  misc_feature (70)..(80): n is a, c, g, or t
  misc_feature (82)..(94): n is a, c, g, or t
  misc_feature (97)..(102): n is a, c, g, or t
  misc_feature (104)..(164): n is a, c, g, or t
  misc_feature (168)..(191): n is a, c, g, or t
  misc_feature (193)..(200): n is a, c, g, or t
  misc_feature (204)..(204): n is a, c, g, or t
  misc_feature (206)..(207): n is a, c, g, or t
  misc_feature (211)..(224): n is a, c, g, or t
  misc_feature (226)..(229): n is a, c, g, or t
  misc_feature (233)..(261): n is a, c, g, or t
  misc_feature (271)..(275): n is a, c, g, or t
  misc_feature (282)..(285): n is a, c, g, or t
  misc_feature (287)..(291): n is a, c, g, or t
  misc_feature (293)..(293): n is a, c, g, or t
  misc_feature (297)..(304): n is a, c, g, or t
  misc_feature (453)..(454): n is a, c, g, or t
  misc_feature (714)..(719): n is a, c, g, or t
  misc_feature (748)..(750): n is a, c, g, or t
  misc_feature (863)..(865): n is a, c, g, or t
  Peptide Sequence Number=SeqID_11170
  Probeset Number=SeqID_21109
nnnnnnnnnnnnnnnnnnnnnnannnnnnnngntnnnnnnnnnnnnnccttggnnnnnnnnnnnnnnttnnnnnnnnnnnannnnnnnnnnnnnttnnnnnnannnnnnnnnnnnnnnnnnnnnnnnnnnnnnnnnnnnnnnnnnnnnnnnnnnnnnnnnnnnnaaannnnnnnnnnnnnnnnnnnnnnnngnnnnnnnntagnannattnnnnnnnnnnnnnncnnnntttnnnnnnnnnnnnnnnnnnnnnnnnnnnnncatgtcagannnnnaaaggannnntnnnnnantcannnnnnnnagctgtatcatagccttccttaccatatggtcgaatttgtattagacgattctcattgcaaggtgacagccagccttagatatgcagatctcatttcggtggttccaactcgaatttcagtactaacctggcgtatgttcaataaaaannctatgagtaggaaggaagttggactctcgggaagtcatttttgcacaattcgcctaacatatgcagaagatgccttacgcaccctgagtttttctgaagcatatcccgagattgtattcacctttccacaggcgattcggcagccgtatcatcaaaaagcccccgcttagagctttgccctttcagtagcctagatgcgtcggtaaaaattcttggtagagatgttaaatattagaaaatcaacttcagaattattaccnnnnnncgtagtcaaattgctcaggttgagttcannntgctgtaatattgtcatatagcatttagcatttgtaattcggcctctatggcctcgttattccttcaatacctactccggtgtcttgtatcattaatacaacagggctaggtnnn

SEQ ID NO: 6707 - DNA, 716 bp, Zea mays
  misc_feature (1)..(5): n is a, c, g, or t
  misc_feature (15)..(15): n is a, c, g, or t
  misc_feature (18)..(19): n is a, c, g, or t
  misc_feature (28)..(33): n is a, c, g, or t
  misc_feature (601)..(716): n is a, c, g, or t
  Peptide Sequence Number=SeqID_11171
  Probeset Number=SeqID_21110
nnnnncctcgaggcnggnngggagtggnnnnnnttcacgcctgagttaacttctctctgctctgttcacttcgttctagcggggagcgccgccgctgcagttgccgccgccaccagagcagtccacctcggtctgatatggcgaccgggagtgcaagtgccatcgcgtccttctccgtggcggcggcagcggctgctgctctgcgcgtcaggcggccatgcgctcgcgcttgcgcttgggccccctcgcagcgaccgcagcaaggggcactcgtcagcctcaagccttgcgcctcactggcaccacacgctcccccccccccccggcggagttccgattcctctgtcttttgggcccccccccccgcttatcatctgtgtcctcccatcctggattaagccttcaattattttcccgtccccacaggcttctagcctctcctccgcacgtaatttccttctcacctctcccctctttttacccgtggctaccaaactcccacccctactcatcctttctatacacaccttgtgcccttcccctcccctactgttccgttttcgctccccgtgcgcgtatggactcgccctcctcgttatgnnnnnnnnnnnnnnnnnnnnnnnnnnnnnnnnnnnnnnnnnnnnnnnnnnnnnnnnnnnnnnnnnnnnnnnnnnnnnnnnnnnnnnnnnnnnnnnnnnnnnnnnnnnnnnnnnnnn

SEQ ID NO: 6708 - DNA, 716 bp, Zea mays
  misc_feature (1)..(116): n is a, c, g, or t
  misc_feature (684)..(689): n is a, c, g, or t
  misc_feature (698)..(699): n is a, c, g, or t
  misc_feature (702)..(702): n is a, c, g, or t
  misc_feature (712)..(716): n is a, c, g, or t
  Probeset Number=SeqID_21111
nnnnnnnnnnnnnnnnnnnnnnnnnnnnnnnnnnnnnnnnnnnnnnnnnnnnnnnnnnnnnnnnnnnnnnnnnnnnnnnnnnnnnnnnnnnnnnnnnnnnnnnnnnnnnnnnnnnncataacgaggagggcgagtccatacgcgcacggggagcgaaaacggaacagtaggggaggggaagggcacaaggtgtgtatagaaaggatgagtaggggtgggagtttggtagccacgggtaaaaagaggggagaggtgagaaggaaattacgtgcggaggagaggctagaagcctgtggggacgggaaaataattgaaggcttaatccaggatgggaggacacagatgataagcgggggggggggcccaaaagacagaggaatcggaactccgccgggggggggggggagcgtgtggtgccagtgaggcgcaaggcttgaggctgacgagtgccccttgctgcggtcgctgcgagggggcccaagcgcaagcgcgagcgcatggccgcctgacgcgcagagcagcagccgctgccgccgccacggagaaggacgcgatggcacttgcactcccggtcgccatatcagaccgaggtggactgctctggtggcggcggcaactgcagcggcggcgctccccgctagaacgaagtgaacagagcagagagaagttaactcaggcgtgaannnnnnccactcccnnccngcctcgaggnnnnn

SEQ ID NO: 6709 - DNA, 374 bp, Zea mays
  Peptide Sequence Number=SeqID_11172
  Probeset Number=SeqID_21112
acctcctcctcctcctcatcgcaagcatttcgtcagggtgaacaaaaaaatgagcggagccggtaagaaagtagcggatgtggcgttcaaagcttcgaggacgattgattgggaagggatggcgaaggtccttgtgaccgatgaggctcgaagagagttctctaacctccgtcgtgctttcgatgaggttaacactcagctccaaaccaagttcagtcaggagcctgaacccattgattgggatttctacagaaagggtattgggtctggcattgttgacatgtacaaggaagcttacgacagcgttgagattcccaagttcgtggacactgttactcctgaatacaagccaaagttcgatgctttgctggtgg

SEQ ID NO: 6710 - DNA, 959 bp, Zea mays
  misc_feature (1)..(16): n is a, c, g, or t
  misc_feature (18)..(36): n is a, c, g, or t
  misc_feature (41)..(46): n is a, c, g, or t
  misc_feature (48)..(50): n is a, c, g, or t
  misc_feature (52)..(52): n is a, c, g, or t
  misc_feature (54)..(66): n is a, c, g, or t
  misc_feature (68)..(120): n is a, c, g, or t
  misc_feature (122)..(135): n is a, c, g, or t
  misc_feature (137)..(149): n is a, c, g, or t
  misc_feature (151)..(155): n is a, c, g, or t
  misc_feature (157)..(166): n is a, c, g, or t
  misc_feature (176)..(178): n is a, c, g, or t
  misc_feature (182)..(185): n is a, c, g, or t
  misc_feature (201)..(203): n is a, c, g, or t
  misc_feature (810)..(814): n is a, c, g, or t
  misc_feature (816)..(825): n is a, c, g, or t
  misc_feature (828)..(836): n is a, c, g, or t
  misc_feature (844)..(844): n is a, c, g, or t
  misc_feature (846)..(856): n is a, c, g, or t
  misc_feature (858)..(864): n is a, c, g, or t
  misc_feature (866)..(872): n is a, c, g, or t
  misc_feature (874)..(880): n is a, c, g, or t
  misc_feature (887)..(891): n is a, c, g, or t
  misc_feature (896)..(900): n is a, c, g, or t
  misc_feature (903)..(943): n is a, c, g, or t
  misc_feature (945)..(959): n is a, c, g, or t
  Peptide Sequence Number=SeqID_11173
  Probeset Number=SeqID_21113
nnnnnnnnnnnnnnnntnnnnnnnnnnnnnnnnnnnggggnnnnnnannntntnnnnnnnnnnnnnannnnnnnnnnnnnnnnnnnnnnnnnnnnnnnnnnnnnnnnnnnnnnnnnnnnnannnnnnnnnnnnnncnnnnnnnnnnnnncnnnnnannnnnnnnnnttcccccctnnngttnnnnctttattgtgtttaannnacatcctaatcgaaaaagttcgccgtcgttgagcttttatccgcttctccatcaactctgatcatggcgttgaacaccggcatcagatctgtctcaaggctcatagcttcatccgaatcgtcagtctccagatctgtgagcagaagcttccactcaactggagctaagaagatgagcggaggacatggccatgacgagccttactacctccacgccaagcacatgtacaatttggaccgcatgaagttccaaggtctcaagatgtctctcgctgtcttcaccgctttcagcatcggtgttggtgttcccatctttgctgttgtcttccagcagaggaagaccgcttctggttgaatttactcgagtctctctgcttcaataaatttgtatgagttatcaaacttttctctttctgcaagagagaatgtttcttgcttcttatggatcttagctacaagtatttgtcatttcttttctgtttcttcatcctttgctggctgtttgacgctggaataatgataatccgacaattatgtatttttttaatttggattcgggagcttctgtctgaatgttgttcagttcgagccaaaaaaaaaaaaaaaannnnnannnnnnnnnnccnnnnnnnnnggggggcncnnnnnnnnnnncnnnnnnnannnnnnnannnnnnncgcgctnnnnngggcnnnnnttnnnnnnnnnnnnnnnnnnnnnnnnnnnnnnnnnnnnnnnnntnnnnnnnnnnnnnnn

SEQ ID NO: 6711 - DNA, 637 bp, Zea mays
  misc_feature (1)..(4): n is a, c, g, or t
  misc_feature (619)..(637): n is a, c, g, or t
  Peptide Sequence Number=SeqID_11174
  Probeset Number=SeqID_21114
nnnntagctcattcacacaccctcgagtttcctccctctgcgtctctctcttctcgaagaaagctcgcccccacagctccacaatgatcatgtcagaggagaaccgcagagaaatctgcaagtaccttttcaaagaaggagttttgtttgcgaagaaagacttcaacctcgcgaagcaccctttgattgagtcagtaccgaacctgcaagtcatcaagctgatgcaatccttcaagtccaaggagtatgttagggagacgttcgcctggatgcattactattggtttctcaccaacgaagggattgagttcttgaggacttaccttaaccttccttctgatgttgttcccgctactttgaagaagtctgcgaagcccattggtcgtccctttggtggtggcccacctggcgatcgcccaagaggacctaggtttgaaggtggagaccgtcctaggtacgggaccgtgatgggtaccgccgtggtggtgaaggtgaaaagggtggagctccagctgattaccagccttctttcccaggaagtggtggtaggcctggttttggccgtggtgctggaggttacagcgcggcggcaccatctggttccggcttgcctttgaannnnnnnnnnnnnnnnnnn

SEQ ID NO: 6712 - DNA, 454 bp, Zea mays
  misc_feature (46)..(47): n is a, c, g, or t
  misc_feature (58)..(58): n is a, c, g, or t
  misc_feature (73)..(73): n is a, c, g, or t
  misc_feature (76)..(77): n is a, c, g, or t
  misc_feature (79)..(79): n is a, c, g, or t
  misc_feature (84)..(85): n is a, c, g, or t
  misc_feature (89)..(89): n is a, c, g, or t
  misc_feature (91)..(91): n is a, c, g, or t
  misc_feature (94)..(94): n is a, c, g, or t
  misc_feature (99)..(99): n is a, c, g, or t
  misc_feature (109)..(110): n is a, c, g, or t
  misc_feature (121)..(121): n is a, c, g, or t
  misc_feature (123)..(125): n is a, c, g, or t
  misc_feature (129)..(131): n is a, c, g, or t
  misc_feature (133)..(133): n is a, c, g, or t
  misc_feature (136)..(136): n is a, c, g, or t
  misc_feature (141)..(141): n is a, c, g, or t
  misc_feature (143)..(143): n is a, c, g, or t
  misc_feature (159)..(159): n is a, c, g, or t
  misc_feature (164)..(165): n is a, c, g, or t
  misc_feature (172)..(172): n is a, c, g, or t
  misc_feature (200)..(200): n is a, c, g, or t
  misc_feature (214)..(214): n is a, c, g, or t
  misc_feature (229)..(230): n is a, c, g, or t
  misc_feature (244)..(244): n is a, c, g, or t
  misc_feature (291)..(293): n is a, c, g, or t
  misc_feature (296)..(296): n is a, c, g, or t
  misc_feature (298)..(298): n is a, c, g, or t
  misc_feature (330)..(330): n is a, c, g, or t
  misc_feature (335)..(335): n is a, c, g, or t
  misc_feature (351)..(351): n is a, c, g, or t
  misc_feature (415)..(415): n is a, c, g, or t
  misc_feature (417)..(417): n is a, c, g, or t
  misc_feature (419)..(419): n is a, c, g, or t
  misc_feature (423)..(423): n is a, c, g, or t
  misc_feature (445)..(445): n is a, c, g, or t
  misc_feature (447)..(447): n is a, c, g, or t
  Peptide Sequence Number=SeqID_11175
  Probeset Number=SeqID_21115
tctctttccttaatttgcatttagggtgttctagggcagggttganntacaacagggntttaataatttccanaanntntgtannaatnanagngggtngacactatcnnattttaccttntnnnagannnangangcttngntaataaggatttcganctccnnaagaatncgttgattgatgtaccaaagctgcaagngattaagctcatgnagagtttcaagtccnnggagtacgttaggnagacatttgcgtggatgcattattattggtttctgactaatgaaggnnntgngntcttgagaacttatcttaaccttccttccgangttgnccctgctactttgaanaagcctgctaagccccgggtggtcgtccctttggagggcccccctggtgatcgccaaagaggancncnctcnctctgatggagaccgtccccananttggggt

SEQ ID NO: 6713 - DNA, 478 bp, Zea mays
  Peptide Sequence Number=SeqID_11176
  Probeset Number=SeqID_21116
aatcaaaccccaaaaaactctcaatggcagccatgaactcaagtgttctcacctgcagctacgcaatctctggtgctggatcagtagagctaaaccagaaagtgggtttggtgagttcatcagttgggtttggtcagaagaaacagacggttcctgtgatcaaagctcaaagagttggaggtgatgatgttgatgggtctagtggaagaagatcagccatggtgttcttagcggctacactcttctcatctgctgctgtgtctgcttctgctaatgctagcgtcttcgatgaatacctcgagaagagcaaagccaacaaagaactgaatgataagaagagattggcaacaagtggagcaaactttgcgagagcgttcactgtccaattcggaagctgcaagttccctgagaatttcactggttgccaagatcttgccaagcaaaagaaagtcccatttatctctgaagattggcgttg

SEQ ID NO: 6714 - DNA, 187 bp, Zea mays
  misc_feature (46)..(48): n is a, c, g, or t
  Peptide Sequence Number=SeqID_11177
  Probeset Number=SeqID_21117
acgataccattacctagaacatcctaatcgaaaagacattcaaggnnnacgatgattctcatatgtaataatgcagcagaaggcgttctatcttcattcttcttcaagtatggagacaccattttgaacaaggattcgacgactgatgccgcgatctttactggcctagcttctgctgcatttttgg

SEQ ID NO: 6715 - DNA, 855 bp, Zea mays
  Peptide Sequence Number=SeqID_11178
  Probeset Number=SeqID_21118
gatgccgtgtgggtgggtcgagtgtgtctttcttccttgatacgctgcggacatgagtggtgtagaagcagtattgcacgactgagattttattgatgattcatgctgtgggtcttccaccagcctcctgtgatcgaataagcagcatacggtgacaaattagtactcctttttcccttcgacggagctggtgcctcaggcagagatacactgacgcgggatcttcgcgaagggcattgtcacagcatggatgtctttgctgatgatgtcgcatagcgcttgcatcgtatgcctcagatgctgtcggcctcgaacaggacgacgacgtagcacctcgggagattacaggatggctcggacggagtggatctgccgccagacatccggatggaaggcctgagggatgtcgctcaccaccaacgggaagaggaactttgcgacgaccacctccgtggtcttcaggcacttgaggtatctcgcccagaaccgcggttctgcgccagatcctgaggtacttcttcacacggagctgctgcatccgcaacctgcctcttcaccttctggtccatgagatcgctcgggacttcgccaccgatgtgcttgtccagagccacgccttgcatgagccttcatgatccccccgatgcctgacctcatctcgtctgtgccaggacaccaccctctgtgacgtccacgatcgagctgggtaccgtagtgcccagaggaggtactgctcgcccgacgatgcccctggtggaggctgcgtaccgcatatgtcgctcccctgaccccatgaactcccttaggggatggaagaagggcaattttgtaaccctagggcgcgccggagctatt

SEQ ID NO: 6716 - DNA, 855 bp, Zea mays
  Probeset Number=SeqID_21119
aatagctccggcgcgccctagggttacaaaattgcccttcttccatcccctaagggagttcatggggtcaggggagcgacatatgcggtacgcagcctccaccaggggcatcgtcgggcgagcagtacctcctctgggcactacggtacccagctcgatcgtggacgtcacagagggtggtgtcctggcacagacgagatgaggtcaggcatcggggggatcatgaaggctcatgcaaggcgtggctctggacaagcacatcggtggcgaagtcccgagcgatctcatggaccagaaggtgaagaggcaggttgcggatgcagcagctccgtgtgaagaagtacctcaggatctggcgcagaaccgcggttctgggcgagatacctcaagtgcctgaagaccacggaggtggtcgtcgcaaagttcctcttcccgttggtggtgagcgacatccctcaggccttccatccggatgtctggcggcagatccactccgtccgagccatcctgtaatctcccgaggtgctacgtcgtcgtcctgttcgaggccgacagcatctgaggcatacgatgcaagcgctatgcgacatcatcagcaaagacatccatgctgtgacaatgcccttcgcgaagatcccgcgtcagtgtatctctgcctgaggcaccagctccgtcgaagggaaaaaggagtactaatttgtcaccgtatgctgcttattcgatcacaggaggctggtggaagacccacagcatgaatcatcaataaaatctcagtcgtgcaatactgcttctacaccactcatgtccgcagcgtatcaaggaagaaagacacactcgacccacccacacggcatc

SEQ ID NO: 6717 - DNA, 1381 bp, Zea mays
  misc_feature (1)..(4): n is a, c, g, or t
  misc_feature (1378)..(1381): n is a, c, g, or t
  Peptide Sequence Number=SeqID_11179
  Probeset Number=SeqID_21120
nnnnttttttttttttttttggtaaaatgttaaatattataccattttcaattttgacagaagttacaagagatgactagtagcagagaaataataacaagacgacaccgaaacaaactacggacaacatcaacgaccaaacctaagagcaacacagcaaaacaaataaacggattgatagcgagacagcctcggaccaaactacttcaaaactacctgagagaaacatgtcggttgccgcgagctaccgagagaagggcaccctcaaaccctgaatgctacggctcctacagcttccaactagtaccctagagcgaaccaaagcatagaatccaagctcgagctccaaagcctgacacgaatgaagaaaccaccggcggtacgaggagaagccgagatccgacgatgccgtcgttcagtggcttacgctggagattaccgcctccattgcattccaccgggaccgtgtacacccatttaaccgcaacccatatagagtagacatatcgaaaaacggacaaccctccggaggagactcaaccaaagccgaacctagagcttgtagcctaactatctcaccacaaattcacaagagccgtaagcggctctcaagacatgacacaatgaagctgcgattatttgagacgagccaggagacggagcaggccacaacaccattaccacttagatttgcgggatgaaaagagcaaacagagagcaagagccaaagctatcacaaaccagatgcgccatagaacatcaacgccaagccaccaggagacgcggaaagcagaccaacgggaccaccaccgacgaaaccctaagcaccaccaccaccagagaactcgaaggcggaccacaaagtaagcagagagaagaagactttaccgggaaccagtgaagtcagaaccccaacaccacacgcagccccactcaccaccagacgccgccggaagagagataaagccgacgaggcattaaaaggcgcagcacgcgccaccaggctcggagatgcgaaccttcttcacgggaaaattgccggtaactccacgccagatagagaatgatcccgacgccggaagaagccgtcctcaaacaaccccaacaatcgagaagcctagatctgaacagcagaggaccagatctgcgacgaagaaacgcaacccctcagccgagaacaacgcaggtgacgggagagagaggagacagaacaccggaggaacaagcgtccggcggccgcgaaaagaggcggcggccgccggagaagggcacacgattagggttttggttaggttagagagaagggggagcaatttattttagagagagaagtatgtgaatataaagacatttttcgattaggatgaactaggtaacnnnn

SEQ ID NO: 6718 - DNA, 1176 bp, Zea mays
  misc_feature (1)..(5): n is a, c, g, or t
  misc_feature (14)..(21): n is a, c, g, or t
  misc_feature (23)..(39): n is a, c, g, or t
  misc_feature (47)..(49): n is a, c, g, or t
  misc_feature (52)..(52): n is a, c, g, or t
  misc_feature (54)..(58): n is a, c, g, or t
  misc_feature (60)..(60): n is a, c, g, or t
  misc_feature (74)..(76): n is a, c, g, or t
  misc_feature (106)..(109): n is a, c, g, or t
  misc_feature (111)..(115): n is a, c, g, or t
  misc_feature (142)..(146): n is a, c, g, or t
  misc_feature (148)..(148): n is a, c, g, or t
  misc_feature (216)..(220): n is a, c, g, or t
  misc_feature (414)..(414): n is a, c, g, or t
  misc_feature (417)..(418): n is a, c, g, or t
  misc_feature (455)..(455): n is a, c, g, or t
  misc_feature (459)..(461): n is a, c, g, or t
  misc_feature (494)..(501): n is a, c, g, or t
  misc_feature (517)..(517): n is a, c, g, or t
  misc_feature (521)..(521): n is a, c, g, or t
  misc_feature (584)..(584): n is a, c, g, or t
  misc_feature (882)..(882): n is a, c, g, or t
  misc_feature (891)..(891): n is a, c, g, or t
  misc_feature (973)..(1176): n is a, c, g, or t
  Probeset Number=SeqID_21121
nnnnntcggcaccnnnnnnnncnnnnnnnnnnnnnnnnngttttggnnnttngnnnnncngccgccccgccgcnnncggcacccgcagccgccgcagtgccgcacnnnncnnnnntcttcgtcttggtcttgcagccagttnnnnncntcgcggtcgtcggcccctcgcccgcgcgccgagacaccgagtcagcgtcaccgtcgtcgtgtctcgcnnnnncgctgtcgtcaccgaggtccagcgcccagcggcccagctccaagcctccagccatcggcgaccgccctcctccgccgagacgccgagtgccgagcgcccgagcaccccagtccccagcgcccaacaggctagcaagctacaagtatgcgctctttgttgatgcgtccaaggagttgagctgaatgcccagcagnctnncaggctgcagaaactgaaggaaaagccggcattcagnaacnnnggatgagttctattttaaaatgatcaatagtannnnnnnntggtggaattcatagncctnagtatgtgcaatgtagcccctcggctgctattgactctcattcaaggatagggcaaagcaccntcatgcctgttcttggctacatcacgcttggtataaaaaagaaaatagccttatcgtccagggagttagaagagaggaagcagcggcttcaaaagcttgagaaattgtatgcagccatggccttgcaaaaagaattgaagaaacctgggcgcaagaggaaactgaaactccatgaagatgaagagacggccaatcaaacatcccggcctgtttataagtggcgagcccagaggaaacgatgagatgatatgaatgggctatggagggagtaaaaggcaacatgttagtagtggaagtnctggtcagntggaaccgctccttcggcccttaaaatacttccctgtagaagtagccctccccaaagaactgtgtctttgtcaaactattgnnnnnnnnnnnnnnnnnnnnnnnnnnnnnnnnnnnnnnnnnnnnnnnnnnnnnnnnnnnnnnnnnnnnnnnnnnnnnnnnnnnnnnnnnnnnnnnnnnnnnnnnnnnnnnnnnnnnnnnnnnnnnnnnnnnnnnnnnnnnnnnnnnnnnnnnnnnnnnnnnnnnnnnnnnnnnnnnnnnnnnnnnnnnnnnnnnnnnnnnnnnn

SEQ ID NO: 6719 - DNA, 542 bp, Zea mays
  Peptide Sequence Number=SeqID_11180
  Probeset Number=SeqID_21122
cagtaccaggtcgcctttttttttgcagttattcctcgctctgctccatgtatcaccatctttgcttggaagtactagtaaattaatagtgtgctgtagtaaagagagagtgcaacttctcctcaccggccggagcgacgacttccgcctggtgctcactgtggagtgtggaccgatccgggactcctcagttgagaacttgagatgactggcgcaatggccatggactctggcgatttagcctccatgcatgctcatagctgacacgatctatgggcccggccggttggtatagttggtaccaactcagataggtcgataccgactgtcatgtatcgtcttttgattggtagtacatgatattttgatatccaaaaaactaaaagaatatgtttatgaactatgtatccctttagttttagatattatattttttatgtttataaatatgtcgattttatttatggtttgtaaactatgtaatgtgtatttatatttatgaactaaataattttttacttagttaaaaaaaaaaaaaaaaa

SEQ ID NO: 6720 - DNA, 543 bp, Zea mays
  misc_feature (92)..(92): n is a, c, g, or t
  misc_feature (94)..(94): n is a, c, g, or t
  misc_feature (173)..(173): n is a, c, g, or t
  misc_feature (253)..(255): n is a, c, g, or t
  misc_feature (269)..(269): n is a, c, g, or t
  misc_feature (304)..(305): n is a, c, g, or t
  misc_feature (367)..(367): n is a, c, g, or t
  misc_feature (381)..(381): n is a, c, g, or t
  misc_feature (408)..(408): n is a, c, g, or t
  misc_feature (422)..(422): n is a, c, g, or t
  misc_feature (424)..(424): n is a, c, g, or t
  misc_feature (498)..(499): n is a, c, g, or t
  misc_feature (517)..(523): n is a, c, g, or t
  misc_feature (533)..(533): n is a, c, g, or t
  misc_feature (535)..(535): n is a, c, g, or t
  Probeset Number=SeqID_21123
ccccccccccccccccccccagcttactaaaggtgcagctgacaattaccaccgatcttggtggaaaagacatggagttgttcttgatggananatcgcagctctggttctttaagcatgggaaattttggacctgggtgggaaatcctagtgaaaaagttttggggtttctntttttggcaaaaggttgggaaaaaattttgggaaaaaggtttcccccggtctttggaaaaggggccaaaaaaattttttnnngggggaaagggggntttttggcccttttgggggaaaaaataaatttctnngggggaggggggggttttttttttttaaaaaaaagggggggggggtttccccaaaaaaaaantttctttcctcttncccaaaaaaaaaaaaaaaaatttttgngcccccaaaaaaangncccccccaaaaaattttttttgggggggggggggggcccccccccccaaaaaaattttgggggggggggggccnnccccccctttcctttttnnnnnnngggggggggngncccccccc

SEQ ID NO: 6721 - DNA, 543 bp, Zea mays
  misc_feature (9)..(9): n is a, c, g, or t
  misc_feature (11)..(11): n is a, c, g, or t
  misc_feature (21)..(27): n is a, c, g, or t
  misc_feature (45)..(46): n is a, c, g, or t
  misc_feature (120)..(120): n is a, c, g, or t
  misc_feature (122)..(122): n is a, c, g, or t
  misc_feature (136)..(136): n is a, c, g, or t
  misc_feature (163)..(163): n is a, c, g, or t
  misc_feature (177)..(177): n is a, c, g, or t
  misc_feature (239)..(240): n is a, c, g, or t
  misc_feature (275)..(275): n is a, c, g, or t
  misc_feature (289)..(291): n is a, c, g, or t
  misc_feature (371)..(371): n is a, c, g, or t
  misc_feature (450)..(450): n is a, c, g, or t
  misc_feature (452)..(452): n is a, c, g, or t
  Peptide Sequence Number=SeqID_11181
  Probeset Number=SeqID_21124
ggggggggncncccccccccnnnnnnnaaaaaggaaagggggggnnggcccccccccccccaaaatttttttgggggggggggcccccccccccccccaaaaaaaattttttgggggggncntttttttgggggcncaaaaatttttttttttttttttgggnaagaggaaagaaantttttttttggggaaacccccccccccttttttttaaaaaaaaaaaacccccccctcccccnnagaaatttattttttcccccaaaagggccaaaaanccccctttcccccnnnaaaaaatttttttggccccttttccaaagaccgggggaaacctttttcccaaaattttttcccaaccttttgccaaaaanagaaaccccaaaactttttcactaggatttcccacccaggtccaaaatttcccatgcttaaagaaccagagctgcgatntntccatcaagaacaactccatgtcttttccaccaagatcggtggtaattgtcagctgcacctttagtaagctgggggggggggggggggggg

SEQ ID NO: 6722 - DNA, 763 bp, Zea mays
  misc_feature (1)..(45): n is a, c, g, or t
  misc_feature (749)..(756): n is a, c, g, or t
  misc_feature (758)..(761): n is a, c, g, or t
  misc_feature (763)..(763): n is a, c, g, or t
  Peptide Sequence Number=SeqID_11182
  Probeset Number=SeqID_21125
nnnnnnnnnnnnnnnnnnnnnnnnnnnnnnnnnnnnnnnnnnnnntttttactaatatatatatataagcatccagtccaccaatccccagtctacaatacactcacgcctaaaacacacggcacgacgctttgaaggtccatcttgagcgcgcaacactagctcactttaggggtcgaccacaaacaaaataaagcgcgctgtcaagcttgaagaaatgagaaaccaagggtggtagtagcgtactatatagttagctatcactagacctcaacttgatggagaaccaccgggatgagctcatcagtgttagtgtggagaatagttgcaggagtagttgatgggcacgtgcagacgagtaactcctcttgcgaggggctttcacctgagggggtctcaggttatcttctccaagaccaagtagagagcggtatgtacaaggaattcctccggggcctcaagttgccatttcctaccatcaccagctttcgctccactccccatggcctcacccttgggctgtctgctgtcgagcgtacaggagagaaaccttcagcaagcagtagccgcccaagtacaggagagaaataagattgggaggagagaagcaagttttaccggcgtacaggaaaaaagcaagcagctacaggggtctggcgtacaagagagaagcaagcagctaaggggtcttctttaccgcgtgttttctctccttccttccttttttggcgtacaacttctttttctgnnnnnnnntnnnncn

SEQ ID NO: 6723 - DNA, 478 bp, Zea mays
  misc_feature (12)..(12): n is a, c, g, or t
  misc_feature (16)..(16): n is a, c, g, or t
  misc_feature (18)..(18): n is a, c, g, or t
  misc_feature (21)..(21): n is a, c, g, or t
  misc_feature (292)..(294): n is a, c, g, or t
  misc_feature (321)..(323): n is a, c, g, or t
  misc_feature (325)..(334): n is a, c, g, or t
  misc_feature (379)..(382): n is a, c, g, or t
  misc_feature (387)..(389): n is a, c, g, or t
  misc_feature (405)..(414): n is a, c, g, or t
  misc_feature (416)..(416): n is a, c, g, or t
  misc_feature (421)..(422): n is a, c, g, or t
  misc_feature (424)..(464): n is a, c, g, or t
  misc_feature (467)..(469): n is a, c, g, or t
  misc_feature (471)..(476): n is a, c, g, or t
  Probeset Number=SeqID_21126
tgtattctatgnctangnctngtacgtataatgctccgtgcaatctcgtgcatccgtatcgaatggagcattttgccattgcaagtctttaatacctgattaacgcaaacgaatggtgttcgaatggttggtgtcctgtgtaatgagattagttttcatgctgcataagtgccttgtcagttgtgttcttccatgttggggaattctcaaaagggagcaaaatcttgcccaacggacgggtgggttgaatttgaagcctatggctgccaatatcttgtggaataagatattnnngtaatctggttgtggagatccaaaaannnannnnnnnnnnaaaaaaaaaaaaaaaaaaaaaaaaaaaaaaaaaaaaaaaaaaaannnnaaaannnaaaaaaaaaaaaaaannnnnnnnnngngaganngnnnnnnnnnnnnnnnnnnnnnnnnnnnnnnnnnnnnnnnnnaannnannnnnnat

SEQ ID NO: 6724 - DNA, 744 bp, Zea mays
  misc_feature (1)..(28): n is a, c, g, or t
  misc_feature (710)..(734): n is a, c, g, or t
  misc_feature (739)..(744): n is a, c, g, or t
  Peptide Sequence Number=SeqID_11183
  Probeset Number=SeqID_21127
nnnnnnnnnnnnnnnnnnnnnnnnnnnntaataaaagaaggacagttgagattttaggagagagagagagggagaggatggagaatctctggcgaatcgctacaggccaggacccgaaccggcaagattacgaaggaatcgagttctggtccaacccggagcgatccgggtggctcacaaagcaaggcgattacatcaagacctggcgccgacgctggttcgtgctcaagcgagggaagctcctgtggttcaaggatcaatcctccgccttaacccgcggatccatcccgcgtggggtgatctcggtgggagactgtctgaccgtgaaaggagctgaggacgtggtgaacaagcctttcgccttcgagatttcgagcgggaacatcaccatgttcttcatcgctgataacgagaaggagaaggaggagtggatcaactctattggaaggtcgatcgtgcagcactcgagatcggttactgattctgaagtccttgattatgatcaaaggcggtgacttttctttttttttagctctatgctctatgttttgattccgtcgtcttacgtttattgtaccgtgtatgtatgtatgtatgcctctcaagttgttgatcagactctctatctcttgtgttatgttttttttgttctgtatctgattctattcagcgagttcttcttttatctttgccaaaaaaaaaaaaaaaannnnnnnnnnnnnnnnnnnnnnnnnggggnnnnnn

SEQ ID NO: 6725 - DNA, 863 bp, Zea mays
  misc_feature (1)..(34): n is a, c, g, or t
  misc_feature (36)..(43): n is a, c, g, or t
  misc_feature (46)..(87): n is a, c, g, or t
  Peptide Sequence Number=SeqID_11184
  Probeset Number=SeqID_21128
nnnnnnnnnnnnnnnnnnnnnnnnnnnnnnnnnntnnnnnnnnctnnnnnnnnnnnnnnnnnnnnnnnnnnnnnnnnnnnnnnnnnnctagaaaattctccatgaacatactcaacaggttcggtttaggatcaggcgggcaaacgagtacagatccgtctccgatcgctcaaggatctgacgatgactctccggcgccgggaaatcactttgcccaattcgccgccggatgcttctggggcgtggagctggcgtttcagaggctcccgggggtgactcagacagaggttggatacacacaagggatcacccacaatccttcgtacgaggacgtctgttccgaaaccacgagacacgccgaggtcgtcagggttcagtacgatcccaaaggctgcacctttgagtctctccttgacttgttctggtccaggcatgatcccaccaccttgaatcgccagggaaatgatgtgggaaccagataccgatccgggatctacttctacacaccagagcaggagaaactagcccgggagtcactagaacgtcaccagcagcgaatggagaggaagatcatgactgagatcttgcctgctaagaaattctacagagccgaggagcagcagcagcagtatctgtccaagggtggaaggtacggcatggggcagtcctgtgccaaaggctgcaccgacccaatccgctgttacggctaaaacctgagctcctctgcttctgaggatgttatgaacttttgtgtaaaagctatgtaacgcataatttaccgtttgtacgattatttgttgatgtttctcaaattattgaatgaataagagaatcttatggacaaaagaaaaaaaaaaaaaaaa

SEQ ID NO: 6726 - DNA, 890 bp, Zea mays
  misc_feature (1)..(31): n is a, c, g, or t
  misc_feature (33)..(38): n is a, c, g, or t
  misc_feature (40)..(120): n is a, c, g, or t
  misc_feature (122)..(156): n is a, c, g, or t
  misc_feature (158)..(234): n is a, c, g, or t
  misc_feature (240)..(258): n is a, c, g, or t
  misc_feature (260)..(289): n is a, c, g, or t
  misc_feature (292)..(379): n is a, c, g, or t
  misc_feature (381)..(398): n is a, c, g, or t
  misc_feature (403)..(425): n is a, c, g, or t
  misc_feature (427)..(463): n is a, c, g, or t
  misc_feature (465)..(465): n is a, c, g, or t
  misc_feature (471)..(483): n is a, c, g, or t
  misc_feature (485)..(492): n is a, c, g, or t
  misc_feature (501)..(508): n is a, c, g, or t
  misc_feature (517)..(521): n is a, c, g, or t
  misc_feature (525)..(525): n is a, c, g, or t
  misc_feature (527)..(532): n is a, c, g, or t
  misc_feature (536)..(539): n is a, c, g, or t
  misc_feature (543)..(547): n is a, c, g, or t
  misc_feature (776)..(782): n is a, c, g, or t
  misc_feature (784)..(792): n is a, c, g, or t
  misc_feature (797)..(804): n is a, c, g, or t
  misc_feature (806)..(808): n is a, c, g, or t
  misc_feature (810)..(815): n is a, c, g, or t
  misc_feature (821)..(833): n is a, c, g, or t
  misc_feature (839)..(841): n is a, c, g, or t
  misc_feature (848)..(856): n is a, c, g, or t
  misc_feature (861)..(863): n is a, c, g, or t
  misc_feature (865)..(886): n is a, c, g, or t
  Peptide Sequence Number=SeqID_11185
  Probeset Number=SeqID_21129
nnnnnnnnnnnnnnnnnnnnnnnnnnnnnnngnnnnnnannnnnnnnnnnnnnnnnnnnnnnnnnnnnnnnnnnnnnnnnnnnnnnnnnnnnnnnnnnnnnnnnnnnnnnnnnnnnnnnnannnnnnnnnnnnnnnnnnnnnnnnnnnnnnnnnnntnnnnnnnnnnnnnnnnnnnnnnnnnnnnnnnnnnnnnnnnnnnnnnnnnnnnnnnnnnnnnnnnnnnnnnnnnnnnngaaggnnnnnnnnnnnnnnnnnnngnnnnnnnnnnnnnnnnnnnnnnnnnnnnnnatnnnnnnnnnnnnnnnnnnnnnnnnnnnnnnnnnnnnnnnnnnnnnnnnnnnnnnnnnnnnnnnnnnnnnnnnnnnnnnnnnnnnnnnngnnnnnnnnnnnnnnnnnntcagnnnnnnnnnnnnnnnnnnnnnnngnnnnnnnnnnnnnnnnnnnnnnnnnnnnnnnnnnnnntncttatnnnnnnnnnnnnnannnnnnnntcgtcgagnnnnnnnngtaccatcnnnnngatnannnnnncaannnnaagnnnnncgccgctgttgtgctcagcgggcatcattcgtaggattatggcttgtcatggagcccgacgaaggaggggttatgatcagaagattttcttgtggggtctcttctctaggagtggagctcttttctggatgcacaacatcagttggaggtaatgtcccgttggatgctcctgtttcaactaatgtggtcagcgctctttattcactgtccccgcattttcggctcatannnnnnnannnnnnnnnttatnnnnnnnntnnntnnnnnngagcannnnnnnnnnnnntctttnnntttcctnnnnnnnnntatgnnnannnnnnnnnnnnnnnnnnnnnnaaaa

SEQ ID NO: 6727 - DNA, 1094 bp, Zea mays
  misc_feature (1)..(1): n is a, c, g, or t
  Probeset Number=SeqID_21130
naaaaccctagacaatcgattcggattccaaaagctctgattaatccgaaaatgttggagctacgtctcgtgcagggctctctcctgaagaaggttctcgaatcgatcaaggatctcgtcaacgacgccaacttcgactgctccaccaccggcttctccctccaagccatggactccagccacgtggcgctcgtctccctcctgctcagatccgaaggcttcgagcactaccgctgcgaccgtaacctttccatggggatgaatctcggaaacatgtcgaagatgctcaaatgcgccggaaacgacgacatcatcaccatcaaagccgatgacggcggcgacaccgtcaccttcatgttcgagagtcccaagcaagacaagattgcagattttgagatgaagctgatggatatagacagtgagcatttggggatacctgatgctgagtatcattcgattgttaggatgccgtctaatgagttctctagaatctgcaaagatctcagtaccatcggtgacactgttgtgatatctgtgactaaagaaggggttaagttctctactgctggtgacattgggacagctaacattgtgttgagacagaacacaactgttgacaagccggaagatgcgattgtaatagagatgaacgagccggtgtcactctcgtttgccttgaggtatatgaattccttcacaaaggcgactcctttgtcagacacggtgacgatcagcttatcgtcggagctgccagttgtggtggagtataaggtggctgagatgggttacattcgttactacttggctcctaagattgaagaagatgaagaagacaaggcttaagatcccttttgtacccagagcttcttctgttcttactaaaatgtccaagattcagtcatgatgattatgatgttttcccgtttaatttccctctagaatcagttgttttgtttgacttgttatgttttaaaatgatatgtttggtaaagttagtgctgtttgaacctaaaaaaaaaaaaaaaaaaaaaaaaaaaaaaaaaaaaaaaaaaaaaaaaaaaaaaaaaaaaaaaaaaagaaaaaaaaaaaaaaaa

SEQ ID NO: 6728 - DNA, 611 bp, Zea mays
  misc_feature (1)..(2): n is a, c, g, or t
  misc_feature (611)..(611): n is a, c, g, or t
  Peptide Sequence Number=SeqID_11186
  Probeset Number=SeqID_21131
nnttttttttttttttttagactaaataagtttcataataacaagaaaccaaacatataattctgacattgcataataatcatagagctcaatctcaaaaccgtttcgaaaagaaaaacagaaaaaccaaaacaaagaatctgagatcaacaaccacagaaactaacaccaccttggaaagagttttatgttttgtctctggtcttaaccaaatagatcaaaaccaaagtcaccttcctcctcttcagattcttccttcttcttctcttcctcctttgcggcagcggcggactcacctccaccactggctcctccagctgctgcaccacctccggcagcaaatcctcctccagagccaccgccgatgatcacctggaagacggcggaggtaggggagacgagggagaaggaagactgaactccaccggaggaatcggcggagagagcagtctgaacaagcttgcgctggagatcgtaggtggaagaatcggaagcttcgaggtctccctcgtgctgcttagcggtccattctccgcctttgcttttgcaaacgaatgtgaatactcccatcttcttctcctttcttctttaacggctgcgagatttttttn

SEQ ID NO: 6729 - DNA, 611 bp, Zea mays
  misc_feature (1)..(1): n is a, c, g, or t
  misc_feature (610)..(611): n is a, c, g, or t
  Peptide Sequence Number=SeqID_11187
  Probeset Number=SeqID_21132
naaaaaaatctcgcagccgttaaagaagaaaggagaagaagatgggagtattcacattcgtttgcaaaagcaaaggcggagaatggaccgctaagcagcacgagggagacctcgaagcttccgattcttccacctacgatctccagcgcaagcttgttcagactgctctctccgccgattcctccggtggagttcagtcttccttctccctcgtctcccctacctccgccgtcttccaggtgatcatcggcggtggctctggaggaggatttgctgccggaggtggtgcagcagctggaggagccagtggtggaggtgagtccgccgctgccgcaaaggaggaagagaagaagaaggaagaatctgaagaggaggaaggtgactttggttttgatctatttggttaagaccagagacaaaacataaaactctttccaaggtggtgttagtttctgtggttgttgatctcagattctttgttttggtttttctgtttttcttttcgaaacggttttgagattgagctctatgattattatgcaatgtcagaattatatgtttggtttcttgttattatgaaacttatttagtctaaaaaaaaaaaaaaaann

SEQ ID NO: 6730 - DNA, 752 bp, Zea mays
  misc_feature (1)..(1): n is a, c, g, or t
  misc_feature (737)..(752): n is a, c, g, or t
  Peptide Sequence Number=SeqID_11188
  Probeset Number=SeqID_21133
nacctcttgagatttcccgaagatcaaatcaaaaccctacgaaaggttagctagaagcagcgagtacagttcaagatggcttcgaaaagaatcaacaaagagcttagggacctccaaagggatcctcctgtctcatgcagtgccggtcctgtgggtgatgatatgttccactggcaagcgactatcatgggtccaactgatagcccattctccggtggtgtgtttcttgtttccattcacttcccaccagattaccccttcaagccaccaaaggtttctttccgcaccaaggtttaccacccgaatgtcaacagtaacggcagtatctgtcttgacattctgaaagagcagtggagccctgcacttaccatatccaaggttcttctgtcgatatgttcattgctgacagatccaaaccctgatgaccctctggttccagaaatagctcacacctacaagacagaccgagtcaagtacgagagcaccgcccgatcctggacccagaagtatgcaatgggatgatgatgattggcaataataatccgcaccaatactttgcgcattgtctaagaatatgagaaataagattgaaaaaaaaacagtgtgtggcgttttgcttggttgctttattagttttatcatcatcttaagccgtgtgttggtttgtgtacatgagctttatattgagacattttgagagcttgcaatgctataaagccaataactggttatctatnnnnnnnnnnnnnnnn

SEQ ID NO: 6731 - DNA, 773 bp, Zea mays
  misc_feature (1)..(1): n is a, c, g, or t
  Peptide Sequence Number=SeqID_11189
  Probeset Number=SeqID_21134
ntctacgaaccaaccaaccaacgaagaagcctcttgagatttcccaagatcaaatctaaaaacccttagtagctgactattcaagcttatggcttcgagaagaattaacagcgagcttagggacctgcaaaaggaccctcctctgtcttgcagtgccggtcctgtgggtgatgatatgtaccactggcaagcaactatcatgggtccaactgatagcccattcaccggtggtgtatttcttgtttccattcacttccctccagattaccccttcaagccaccaaaggtttctttccgcaccaaggtctatcacccgaatgtcaacagtaatggcagcatctgtcttgacattctgaaagagcagtggagccctgctcttaccatatccaaggttcttctgtcgatatcctcattgctgacagatccaaaccctgatgatcctctggttccagagatagctaacatctacaagtcagaccgtaccaagtacgagaacactgcccgatcctggacccagaagtatgcaatgggatgatatgatgatggttggcaataatgatccgcaccagtaaattgcgcatttgtctaagaattggggaaataagaagaaaaaaacatggatttggcttttgcttgcctgcttgatttaattagttttattatcttcttatgtgttgggtgtgtacatgagcgctatttaagccttattgaaacatttgatatctttcttttaatccagtaattggctattataacgaaaaaaaaaaaaaaaa

SEQ ID NO: 6732 - DNA, 1203 bp, Zea mays
  misc_feature (1143)..(1143): n is a, c, g, or t
  misc_feature (1145)..(1162): n is a, c, g, or t
  misc_feature (1164)..(1179): n is a, c, g, or t
  misc_feature (1181)..(1182): n is a, c, g, or t
  misc_feature (1185)..(1203): n is a, c, g, or t
  Peptide Sequence Number=SeqID_11190
  Probeset Number=SeqID_21135
ttttttttttttttttgaatacaaagattttaacctcacacagatttaaaccccacatacaaacaccgagatttagtaccacccatgaacacttagaaggatcatacgctacccaatcgaaacggcgttatatttttcaccacaatgagaacaagtttatcccacgactcgagataaactgtctcttgcaccacctacttctaccgtacgagacagagacatacaaacccaaacacaatgaaatctacacaagatgacttcatgagaccatagcattggttgccaaatgattagagtgaaagctcggaccaacactgcaacaccagaacggtgcatatccagcatagaccatcacattcgggttctgtgtcctgctccttagccaaaaggacggaaacaggttccgtactgagaaagacggacttcgacggcagcagcgagactggttcagcacacaaagcttccaatggtgtgggctcgtaccgctcgcttaacagattccttgccaccgacgctgggaagtagagcaccaccgcgtgtcacctgcaaagaacactcctccggttgaccactccgatggtgtgggttcttgcaacgcgtccgtcaccgagaaccggatctctgaaccatttttcaccgctcatcacaccattcctccgatagtctcactgtcacatggtaggtgaaatccaaggtggaggagcttcccactgagtcacgtgccccgccgtgaagagagccaccgtagatcttaaaaggtgaaactagatcaggcggttcacttagccctaaaaaccggcctccctcgcgactaccgcttcaaatcctcaccgctcctccaagacgtcgattgtcattacctttaaccgctaagggtcgccggtaaaggaaccgataggttcagagcagaaggtatatcggttctgaagtgaggtagaagaagagggaagcaaaggaaaaaaaagagacagggaaggaggatttacctccggctccggcagagcaccgggccggagtggaggcggctctgttttgaaagaggggtctttagagagaaactaggtttttacacttctttttacccacaagctttgttgttattttttccttgttaattgagttgttgttacgaaaacttaattntnnnnnnnnnnnnnnnnnnannnnnnnnnnnnnnnnanntcnnnnnnnnnnnnnnnnnnn

SEQ ID NO: 6733 - DNA, 878 bp, Zea mays
  misc_feature (285)..(285): n is a, c, g, or t
  misc_feature (302)..(302): n is a, c, g, or t
  misc_feature (359)..(359): n is a, c, g, or t
  misc_feature (425)..(425): n is a, c, g, or t
  misc_feature (427)..(427): n is a, c, g, or t
  misc_feature (429)..(429): n is a, c, g, or t
  misc_feature (438)..(438): n is a, c, g, or t
  misc_feature (458)..(458): n is a, c, g, or t
  misc_feature (489)..(489): n is a, c, g, or t
  misc_feature (492)..(492): n is a, c, g, or t
  misc_feature (501)..(502): n is a, c, g, or t
  misc_feature (504)..(504): n is a, c, g, or t
  misc_feature (506)..(506): n is a, c, g, or t
  misc_feature (520)..(521): n is a, c, g, or t
  misc_feature (525)..(525): n is a, c, g, or t
  misc_feature (530)..(531): n is a, c, g, or t
  misc_feature (534)..(536): n is a, c, g, or t
  misc_feature (546)..(546): n is a, c, g, or t
  misc_feature (553)..(553): n is a, c, g, or t
  misc_feature (556)..(556): n is a, c, g, or t
  misc_feature (558)..(559): n is a, c, g, or t
  misc_feature (561)..(561): n is a, c, g, or t
  misc_feature (564)..(564): n is a, c, g, or t
  misc_feature (566)..(566): n is a, c, g, or t
  misc_feature (569)..(570): n is a, c, g, or t
  misc_feature (574)..(575): n is a, c, g, or t
  misc_feature (578)..(578): n is a, c, g, or t
  misc_feature (582)..(582): n is a, c, g, or t
  misc_feature (585)..(585): n is a, c, g, or t
  misc_feature (590)..(591): n is a, c, g, or t
  misc_feature (593)..(593): n is a, c, g, or t
  misc_feature (599)..(599): n is a, c, g, or t
  misc_feature (601)..(878): n is a, c, g, or t
  Probeset Number=SeqID_21136
agccccacagcgcaagcgagcagatcctcctccctctctgcatcctggcctcctctctgcctccccacgccggatctcgagcacctggggagaccgcgagacgtgcgcctgatttttctcatcgcaccagccctcaagttccccacctcttttttcttgcagctttcaattaatctggttatttagctacatctttattttactttcatttcgcctttaatctgttcagttccattgcatcttctgcgggtgcaagtatagtattggctagttcggctgctccgngcgccttgttcttttgnttctaaccatgggactgcaggaacgctactccgatctcatcagagaagtagctcacncggctggcagccggtcgcggcacccctcttcatgaagccggcacttcaggccctacatggccggangntngaaccacanggatcgcgccaaccccgggngcgccacctggacgaaccggggtacatgccnganaggtctggnntngnatagacttgggacnncttntttgnnacnnntccttgtatngaacaangcnanngnttntnggnnttcnntcnaccnaangatgnnanccgaangnnnnnnnnnnnnnnnnnnnnnnnnnnnnnnnnnnnnnnnnnnnnnnnnnnnnnnnnnnnnnnnnnnnnnnnnnnnnnnnnnnnnnnnnnnnnnnnnnnnnnnnnnnnnnnnnnnnnnnnnnnnnnnnnnnnnnnnnnnnnnnnnnnnnnnnnnnnnnnnnnnnnnnnnnnnnnnnnnnnnnnnnnnnnnnnnnnnnnnnnnnnnnnnnnnnnnnnnnnnnnnnnnnnnnnnnnnnnnnnnnnnnnnnnnnnnnnnnnnnnnnnnnnnnnnnnnnnnnn

SEQ ID NO: 6734 - DNA, 878 bp, Zea mays
  misc_feature (1)..(278): n is a, c, g, or t
  misc_feature (280)..(280): n is a, c, g, or t
  misc_feature (286)..(286): n is a, c, g, or t
  misc_feature (288)..(289): n is a, c, g, or t
  misc_feature (294)..(294): n is a, c, g, or t
  misc_feature (297)..(297): n is a, c, g, or t
  misc_feature (301)..(301): n is a, c, g, or t
  misc_feature (304)..(305): n is a, c, g, or t
  misc_feature (309)..(310): n is a, c, g, or t
  misc_feature (313)..(313): n is a, c, g, or t
  misc_feature (315)..(315): n is a, c, g, or t
  misc_feature (318)..(318): n is a, c, g, or t
  misc_feature (320)..(321): n is a, c, g, or t
  misc_feature (323)..(323): n is a, c, g, or t
  misc_feature (326)..(326): n is a, c, g, or t
  misc_feature (333)..(333): n is a, c, g, or t
  misc_feature (343)..(345): n is a, c, g, or t
  misc_feature (348)..(349): n is a, c, g, or t
  misc_feature (354)..(354): n is a, c, g, or t
  misc_feature (358)..(359): n is a, c, g, or t
  misc_feature (373)..(373): n is a, c, g, or t
  misc_feature (375)..(375): n is a, c, g, or t
  misc_feature (377)..(378): n is a, c, g, or t
  misc_feature (387)..(387): n is a, c, g, or t
  misc_feature (390)..(390): n is a, c, g, or t
  misc_feature (421)..(421): n is a, c, g, or t
  misc_feature (441)..(441): n is a, c, g, or t
  misc_feature (450)..(450): n is a, c, g, or t
  misc_feature (452)..(452): n is a, c, g, or t
  misc_feature (454)..(454): n is a, c, g, or t
  misc_feature (520)..(520): n is a, c, g, or t
  misc_feature (577)..(577): n is a, c, g, or t
  misc_feature (594)..(594): n is a, c, g, or t
  Peptide Sequence Number=SeqID_11191
  Probeset Number=SeqID_21137
nnnnnnnnnnnnnnnnnnnnnnnnnnnnnnnnnnnnnnnnnnnnnnnnnnnnnnnnnnnnnnnnnnnnnnnnnnnnnnnnnnnnnnnnnnnnnnnnnnnnnnnnnnnnnnnnnnnnnnnnnnnnnnnnnnnnnnnnnnnnnnnnnnnnnnnnnnnnnnnnnnnnnnnnnnnnnnnnnnnnnnnnnnnnnnnnnnnnnnnnnnnnnnnnnnnnnnnnnnnnnnnnnnnnnnnnnnnnnnnnnnnnnnnnnnnnnnnnnnnnnnnnnnnnnnnnnnnnnncnttcggntnncatcnttnggtnganngaannccnanaancnntngcnttgttcnatacaaggannngtnncaaanaagnngtcccaagtctatncnannccagacctntcnggcatgtaccccggttcgtccaggtggcgcncccggggttggcgcgatccntgtggttcnancntccggccatgtagggcctgaagtgccggcttcatgaagaggggtgccgcgaccggctgccagccgngtgagctacttctctgatgagatcggagtagcgttcctgcagtcccatggttagaancaaaagaacaaggcgcncggagcagccgaactagccaatactatacttgcacccgcagaagatgcaatggaactgaacagattaaaggcgaaatgaaagtaaaataaagatgtagctaaataaccagattaattgaaagctgcaagaaaaaagaggtggggaacttgagggctggtgcgatgagaaaaatcaggcgcacgtctcgcggtctccccaggtgctcgagatccggcgtggggaggcagagaggaggccaggatgcagagagggaggaggatctgctcgcttgcgctgtggggct

SEQ ID NO: 6735 - DNA, 626 bp, Zea mays
  misc_feature (319)..(319): n is a, c, g, or t
  misc_feature (601)..(626): n is a, c, g, or t
  Probeset Number=SeqID_21138
agtgtgagagctcgattcgttgccgtccacttgtctcacggcctgtcgccatctccttcctggttttttcatccgaccatccccggggctcctccgcgccgtcggcgacgactccatcgagtcactcggccgcagcaaccggcgaccatgtaccgagtcgcctccgggctcggcgccctcaagaggcatggggcaaatgctcaaatgatgaatgctgcaattaggtgtgccagcacaagtgttgcacagaggtcttccggtggcttgtgcacctggctggactggtgcgcgttcaaatgaaatacctcctccagatttncacaccttttccgggagtgactattcccccctccgctgcctagacccatggtggaggctggacaaaaccagagtccaacaacactttccccaatggtcgttaaaataaccctcctgagaccttctgcgggcatcatcctggccccgggtgcgagctcaatggtcgaatcgggcgggttccggaattttgaaagcccccccgagtaacacaacgggggggtggaaagtatacttctggaagaaaaggggcctttacaaccactggcacacagaatggtttggnnnnnnnnnnnnnnnnnnnnnnnnnn

SEQ ID NO: 6736 - DNA, 626 bp, Zea mays
  misc_feature (1)..(26): n is a, c, g, or t
  misc_feature (308)..(308): n is a, c, g, or t
  Peptide Sequence Number=SeqID_11192
  Probeset Number=SeqID_21139
nnnnnnnnnnnnnnnnnnnnnnnnnnccaaaccattctgtgtgccagtggttgtaaaggccccttttcttccagaagtatactttccacccccccgttgtgttactcgggggggctttcaaaattccggaacccgcccgattcgaccattgagctcgcacccggggccaggatgatgcccgcagaaggtctcaggagggttattttaacgaccattggggaaagtgttgttggactctggttttgtccagcctccaccatgggtctaggcagcggaggggggaatagtcactcccggaaaaggtgtgnaaatctggaggaggtatttcatttgaacgcgcaccagtccagccaggtgcacaagccaccggaagacctctgtgcaacacttgtgctggcacacctaattgcagcattcatcatttgagcatttgccccatgcctcttgagggcgccgagcccggaggcgactcggtacatggtcgccggttgctgcggccgagtgactcgatggagtcgtcgccgacggcgcggaggagccccggggatggtcggatgaaaaaaccaggaaggagatggcgacaggccgtgagacaagtggacggcaacgaatcgagctctcacact

SEQ ID NO: 6737 - DNA, 729 bp, Zea mays
  misc_feature (1)..(128): n is a, c, g, or t
  misc_feature (729)..(729): n is a, c, g, or t
  Peptide Sequence Number=SeqID_11193
  Probeset Number=SeqID_21140
nnnnnnnnnnnnnnnnnnnnnnnnnnnnnnnnnnnnnnnnnnnnnnnnnnnnnnnnnnnnnnnnnnnnnnnnnnnnnnnnnnnnnnnnnnnnnnnnnnnnnnnnnnnnnnnnnnnnnnnnnnnnnnnngcacgaaacctcgaaacttgcggcctcgcattagtagccggctgcagaccgagtttgccgacatcccggcagtggaggcgggcgcgggcgctgagtcgaagcgcggccacctctctctcgattatacctgcatgaagtgggtacagctatccagcaaggtgactagaagaagaggaacgctgtgagctcactgattgtgcttggtacaggcagtggtgatgtgctggcacttgatgtcgctgcgggacattggaagtggaaggtcagcgattgccaccctggagtcaaaaccacatccttggaagggaggggaggtcccccccgtccggtggcggagccaggcgcccggcaagcctgggcatgtccccgggctccagctctgccatgcgcacgcagagtgctcagctatgctctgctgcatgcacgacggcgacgagcgacgaaggtgctcggccgcgacggcttcaacgatcgggaggatggatgcaatggcagacaatgaacaacgttggctgcacagtgactgtggcttcaccttctcgctggctccgcactggctctcacggtttagagtaaatcaaaccggctaatgtatccttgn

SEQ ID NO: 6738 - DNA, 1325 bp, Zea mays
  misc_feature (1)..(47): n is a, c, g, or t
  misc_feature (54)..(65): n is a, c, g, or t
  misc_feature (67)..(159): n is a, c, g, or t
  misc_feature (164)..(203): n is a, c, g, or t
  misc_feature (209)..(214): n is a, c, g, or t
  misc_feature (218)..(245): n is a, c, g, or t
  misc_feature (249)..(253): n is a, c, g, or t
  misc_feature (259)..(262): n is a, c, g, or t
  misc_feature (265)..(272): n is a, c, g, or t
  misc_feature (274)..(394): n is a, c, g, or t
  misc_feature (396)..(400): n is a, c, g, or t
  misc_feature (1314)..(1317): n is a, c, g, or t
  misc_feature (1320)..(1323): n is a, c, g, or t
  misc_feature (1325)..(1325): n is a, c, g, or t
  Peptide Sequence Number=SeqID_11194
  Probeset Number=SeqID_21141
nnnnnnnnnnnnnnnnnnnnnnnnnnnnnnnnnnnnnnnnnnnnnnnggggggnnnnnnnnnnnngnnnnnnnnnnnnnnnnnnnnnnnnnnnnnnnnnnnnnnnnnnnnnnnnnnnnnnnnnnnnnnnnnnnnnnnnnnnnnnnnnnnnnnnnnnnnnggggnnnnnnnnnnnnnnnnnnnnnnnnnnnnnnnnnnnnnnnngggggnnnnnngggnnnnnnnnnnnnnnnnnnnnnnnnnnnngggnnnnngggggnnnnggnnnnnnnngnnnnnnnnnnnnnnnnnnnnnnnnnnnnnnnnnnnnnnnnnnnnnnnnnnnnnnnnnnnnnnnnnnnnnnnnnnnnnnnnnnnnnnnnnnnnnnnnnnnnnnnnnnnnnnnnnnnnnnnnncnnnnntttctcgctagtgttgtgggcttgccgcttgggtgggttagcttgaggttctattttgattgggccgcttgaagtcctgacttatcgtcgcctacaaagtaaaccagctatatatacccgaaatatcttggcccaacaattgcacggacatttcgaggcccaaaaagacttctgaacttgttcgttctctcctggctttcctctcgaagactcaacagaaccagtgactcgtcgtgaaacgagaagcagcacgcaatccctgcactttagtttctgatgcacaataacatgtggccatggatgtccctgtcgcacatccaggtttcagcttatatattggcaaaaaagaaaaggaaaaggaaccaaaaaaatcaaggacccctgtcgctaacacgtactccctccagtgcagtaaaggtagtcgtttaggacatgattgtgcataccaaggagtgattaattatcatagagtttttcctgtttgcccctattaaatagggatatgggtgcattaatgtcactaaaacaatcaggcttgattggttgctgcagcagctccaaggcattctagactggaggtctcaagttcgattcctcttaaatgcatctttttttgtgcaattactaggggcaacaatgtccaaatcccagacctacgcgtgctatgacttcttttactgcaccggagggagtacgtacaacaccatggagctatagatggccaaacggatcggcacggcccgttgtcggcacggcccgccaggcccggctacaaaccgtgccgtgcccagatgggccggcgtgtgtagttgtgggggcttgaacccacaacctagtgcataagaggcttaaacgcatccatctaaccagtgcaactgcaattttattgtgttattgtttaaacacaataaagnnnnaannnngn

SEQ ID NO: 6739 - DNA, 1045 bp, Zea mays
  misc_feature (8)..(12): n is a, c, g, or t
  misc_feature (16)..(16): n is a, c, g, or t
  misc_feature (18)..(20): n is a, c, g, or t
  misc_feature (24)..(26): n is a, c, g, or t
  misc_feature (168)..(170): n is a, c, g, or t
  misc_feature (921)..(1045): n is a, c, g, or t
  Probeset Number=SeqID_21142
cggccgcnnnnncggngnnngggnnnttattttctggttataaccctatgggctatgaagcatatgttttgctattgtgtcaactactttctccagatctaatcgacaagtaaaatgttctttaaaaaaaaaaaaaaaaaaaaaaaaaaaaaaaaaaaaaaaaagaannnatagcctagagagacagggtccgcaaagcaagcaccgcccggcaaaggcaagaaagagccatccatccatccatcatccccttcctcgtgcgctgctgcctcttgcttctttcttcttcgtctagtaccaagctcaagctagatagatatccatggtttttctctccttgcttgcttgcgaattgctgcaggttgtaagtagataggtgttatacgtagtaggagctactagtagataggcggcgggtgggagaggagatgaagctccatctcctgctgaaggtcctgttcggccccgtgccggtctacttctcggcgctggccatcctcatcctgctgaccaacgcgcagtacttcgggctcggcggcgtcggcgtgccgcgcgccaccaagctggcctcctccacgcaggtggtgagcgtgatgaagtactgcgacatcttccgcggcgagtgggtgcccgacgcggaggcgccctactacaaccacaagacgtgcggcatgatccaggagcaccagaactgcctcaagtacggccgaccggacctcggcttcctcaagtggcgctggaggccgtccggctgcgagctgccgcgcttcgaccccgtccagttcctgcagttcgtccgccacaagtccctcgccttcgtcggggactccctggctcgcaaccatatgcagtccttgctctgcctcctctcacaggtggcgtatcccaaggacatctcggcgaacccgacggaccagaacnnnnnnnnnnnnnnnnnnnnnnnnnnnnnnnnnnnnnnnnnnnnnnnnnnnnnnnnnnnnnnnnnnnnnnnnnnnnnnnnnnnnnnnnnnnnnnnnnnnnnnnnnnnnnnnnnnnnnnnnnnnnn
